United States Patent Application Publication US 2024/0404707 A1 - sequence listing, part 2

SEQ ID NO: 128 - DNA, 9073 bp, Homo sapiens
  source 1..9073: mol_type = other DNA
gtcacagcaccagctcttttataaagagggagacccgctccttctttaacagcagattcgtcaaaatacgtccaaggcaaggaaacctagaaaggcgtctgggcaggggaaagtcgatgcgagggcgggccagggacctttcgtcgcgtccccaccttggcatttcccgtggcgtgagcggccccggcatccgtgtcgaaagtgcggcggcggaacaggcgcgcaggagaggagcggcgcaggcgcagacgcgcgggcgggaagatggcggctgggttcaagtgagtgttggcgggtggcgggtagagttctgtaccctggcggacggcagcttcctttaactcttagctgggattctctcacctggaggccgaccccgttggggtgccatttccttcctcgtcgaggcagacgatgggcgggaggacctggaggttgtcacagtgaaaagaaagggcttcttcctcagtgagacgggagatgaaaggactctgtagagttccatacccgctgcgagcgctcgtgagcgtggtgtgtagtgaacgtgcagtcccaggagacatagttgtaatcttttaaagattgtggccgggcgcggcggttcacgcctgtaatcccagcactttggaggacgaggcgggcggatcacctgacgtcaggagttcgagaccagcctggtgtacatggtgaaacactgtctctaataaaaatataaaaattagccgggcgtggtggcgggcgcctgtagtcccagctactcaggaggctgaggcaggagaatcgcttgaacccgggaggcagaggttgtagtgagccgagatcgcgccactgcactccagcctgggcgacagagtgagactctgtcagaatcaatcaatcaagattgttgcatcagaaccacataccgcctgcttctccctctcccgtaatttatttctaaaaggatcatgcctcgtttggaaggtttttgtgtgtgtgaagccagtggactttcttaaagtttttaaaaaatggataaaataaataggattccaaaggaaatccattatgttgaaatagttatctatgagtataaactccgaagacacgatatagtagtatatatacttggtttaaaattaaccttcgtaaacaagatctagtggcgagactagtagtaactcctgggatttcaaagtaacggtgagcctgaacataccttacacagctaaagggtgcaaacgaaaacatctgtggtctccgtggttgttaaagttgcaggtactgctaatgttactatggcttattgcttacagtcataattgaagaatatgctaaatttcacttacagtgaaaataaagatgtacctttttgtttcctgagttatctagtaagaggttaactattcatgatcactagattattaaaataatcttttttcatgatcactagatcactctgaatccttgtttcagagcaagaacgacatgattcttttgacacagattgagcttttaaagagctcactcaaagggcttttagacgccaatcttctaatcgtttatggcagagttaaggacagcaattgaatgtgattgctactacaaggatttttactttctagaattacttttagttaaaaagttgtggagatttatgctgcatcaccacacttaagatctttgccaatttctggatttatgttaagattcatcagtttatctcagatatatttttaacacgtgtttcagaaccgtggaacctctggagtattacaggagatttctggtgagtaaaggttatgtacatgttatgcgttttgataacgagctgcttttaaagatgaatttcaagtaatttaaattaatccatttgaagtaacatttaatgtgtgtgtaaaacttgtgatagatgtgtaaaatatgtaataggtataatctatttttatataaacatatttatttagaaagagaactgccgtcctgatggaagagaacttggtgaattcagaaccacaactgtcaacatcggtaaggatgtattttccactttcaactgtatgatattcccaagttttagtctatgaaccagccaaacagtttttcacccaaattctttgtctaaaggatttgatgattttttttgtcaagagatttttatccgtacaaaagccctgtaactaaatgaaaaatgattaacacaaattcaaggacaggtgaataattatttaaacactaatttaaaatagttatgtaaaaatcaattattctaacttgaaatattcataagcaactgagaggggtagcaagataatcgtacacagcaaactaaaacacttaattttaattattatgtggataattttgtagctgttttccttttatgaacctttcattttgcttatcttttcaggttcaattagtaccgcagatggttctgctttagtgaagttgggaaatactacagtaatctgtggagttaaagcagtaagtctaaatatgtcctattgagatttgagttacaaagttagctttatttattagattgtaatatacacctgtaattctactcttgatttggtagttgggtgtcaatttttaatgtttaatttcccaagagctttcactatgagtgttagataatatgacccaagtttaatgactaagtgaacaattgtcaaatgtagcaaaatgaaacaacttttaaaatctgagtcaccattttaaaaaaattgttatatcatttgagacattaacagatttttggtgacatccttttagccagtgatgacatgtaatctgtgtaaatgtgtagaaaattgaaattgttgaaaagaaaaatttgagggaatactggctaccatttactgagtacttgctatgttccagacacctttttaggtgctttacagaattatccactttaatgcctataacaatcatttgttacttgtcttcacctcctgttttacagatgactttcagtaacctgtccaggtacataagactcataagtaaaacttagacataaatctgactccaaagcctgtgcttctttgactacagtataccctgtgttatttaacctcagttgagattcttctttcgtaaacctggagtgatgtataacagtaagatttgagaacttgctccttgtcaggttttatgcctgggatttaacaggtctatctcatttggcccttattaacagtccctaggagtagacactattttcttcccatttgacaagatgaggagtttaaggtaagaggttaaataacttgcctgaagtctctcagccagtaagtatggctctgacatttgaactggcttagtaattgcagagcatttgcttttttttttttttttgagacggagtcttgctctgtcgcccaggctggagtgcagtggcacgatgtcagctcactgcaagttccgtctcctgggttgaagtgattctcctgcctcagcctcccaagtagctgggattacaggcgcccgccaccatgcctggctaatttttgtatttttagtagagacggggttttgccatcttggccaggctggtctcaaactcctgacctcaggtgatccgcccgcctctgtgtcccaaagtgctgggattaccggtgtgagccaccgcgcccagctgagcttttgctctttaccactaaagcagcagttcctaaatcttgctctatcatctggagaacaaattaagattcttggctagtagttgggggcacaaacccagttactattttttaaaagatctccaggtaatcttgccgagcagcactgtagtgtagtccactgtactgtagtgccttcttatcttgtagagctattgtgaggatcagcaccaatgtccgtagaggccctgacacaattccctaagctgatatttgatagagccttccataactgattgctaaattgtcttcataatttttcagtagcttctttcaataggaaacatttctttgctactataggaatttgcagcaccatcaacagatgcccctgataaaggatacgttggtaagttaaatggttttgtaattttaatacaaatacttttaacacatttaataatttttagttaagtcctagttaagttgatgtaaagaaaattattcctaatattcggaaatatttatgaataaaacaaattcctcaaaagttttccgtgtgttagtaaaagatagcataatagcaggatatagaatttcataaatttaacctttatcaaacttgtttgctcaatttttgtttatacattcataagttactaaccaagaaaatagaattttggctgggtgtggtgactcacacctataataccaggattttgggaggccaagacagcaggatcgcttcagcccagcagttcaagaccagcctgggaaacaaaggagaccccgtatctacaaaaaaaatcaagttagctgggtgtgccagtgcacacctgtgtcccagctacttgggaggctgaagcaggaggattgcttgagcctgggaggttgaggctacaatgaactataattgtgtcactgcattcaagcctgagtgacagagtgaaaccctgtttcaaaagaaaaaaaaaatagaatggaatttttttaagtcaaagaactgtcattgcacaccttttgtttccataaagattctttgctttatacaactgctatttttttcttgccttggaaccatctgttctttatggtaggaaccaacattttttttaaatgagaaaaacagttggatgttagcagaggggctatatatacttcagttacagattgaggtattttgaaagataccaggaaaactcgtaaaggatttagaattgaggtctaaaatagattttttaaaaaggcatatgggggaaaaatgtcagaaaaatagaaatttcatggctgggagtcttagagagaccaaacagaatataactataatgttacaatgtattctactcagaagagcctgtccatggccacagttgcctttactgtggattgataatacctttaacacttcagtaatccataaattgaaaagtttaggccgggcatggtggctcacacctgtaacctcagcactttgcgaggctgaggcgggcggatcacgaggtcaggcgatcgagaccatcttggccaatatggtaaaaccctgtctactaaaatacaaaaaattagccgggcgtggtggcgtgtgcctgtaatctcagctacttgggaggctgaggcaaggaaatctcttgaacctgggaggtagaggttgcagtaagctgagatcgcaccaatgcactccagcctggcaacagagcaagactccatctcaaaaaaaaaaaaaaaaaaaaaaaggtttagttcatagctgcagagtgtttctttcagttcctaatgtggatctaccacccctgtgttcatcgagattccggtctggacctcctggagaagaggcccaagtggctagccagttcattgcagatgtcattgaaaagtaagagcaccatgataaaattttattacaattcattttcagatagttttgggcttttcatttactttgctctttgtcattaaatcaagttcacagataattcagaaagaggacttatgcatttctccaggaaaggtaagaggaatagagaagctataagttcttattaattctgaagggattttttttttgtgggggaaagtgaacaaggaaattaaaaccaccaatcaaagtagctttaaatatggatgtcttacagattttagagattcagtaatttcttactctataattctctaaatgaaccatattgtttataaaaaaacaagtttgactaacttactgcctgtctgggagctaccttttaaactgaagtaatttttttcccccttaacttttaaagttcaatcattttttattccttatagcagattataacattaatcatgttaacatatgtttatggtgaatccacacagtagattccaaagtctatttgaaaatgtaaaactaggttgattagaacctagagaggctttcctactagatcatataaactgatacattagcactgtaaaacttaaacatttcatgtattatgagaacgtgcattttgaattttagctagggctttcaaaaccatctcccttatctgtaacctcccaatgagaatggaaattccttctacatctgtagctccattaagggaaatggacatgtttgtcatttgtcagcctggcaatcaaaagccagctttcacaaaacctgtccactttcttctggttttctatagaactttaaaaaggtgaagcattttcttaaggtttttgagccttgaaagttatcttgcttgtttaaccaagggttctgtggttcttaagtctaagctaatagcatgttctacccattagaagactttaatttccttttgtgtttaattctattttagcttgtctgggttctatactgtgatctcatttgcctcgactacgatggaaacattttggatgcctgcacatttgctttgctagcggctttaaaaaatggtaagcagccttacaaaaaaggcaatattcccactcatgggttagaatgttgttttgtgaaacttttaatgtacatttgctttcgtatgcttccaaattaatgaatgtaatgctgacatgactttccaaatatagttgatagttgtatattctctaactgaatgctctttagagtgctgctttgactgtacccatctacttaagttaggacttcagtcctttccaaaatagtgttaatattggtgggagaaggagacaagagttgtaacttctggctaggtgattggtgaagatctgccagtatcctcatagttctttatgtgatattgccaaaagaagtagaatggattctgttgtttttactgtgaggccatagtaatagggaagtttcttagcaaggagtctaggttgactgattagttacagatttcaataacttgtgcatattccctatcattgatgaatgatgaattggtaggaacaaataattggaggtggaatataaagttagcacagcaatattatagtagagtggttaagtgaattggaggtagaaaatgaagtcagcaaaatattataatagactggttaaagtagattcctggctctctcactctgtgctgaagtttccttatctataataaaatagggataatagtacttactttgtaagagtattgattaggtgaatacaatgaaaatatgaaaatgcttaaaacagtacctggcagatataaatttaaaaaaaaatcattgacttcttaaacttaaaaaaaaattatgcaataagcactaggtaggaatgtcagatgttgtgaaaagcaatgtatatcctctatatttaccttagtggctgtaaggtgctttttaaaaagaaatgttctgggcaagttaaatagagggaaaggtgaattaaaaaaaaaaaagcttagaaatcatttgtttcttagagacttacttactttacaaatttgccttttcttagtacagttgcctgaagttactataaatgaagaaactgctttagcagaagttaatttaaagaagaaaagttatttgaatattagaactcatccagttgcaacttcctttgctgtgtttgatgagtaagttaatcaaacttactttaaaattttctatatttaagattagggtaattgatgttcagcattctaactctttaggaagtgctatggtgaccctacatcctagttttccctggacacttgagtttctacttgtccctgcacaattatttctagtcactgcacaattattacctgttccttggtttacttatacctgtgtaatgttaatttccaattctttcactataagatttatctgaagctatcttcaatattttccaaggattttagcacgttcagaaatagaagagcagggccgggcatggtggctcatgcctgtaatcccagcactttgggaggctgaggcaggggatcacctgaggtcaagaattcaagaccagcctggccaacatgttgaaaccctgtctctactaaaaacacaaaaattagctgggtgtgatggcgtgtgcctgttaattccagctacttgggaggctgatagtatgtttagtattttaaagtaaaatttgttccatggattgataacttatatttttttctttttatagcactttgcttatagttgaccctactggagaggaggaacatctggcaacaggaaccttaacaatagtaatggatgaggaaggcaaactctgttgtcttcacaaaccaggcatgttcccgccacttcagtcctaaacatatgtagatgaaaactcagtgtgagccttaaattagggagggccaaatagaatatgggatattttatttacctaattttagtatagtttcttagctacctaaaatgttcttccatcttaatggtatatgtcagtggttcttaaacttaagacatacattagaatcacttggaggtcttgtgaaactaacttgtagatcttgagactgtaccctgatttacattatccaatttttttgttttataatttgacatgacattaatgttttttgaaaaggaatgataactgagattaaaagtattggcaaaataatttttcaggtggaagtgggctaactggagctaaacttcaggactgtatgagccgagcagttacaagacacaaagaagttaaaaaactgatggatgaagtaattaagagtatgaaacccaaataaacagccaccacattttcaaaacagatttgtaaaaattgtatttgttaacactgtgcacaaacgttttatactaaataaatatcaaactacattcttctgaaagatgtttctattatttcttaggtcacttccatatatattatgtatagtgaaaccatttttaaaaagcaatgacttaggcaaaccaaccctagtttgttaaaccatttccctgtttttatttaaaaatgataaggttgtgcttctgtataaagtttgtacatctagcaatgtaaaatactgacacattaaaaaaaacaaaaagtagaaactcaa

SEQ ID NO: 129 - DNA, 21271 bp, Homo sapiens
  source 1..21271: mol_type = other DNA
ccggccccggcaactgcagtccaggctccgcctccctacgcccattggcttattcaattcacgcaggaaccaatgggcggagacggcagccgcgccgtctgacggcttagccgcggtgcagactgcggcggcggtggtctgaggaagttctatcttggcgctaaagcggagacgcatcccccgacccgaggctacgatgagcacaccggccgtgccccaggacctgcagctgcccccgagtcagagggcgcagtccgcattcaaaggtgaaggccgcggtggcggtggcggtggcggtggcggtggcggtggcgggcgcgggcccggcggtcggggctcggggccgcgctggcgcgcttcacctctcccccgctctgtgagatccctgaacgcggcgtcggcctcgccctgcctcattcttggccttgtggaacggatcataaaaacaggaaccgctgcgtggtgttactgtgcggtcgctgctggctgggatgggccctcctaagaaggaatccgttaggcgaggggaaacgcgcgggcctcaggccggggtcggtgtcggagaccctgggtccgcttgggggcggggctgcacaggttcagggaccgactgcgcctgcgctgggtcctccgcctcttaggtccctagcgaatttctgcagggctggggtcgcatcatgtgttatttccaatttcacagcttctccttcgactttatggaaaccgagggttggttgggtcttcaaaactaatattgttattcccttattctacacacgggaaagcagaagaaagtaattctcatctaacccagttctggtaaattagaactttcgagtctagtgcctcacttctaccatttagtttcttaaagcttggctagcaggagctgtatgtagaaaatgatgttctccagatttttcacagggagtagagaatgtgattcttatgcagaggggttttggggacctgttgtggtaacagtctcttctaaggtgatttctcaaaggcaatattgaattggagaattttctgttatatagatgtgacctcaggtggaaccagctttggaagtaaactcttcatttagtcaacaagatttatttgccgttatcgatgttttaactaatattgacttgtagctcttacctttgttatctagagcaaagaagacaaaaactcaaggaacatctgttgagaagaaaaacgctttttgcatacaagcaggaaaatgagatgttatccaggtaaggtcaagtttatttcttttcacttctgtaaaattgtatcagatctgtccaatgaaaatgtaaagtaagccatatctgtaattttaaattttctagtagccacatttagaaaaactgcttacatattattttacgtctttttgtggtacaacgtctttaaaatctggtgtctattttacagttacaggacatttccatttggtctatccacatttcaagcactcagtagccacattggctagtggctactttattggatggtgcagcattagatcatcgttttattaatttttttttttttgagacagagtctcactctgttgccaggttggagtgcagtagcgtgatcttggctcactgcagcctccaccttctgggttcaagtgaatctcctgcctcagcttcccaaatacctgggactgactacaggcaagtgccaccattccctgctaatttttgtattttaaacagagaccgggtttcactatgttggccgggctggtcttggactcctgaccttgagatccgcccacctcagcctctgaaagtgctgtgattacaaggatgagccaccgcgcccggcctagattatcgttttctacgtaaattaattcacagtctaagagaaaaaaacaattataaagcaaagtatgtgcatagactagattatcaacttactgtttacaccacacaaaggtcagtctttctattatttagcaaagctttttactcagtgtatgggggagttcatcagggaagggttgggtggccctcccaaatgcttagagattactagttgtagtctcaaccctccacagaaatatctttattattttgttaaaatatcttagatagtacatagctgtagcaaaaacaaaaacccatgaaagtagatgaagcagaaaggcaaaaggtcccctcactctctagggataaccagtaataacatccttacaggcttaggctgggtgctgtggcttacacctgtaatcccagcactttaggaggctgaggtgggcagatcacgaggtcaggagatcaagaccagcctggctaacacagtgaaaccccgtctctactaaaaatacaaaaaattagccaggcatggtggtgggtgcttgtaatcccagctactggggaggctgaggcaggagaatcgcttgaacctgggagatggaggttgcagtgagccgagatcgtgccattgcactccagcctgggtgacagagcgagactccgtctcaaaaaaaaaaaaaattgtctcaggtaaacaaaattgtatataccacccacacacatattcagagagtggaaatgataacgcaaatgggataaaaattttaacaataggtggatcctgggtaaagagtgtacagatattctttgacctgtttatatttttgcaactttgtgtaagtttggcattctaaaattttaaaaataatttctaactttatattaataagttgctttagtttggaataaacagtttatccttcacaaataaatcttttatttctttgtttaagacaaaaaggtgatcctaggttttttatttgaataagtaaatgaatggtgataaccgtatactgaaataggaagcctgaaggaggagctggggaattaggagttctgttttgactatgtttgaggtaccaaccagacatccaagcagatatgccaaataattgtgtgtctgaagttcaggggaggggttggggctggaagcataaactcaggaattgattagtatacagatgatatttacttaaaaaccttaggatggaatgaaattactagggaataagtagagataatatggattcagacagtgactctcaaccacttatttaaataaagaatccaacaaggtcaggggtttataatactcttaataggaagaaaagaaaattctaaaacgcttcatgtggcttaagtactacatttattcctttcagaaaacagatgttggctgggtgcagtggctcatgcctgtaatcccagcactttgggaggctgaggcgggtgtatcacttgaggtcaagagttctagaccagcctggccaacatggtgaaaccccgtctctactaaaaatataaaaattagccgggtgtggtgtcaggcgcctgtaattccggggagggccgaggcagaagaatcgcttgaacctgggaggcggaggttgcagtgagccaagatcaggccatcgcactccagcctgggtgacaagagcgagactttgtctcaaaaaaaaaaaaaaggaaaacagatgtcaatttaaatgttatcacctcagcagtgaatcattaaataagacaaccaacctgtgttgcagcttttcagaattaaacagttatattttacaatctctaaagtatagatatcctaagactcatttccgataacccttctgagggcagttttataataagacagaataggattaagtctccccactggacaggtgagtaagatgggttcttcttgtcatcctgagttttgttttgttagctggcagttagctactaagataccctgttaagtggcacattttgatcttccttcaccattgttcaaaatgtatagtacaggttgtgtcaaagttctgttccttctccaagctgacagaacaaatagatatgaaaggcaatgtaagcaaaattattaactactaaattatgtcaaatgtaaaatatatatatatatattttgttttgttttgtttttttgagacggagccttgctctgtcgcctaggctatagtgcagtggcgcgatctcagctcactgcaacctctgcctcgtgggttcaagcgattctcctgcctcagcctccagggtagctgggattacaagcatttgccaccatgcctggccaatatttttgattttagtagagacagggtttcgccgtgttggccaggctggtctcaaactcctgacctgaggtgatctgcccaccttctctacccagagtgctaggattacaggtgtgacccactgttcctggcctcattttttttttcagagaatgagagatcacgcattttaatgtgatctctgaacttaggatctgtcttaaaatcaatggcatgtctaattgaccgtattttttcctatcgttatagtacacaaaattgttaaaatcacttgctaagagatgctcacagtctgccttagccagtttatagctgtaaaaataagttaagtcagtttcttgaggagggattttctttgcaataccgcctagaaactaacgttcttttttttgagagatgatctcattctgtgtcactcagcctctagtgcagtgacgggatcttggcccactgcctcaactcccaggctcaagcagtcctccaccccagcctcccaagtagctgggactatggcacccaccaccacacccaactaattttttatttttttgtagagatggggttttgccgtgttgcccaggctgctctcgaactcctgagctcaagtaatccccccacctcggcctcccaaagtgctgctattacaggcatgagccaccacaaccagcagtgcatattcttaatgtatcctaatataaattaagctgtgaatggcatatggtaatttttggatcacttctgggagggctctttaataaaagtattttcaatgtagtacatctgttactaagtacttaaaactaacccaaggaggtattacttactaaaggttatttgaagacttgtttgaatgacttgagaatgatttgaaataagattattaagtatttacaaattctatgggcagagagtgttaggacttttagaaaatatctttaaattcctcagccatttgtttacactatttttttttgagacagagtctctctctgtcacccaggctggagtgcagtggctcgatcttggctcactgcgaactccgcctcccgggttcatgccattctccttcctcagcctccctagtagctgggactacaggactacaagcgcccgccaccatgcccggctaattttttgtatttttagtagagacggggtttcactgtgttagtcaggatggtctcgatctcctgacctcgtgatctgcccacctcggcctcccaaagtgctgggattacaggcatgagccaccgcgcctggccgcttaggacaaatttcaactcaggtcttttttaaatttaaaattagtaagtcagttaattgttaacattgccctcttcttcctccccaaaaggaagcctccttggtacaggattgattgatcattttgtttgtttgtttttaagtagtagagatcagagagttgtgacatctgaggaccaagttcaagaagggactaaagtgctgaaacttaaaacaaaaatggtaagatgtggacatagcactcttaaactgtccccttttccattttgcctttcctaaacacttttcttaaataattctttcaggctgataaagaaaacatgaagagacctgcagagagcaaaaataatacagtggtggggaaacattgtattcctttaaaaccttcaaatgaactaaccaattcaactgtagtaattgacacacataaacctaaggatagtaatcaaactccgcatttgttactaactgaagatgatccccaaagtcaacatatgacattaagccaggcatttcaccttaaaaacaatagtaaaaagaaacaaatgactacagaaaaacaaaagcaagatgctaacatgcccaagaaacctgtgcttggatcttatcgtggccagattgttcagtctaagattaattcatttagaaaacctctacaagtcaaagatgagagttctgcagcaacaaagaaactttcagccactatacctaaagccacaaaacctcagcctgtaaacaccagcagtgtaacagtgaaaagtaatagatcctccaatatgactgccactactaaatttgtgagcactacatctcagaacacacaacttgtgcgacctcctattagaagtcatcacagtaatacccgggacactgtgaaacaaggcatcagtagaacttctgccaatgttacaatccggaaagggcctcatgaaaaagaactattacaatcaaaaacagctttatctagtgtcaaaaccagttcttctcaaggtataataagaaataagactctatcaagatccatagcatctgaagttatagccaggcctgcttcattgtctaatgataaactgatggaaaagtcagagcccgttgaccagcgaagacatactgcaggaaaagcaattgttgatagtagatcagctcagcccaaagaaacctcggaagagagaaagtaagtagatataattttctttattacattagttttcaataaagtactgtttgtagatttggattataatttccttgactgcattagaattttctttcatggtttctcttctgtcatatgcaggcaaatttatattgtggaacaatatgacctaaaagtttttgtgtttgagtatgttttataaggttgctttttaaaatctaaggtaaatgcttaataataattgggaaatactttataatctcaaatcaaaaaatgcattcatggaatcattgagcataattgacgttgatatgtttaatatttcttcaagcttgtgaactatatatgccattaaagtaagattacttaaaaatatgattttttcttttaactttatttgacagagttctgtcagcaatttcaaagtaacgtttatatctgcttctaactatagagctcgtctgagtgagtggaaagctggcaaaggaagagtgctaaaaaggccccctaattcagtagttactcagcatgagcctgcaggacaaaatgaaaaaccagttgggtctttttggactaccatggcagaagaagatgaacaaagattatttactgaaaaagtaaacaacacattttctgaatgcctgaacttgattaatgaggtagagtctttatatttgcttagcattttatagtttgcaaattaccttcataagcattatttcattaaattatattgtcagtctttttgaccaggtgatgttggtgatactatgttgacttaacattaactgtgaggttattttaacaattatttaattgcgagatacactgcttcattcattaattgtgagcttattagcctttaactgactacattttgcattgagttcatataaatatacaggttgagtatcccttatccaaaatgcttgggaccagaagtaattgaagatgttttttgttggattttggaatatttgcatatacataatgagttatcttggggatgagatccacaaagttcatttacgttttgtttgtttgtttgcttttgagacagtcactctcacccaagctggagtgcagtggtgtgatctcagctcactgtaacctctgcctcctgggttgaagcccttctcctgcctcagcctccagagtagctgggattacaagtgtgcaccacacgcctggctaattttttgtatttttagtagagacagggtttcaccatgttggtcaggctggtctcaaactcctgacctcatgtgatccacccacctcggcctcccaaagtgctgggattacaggtgtgagccactgcgctcggcctcattcatgttttatatacagcttatacacgtagcctaaagatagaatactttttatagttttgtgcatgaagcaaagtttgtatacattgaaccattagaaagcaaaggtgtcactttgtcagccacccatgggacagtctggttgtttggcaacaccatcattcctcactctgaatttccatgctaccaataagcaattattctcttacatttattcacacataattaattaacagtttaaaaaaagacacattaatacagtgaaaaatatgttcagagtaattaagcagcacagtagcatcatcagaacgcctgtatcagctgttagacaatagcaacaacaaacagcagcacgttttcaatctccatctatgatgttgtgtttaattaagaggtattttacaccgtgttttatttttttaggtgagaagaaacaccagaagcagttgagggaccaggaagtgggttctctagggataaggaggcattctgctgggtggctttttaagatatttacttcagagtcatctgcctcattagcaatggtttttgtcttagaagtttctctttgattttataaagggacatgatttctttttctgttctggataaatgctgctctagttcttcagtaagcctgttgcatactttcaccttgtcgcctgtaggtacattttctgcagtgttaatgatggtcatctgcattgtgatgttgatactcaaaagttttggatttcagattttggattttcagattagggatactcaacctgtatcaaagggataattgggtttttttactgaattacaaatatttgatttctctgagctaattaatatgtaatacactgaggtgatatttacttactgcttctaatattttgtttcttacatctattcattatatttacacattattttttacgttcattacacattttaccaaagactagcaacacaaatactgtgtgagtcattattatcacagattaagttacctaaaatactcaaaaaaaaaatcccattcatctggtcaggtggggtggctcacgcctgtaatcccagcactttgggaggccaaggcgggcggatcacccaaggtcaggagtttgagaccagcctggccaacatggtaaaactctgtctctactaaaaatacaaaaattagctgggcatggaggcgggtgcctgtaatctcagctactcagaaggctgaggctggagaatcgcttgaacctgggaggcagaggttgcagtgagccgagattgtgccgttgcactccagcctgggcaacaagagcaaaactccgtctcaaaaaaaaaaaaaaaaaaaaacaatcccattcatctaagccaacatcatcatgtttttgaatttattgcagaattttgctatttggaccaaaatcctatggagtataataatcagctccagaacaatattctgtttaataatagataatatctttgtttcctgactgctctttaatcttgttttggtcacccactagtgtgtaagatccacagcaaaactgaattcaaggtatgatttcaaactttactcttcatgagcatcttttaacttcttgtggttctgaacaccagtaaaagttacaatcaggaaaactcttgagtctctaatagaatagaattagagtttatttctgctcagtttaagtttttccttttgatactatgaactttttctgccctattatttaattatatgtaactgtgacataaaccattacagattcattttaatcttaatatcaaaacctgataaagacgaggaaaaaaaactccgcagactattcttactcataaacatttggtagaaggtattaacaaatggaatcccacaatatatatgaggataaaatcaagatcaaataagtgttcattttttactaataaatttctcaactaatgtttcatttttttgctttatgcttagggctatcgttatcattgatcttgactatagtaggctcaattattgttcccactttgtaagctaaaaaatattacacacattttttcttgcttttttagggatgtccaaaagaagatatactggtcacactgaatgacctgattaaaaatattccagatgccaaaaagcttgttaagtattggatatgtcttgcacttattgaaccaatcacaagtcctattgaaaatattattgcaatctatgagaaagccattctggcaggggctcaggtaagataaaaatttactgatctttacaattacagtgtagtagacaattcggaattaatttgaaacacatcacaacataacttgagaaaattttctttgtatatgtagtggtaataaatgtttaaaggctgcaaggattgcattataaaagctgtttgttggctttctaagtcttttattcctgtattgggaataatcagattttagaaaatggatataagctgaaatgtatatttaatgaaactttctgcatgaaatgttttagcatattattgtatgcatttcctggttggaagtttactgggagactgaatgtaatattaaaatttgtttattgaatataaagcaaaagggattaaattcgctttttaaatgttatcaagctctcttggttttgtgtgagaactctttaagagtaaacccgaatgtactcatatatgtatatatatacacacatatatatacacacatatatatacacatatatatgcacacatatatacacacatatatgcacacatatatgcacacatatatatacacacatacacatatatacacatatacacatatatacacacacacatatatatataatatgtatacactgtatatattggtcctttctgcatacagaaaatggcaataaaccggtttctctaacattattacctctatagtgcctcgataccatactccttatctcttctagcgtattgatacacaaagttttgggtatagaataaatcatttcttgagttttttgtttggttgggtttttgtttttatggatacatgttcttcaaatatgtttccttttgaccaggtttctcagaaacacattcttggagattgtttacatagataattttttaaaactcccttttaagaaagatctattcacctttgtctcaacaaaatcaacgaacgctatttgacttttcacttaaataaaaaatcagatattcagcagatagtctgtcagtggctgtcatgtgtaaaactttctagaatggtaattatatttgacagaatgctacctggaggggagtgttaggcccctactacattgtatcagaagggacattacttaaggcagctaaggacattgtagcaaggatgcaaaactggagccaaggctcacatagaaagcaataatgtaaacagcaagatgtaacaccagaggaaaagctgctggaaaacaagaatcaaaattagccaacatggctgggcacagtagtggatacctatagtctcaactacttgggaggccaaggtgggaggattgcctgagcccaggagtttgagtccagcctgggcaacatagaccccatctcttaaaattagtggccaggcatgatggttcacggctgtaatcccaacacgttgggaagccgaggcgggaggatcgtttgagtccaagagttcaagaccagcctgggcaagagggtgagaccccccatctctgcaaaaaataaaatttttaaagttttttttttggtggtagacagttgtggtcacagctatacgggaagctgaagtgggagaattgcttgagctctggggttcaagactagtgagccatgattatgccactgaactccatcctgagtcaacagagcaacaccctgtctcaaaaaaaaaaaaaaaaaaaattagccaagaaaactgaaagcaggatagctgagtaattcaggactcagttctggaactaagactgtgaattacaccttccctaatcttgattgtgttgggtggaacatagcaaatgcttaggtaaataatggtcacttagtaattttttgtaaatttttgaatgaatgaagtatgttgagatgatcaaccttagctcttcagagatacatttcatagcatatgaaacaaaaatataaccatagacttaaatgtaagagaaaaggagcaagacttaagtaaaattatggaggaagttttaaaatatgaaattctaggccaggcgtggtggctcacacctgtaatcccagcactttgggaggccggcaaatcatgaggtcaggagttcaagcaagcctggccagcatggtgaaactctgcctctactaaaaatacaaaaaattagctgggcatggtggtgcccacccgtaatcccagctactcgagaggctgaggcaagagaatcatttgaacctgggaggctgaggttacaatgagccgagatcgcaccactgcattccatcctggcaatagagggagactgtctcaaaaaaagaaaaaagaaaaaaaaggaaaagaaattctatccttcatttttactctataaattggaaaagacagccatttttcgtttttggtttttttgtttttgtttttgttttttttttttgagatggagtctcactctctcgcccaggctagagtgcagtggcatgatctcggctcactgcaagctccgcttcctgggttcacgccattctcctgcctcagcctcccgagtaactgggactacaggcgcctgccaccacgcccggctcatttttttgtgtttttagtagagacggggtttcaccgtgttagccaggatggtcttgatctcctgacctcgtgatctgcccgtctaggcctcccaaagtgctgggattacaggcgtgagccatcgtgcccagccaagacagccatttttcaatcttaattgtaagtggtctgagaagcatggtttaagagccactcttactttaaaatacagtatgaaaatttaatcgcgacttggatacctagttaatgtcagagaaaataaaacttacatggatctgctttcttcattaaaaaaattaagcctattgaagagatgcgacacacgattgtagatattctaacaatgaagagtcaagaaaaagctaatttaggtaagttttagttattttatttccttcatgtgaactgtagtttttttttgttgttgttttttaacttttattttaagatcaggagtacgtgtgcaggatgtgcaggtttgttacaaaggtaaatgtgtgtcatgggggtttgttgtacagattattttatcacccaggtattaagcctagtatccattatttttcctgatcctctccctcctccaacccatgtgccccagtgtgtgttgttctttagctgtccatgtgttctcatcacttaactcccacatgcagtatttagttttctgttcctgtgtttgcgaaggataatggcctccagctccatccatgttcctgcaaaggacatgatctcattcctttttatagctgcatagtattccatggtgtatatgtacattttctttatccagtctatcattgatgggcatctggattgattctatgtctttgctattgtgactagtgctgcaataaacatatgcgtgcatggatctttataatagaatgatttatattcctttgggtatatacccagtaatgggattactggattgaaagtatttctgtctctaggtctttgaggaatcgccacactgtcttccacaatggttgaactaatttatactcccaccaacaatgtaaacgcattcctttttctccacaaccctgccagcatctgctatttctttggccttttaaggatagccattctgactggtgtgagatggtatttcattgtgaattgtagttttattgtttctttgctgaattagtttttcttttatctttttaaatttttaaaatatgtaggtttctttcctcatacttctgttgacctgcctctgagataaagtggctttatgtagtataaagaatttttaattaggagatctggctcaatatttagatttgtcactgaatgtctgtgaaagttgcattgtctctctaggctttgtctgccttaaaatgaggcagtttgactagatatccagacttttcacctgttaaattctgtgatctgttgtgttggctagaaaagctcatttaagaattctctttgctggggatagtagatggagataagagattcattagttgccagtcataaaaacattttaagattcagataaagtttatgccagttgatatgattttaggcaaaaaataccctcttatctgtaaaatacagattttttgggaccattgaatgaaataatatttatttatttatttatttattttttttttgagacggagtctcgctctgtcgcccaggccagactgcggactgcagtggcgcaatctcggctcactgcaagctccgcctcccgggttcacgccattctcctgcctcagcctcccgagtagctgggactacaggcgcccgccaccgcgcccggctaattttttgtatttttagtagagacggggtttcaccttgttagccaggatggtctcgatctcctgacctcatgatccacccgcctcggccttccaaagtgctgggattacaggcgtgagccaccgtgaaataatatttataaagtatcatagtctatgacacatagtaaagtcattaaactgtagtcattaatattaattaactttagaaaaatggttttcaattatttgctgtaactgtatattatacagtcaacaaatatttgagtgcatattatataccatcgcctatatatctagttattttcttttgattaattttaacaagagtcaaacagtttgaactttttcttttttttttttttgaaagagtcttgctctgttgcccaggctggagttcagtggcgcaatctcggctcactgcaacctccgcctcctgggttcaagcgattctcccgcctcagcctcctgagtagctgggattacaggcatgcgccaccttgcccggctaattttgtatttttagtagagatggggttttgccatgttaggcaggctggtcttgaactcctgacctcaggtgatccgcccaccttggccttccaaagtgctgggatgacaggtgtgagccaccgcacccggccaacagtttgaacttttaaagtctcctgatacatgctgccagattgctttccagaacagtattagtacctttttagtatgcaaaattaatttaagatgtagagatctaggttgaagggctaaaccttaaaaaaaaatcaaagagcatactaaagttctaaattaagtatgttatgtaagcttttgattacatgtattaactgaaaaaaaaaacttgttcattggggttaatatgctaatggctgtgttggaggtcatgcttctaatggcagcatgcttagttcatcatggattatttcaatttatggtgactgctaatatgtaccaagggaacatacagaacatctatatgatctgatcttactagtagtatttagtgaaggagcttgagaaggagggagagaagggaaaaccgaggaaagattagtgtaccacaaacaaaaggaggagaaaagtttaagaataacccagtcctggccgggcatggtggctcacgcctgtaatcccagcactttgggaggcctaggcgggtggatcacgaagtcaagagatcgagaccatcctggccaacatggtgaaaccccgtctccactaaaaatacaaaaattagctgggcatggtagcatgtgcctgtaatcccagctactcggggggctgaggcaggagaatctcttgaacccgggaagtggaggttgcagtgagccaagatcgcaccactgcactccagcctggtgacagagtgagactccgtgtcaaaaagaaaaataaaaaaaaagaataacccagtcctgtctcttattcacaaaagacagcgacgtggaaattcaaatttcataaaaagatctctcataattctatttctggagatatgtggaaagataaaagcagtattctgattaagttgctcttcctatcttataggatagtactagttggtgttttctagcaggtatcattagtctttagatgggggaaggaggtatccataaactcttggctttctgaaatgtataattgtaagttctggatataaaaccaatttcacaaatcagttatttgtgaacagcaaaagaacataagtggtcgaagtagttcagaagagggttaaaaaaaaaaaaaggacaaataataagaaacaagcaccacgtgggtgtttcatagctacctgaaacacaaatagccaaacttgaacacataattttcccctaaacctgattattcttttagttctctgtcttaatgaatggccttgtttggttgtccaggtcagaatcttggtgtgattgtttactccttctttctttcccagttcccaaccttttttccccagctaatcaaattcagtttaacttcctaagtatttcttaagatctatctacttcactccattcctactctcctttgtatagtcaagatgacctacacgcttacctagactataacagtggtcttcaaacttaagtttcctgcctctctgctcttcattccaatccattctcaacactgcaaccaaaatgttctgtcactcatctgcataaattcctgagtccagcctcttctctttccctctcccctacatccctgaatttctctttctttttttccatttcctgaaaggtttttactctcttttccctccaggtctctccaagacaatcttctactttttcttaatttctgcttatcctttagacttcaattcaaatgttagttccttggagtagccttccctgatgatttccctgatataccatcccctctcctctcaacctaggtttagtgcacctgttttgtgctccctgtttttttccctatgcaatatttgatgcatttgattgtactatgtagttgtttgtcctgtcttttgcatatgtaaactcagtagataaggacagtgtctgatgttcctgaccattgagtctcctgtgctaatgcaatgcctgacacatatttggcacttaaatatttgttgaattaatctatattcttttctctccttcagcttccacttaaaactcagtcactatcatgcaactaaaacttctcttagtaaaaatttttaataattttcctaataattaaattcagaggtttttttttccagctcaatggattcaccaggatgtctcacaagtatttccagcctaacatgttttattttgaactctttgtctgccctcactgctttcccatgcccagtatccctttcccatacccaacatccctttctcccaaaaaagaaaagaaaaaactcttctctggcatttatgactcttaagaaatgttggataagacgctcctaatacatttgcacactcattcctacacagtcatgtattcatttgttaataagttctgacttgggtgggtgtggtggctcacgcctataatcccaacaccagaagtccaaggtggaagaatcgcttgaggtctagaattcgagaccatccttggcaacatagtgagaccccatctctacaaaaagtaaaaattagctgggtatggtggtacacacctttaggcccagctacttgggaggctttggcaggaggatcacttgaacctgggaagttgaggctgcagtgagctaagattatgccactgcactccatcctaggtgacagaacggcagacaccctgtctctaaaaaaaaaaaaaaaatgttctcagaaatatttctcagattggacccttcctttcctatctgatctcttcctaacttacttaggctattacaacaaccttgtcttcttgccatcacagattgttacttttcattctctgccattctagacagtcctttacattgaccaaatttaattatgtctgtctctggtgaattttttttaccaaacttctttcatataaagctcattacaatctagctctctggtgaattttttttaccaaacttctttcatataaagctcattacaatctagctcttgtttacctatctaagctcaatacctcctgctcccactcctaaccttgttccttaccctatattctaaacacactggctctttaatgttatgttaatttaatagatcattttcttttatgtgccatatgaaggttgtcttccttggtcttgatcaagtactcatttttaagacccagcctaaatctcgcttgtgaagcattccctaaccatctccctataccacaggcaaagttagttgtttctttttgtgggttttaataatcctttgttcttatttcatatatagcatttatttcattttataatagtatttgttatatagttggcagcagtatttgctgaggaaaaggaatggttcagagatggcaatcgtgttcttttattttgaaaatgtggccaactaggaacaactttaatgtcttctgattttgttcttaaaattcagccaaaagcttaatctataaatgtattttctataggagaaaatatggagaagtcttgtgcaagcaaggaagaagtcaaagaagtcagtattgaagatacaggtgttgatgtagatccagaaaaactggaaatggagagtaaacttcatagaaatttgctatttcaagattgtgaaaaagagcaagacaacaaaacaaaagatccaacccatgatgttaaaacccccaatacagaaacgaggacaagttgcttaattaaatataatgtgtctactacgccatacttgcaaaggtaaacttttaaaatgtaccatgatttgttttcatgcttggagataataaataacggcatttaaaaatctttgagatagcttcagattacagctaccatttattaatatagaaatttcagtacgggcatggtggctcacgcctgtaatttcagcactttgggaggccgaagcagacagatcacttgagcccaggagttcaagactatcctgggcaacatggcaaaaccccatctctacaaaaaataaaaaaaattttggctgggcaaggtgctgtgtgcctgtagtcccagctacctgggaggctgaggtgagaggatcacttgagcccaggaggcagaggttgcagtgagccaagatcatgccactgtcctccagcctggatgacagagcgagaccctgtctcaaaacaaaaaagaaaacagaaaagtttttaaacaaatagaatgtcattagaacatttcacctcttaaatactgtatttactttccctaactattgccattttgaaaaagaaaacttttatttgaatttactttaatctgtgtgttattaataacagtaggttttggctttcaggaattagccagttctacagatactcaggtatctactgtatacaagttgtaatgacaaattgagaaaaggataagtttctcacttcggtgagcttatagtacctctctaaaagacaattaaatgcttttacctgcttataacatacaagctatatagtatggtacatatcatgaaagtacagagtaaaaatgttaacatgtttttgaactctggaatattgttttaattttcagtgtgaaaaaaaaggtgcagtttgatggaacaaattccgcatttaaagagctgaagtttttaacaccagtgagacgttctcgacgtcttcaagagaaaacttctaaattgccagatatgttaaaagatcattatccttgtgtgtcttcattggaacagctaacggagttgggaagagaaactgatgcttttgtatgccgccctaatgcagcactgtgccgggtgtactatgaggctgatacaacataagagaaataaagctctgttagggaatggggtttttattatttgtggggtgttttgttttgagtagctttatattgctcttaggtctggagttggccatgtacctatgtatcctaagcattcacggcagtgagctcctttactaacattcatgttatggcaagagttgtcctctacattggaaagctaatcctaccttgtcagtttcaaccaactgagttttttctttaagaaaggtaaattttgtcagctagtttactatgttccttgaatataaacaggttataatactaccctgttcactttactaaatataagtacagtaatgatgcataattagaaaatgaggtattctaggtaaaatgtatgtttgccttgacatgtttttaaaagttatgatgtacctccctgcctttaaacagaatacttttttcttttttttggcctttctcagattagtcaaaaattctatagaatgactcacttcgaatactaagacacaggaggtttagcctgctttcttaccaaattcatgttacccagacttgtgttctcttgcgtcccttggactgcctgttgattgatggaaagtgtctgcactgacacttttcgtcagtagtctgtagtttcgtggcctcttttgattataactggggtcaccaagaaggtttacttaattaaataccgcatttctaagagaagatactttgtgtaagaaaagatgccacatttagtggtttaacttttgtaacttcacttgatagtttttaagcaattagaatggagttagggaaagaacatatcatactgaacaaatgtcattctagtttagatagcatttctaagataactgatactaatacttgttttcttccctataacataaaaaacttcactgttaagtcatgtcccttgaaacatgatagttacatacacagttttctctccacacataaataacaccactaaagttgttttgtaaggttccaaactaatatggcatatatcaactctacagtttcaaataaatgactttttaattgtaaaagattagttgaaaaactgtatgaatgtgaagatcacatgcttagtcatttttatgttcattccactttgtatatcttttctatttattgacttctcatgttctagagagtaggacttttattccgtgtacctgatatatatacaattaaaatatctgtgtaattatgttttaatgaagtttatttcaacagatattttatgaaatgcagtttaaccacagtgaatgaattttagctttgcttttgaaatacattgtaagatttgacttgaggtttttgacacttaagtacatgcttaatgatatattttcaaaagtcatcagtctacttacataaactttacctaatttttttcactttaacaaaaacataactatgcccttgttttttcatactttgacccaaaatatgccattttgaaataaaatttaagctttgatacactct

SEQ ID NO: 130 - DNA, 32744 bp, Homo sapiens
  source 1..32744: mol_type = other DNA
tgatccggcggcgcgggattggccagtcccgggccaacacgggtggcgggagttttcagatgtgttggctgcggccccgacttcagcggttgggctaggctgtgctgactgtttgggtggcggaccccgggagtaaaacctgttgtcgatccctcagcttccagcttgcggcttgctgagtggccaccttctttccggtccccggagctgcggggaaagatggaacggcaccagccgcggctgcaccacccggcccaaggctcagccgctgggactccctacccttcctcagcctctctccgcggctgccgggaaagcaagatgccgcgcaggaagggcccccaacaccctccgccgcccagtggccccgaggagcctggggagaagcgccccaagtttgtgagtatcgcctggagctagggtggggccgctcccgccccgccgtagggctgactgccgagggtgggcccacaagaacttggggaccaagttttattctagagatccagaggtgccaaagatcatagattgacaacgaccgggtctagttgtagttggatcctgtgacaaatgcccagatctttgtgttgcccccaaatttcttaacgctgatgtgaaaagcagttcaaacgtgtatatgtattgacgtcatctaggtggacattgcattttttaagtcgaagttctcccttcctccctagtgtaagagggtataagatatatcaaaatgaacttttaggtgacaggttttttttctgcttattattttaataagaacttttaattacatataagaacttttaaggtagatataattttccaagttgaaacagctagttttagaacttggcgggtggtgtggtcactgctaaagaatgttttgcttagcttggaaagaattctaaatatttgaaacttgctattctggtttgcttgtgtttaacacttaaggaaagtgtcatgattaacaccttgtcttttcgttggtgtcaactagtgaaagtataggcagtgatgattattttggggtttgtgtgtgtaaataaatcacatagagggttgatagatttgggatgagtccaacagaattgaaatttcacattgaccactccaccattttccttaggaatatggaaaaactgtgtgtgtgtgtgtgtgtgtgtgtgtgtgtgtgtgagagagagagagagagagagagagagtacagcatttgccttatgtgggcaagtaaaaattgtgagaaatttaagtcatgattcacaaattaagggaataatggtttgtgaaccagttgctaactataacatttagttaaaaataatagttgaataagactgagagcccatattctgatacatgagatatatcagaatactgaaaatgagaaacagcatagattaattgaaaatgaggaacagcatagattaattatgccaaattaagtatcaaaatggtcataggaatagtgacattttgcagaaggatcaagtatggacttgatcattatcttgacaaatctgaagaatgaataggacagagttaacttcccaatgaaagatttttgcctaatgtgagaagaatccactaaggcaatgacttttcttccttttatagtctactctctgggttaataatcttattttattttgttttaacttctgtggtccagaatacaggaggtgttattttctgtgactcattcccagcaaggaggtcatgaaaacaggatctaaattagtatttatgttaagtttcattgaaggatttcatcatttggtttccagtctctgtgctgtttttcattcttatgtatgtcacattgaccatctcagcatgccatttgttaaatggattctcataaagatgaaatgacatctaaaagataacactcttaagctgtaaaggtaaaaaacacatctaaaacactgtgtttttgggtgggagtctggtatgaatcatgacttccagttaatttagaagtaatttggactcttggtactttgaaactaatttaggttcttgcttatatggtaatttctttagttatatcttccagttcattaattttgttatcagctatgtctaatctgctacttttctgaatatttgattttagcaattattttttattttaataagttccatttgcttatttttcaaatctgtctgggcattcttgatagtcctttgtttcttattcatttatttctttagacatttcctacttgattgttcttattctttatttgacagttctgctgtttgcaacctgggctgtctacattgactcagattcatgatggcttgctctctttcttgtgtgtatttatctttgtaagctcattgctttatcttcacctgtaggattccagagatgcttttctttggagatagtttgagtttgtctgccaaggagcctgggcatgctactgattttggaccaccttcctgttgaactggaaatcttaacatgggcagaagttccaggcacagctctactctgttcctgtactaaagttcagtatcccagtctcaagactgcttcctgagcagctcttcccagtttgcctacctttcactgctcttgattgcacaccagtaactcttgttttttggatggagagggatctttgagaccatcaaagttcccagcaatgcctcagaaagtaattgtacttgtaggtgtcaagtcagtcactgttcttgcagatgtcaagttagttcttggctttttcttgattggatgaagtgacgttatcctaaatcttttcaggtcacccagtcattatctgagcctggggcagctgtttttgatgggaacaagtaatataggttggtgatgtgatggataggagtaatttaggtggccagtgttttgcacacttctgcaaagcagcaagcgagtagtagaatggagtggtagactggtcactccctcctatcttagtgtaagaaagcaggagctctggtacccgctgaaatcttgttttactttgagtcctgttaaagttggcaaattcttgttttctaccaaatgtatagttgcgggcttcaagtcacttgtgagttgggtaaaagagtttgtagcttagatatctcttcccatagataagtataaatagtagaaattagtctattgtaattgtatgatactttggctgtgctacgaatcaattgactttgggatgcttgtgaattaaccaacttggtctcatttgaaaatatcttaagccgtgagcattgagatggtagggatagctactggggcatagaagagagatggaggaggctgagaggacagggcaagtatctgggtggagactttgtgaaggcagataaaattccgtaggaattaaacttggaacctgccctaggccacactcaatacctggacctgagtcctatatcctttgtagaacagaacagttgtcctacagattgtggaaagcctttcagtaatacctgtttctcattactcttggcaacacacaggtagtggtggcagagcaggacatgtggcttctagaagtgtccatctctaggatgtaggtcagtccattcaaagggagcctgtaaattggtggtccaagttgatgaaggagttctttttaattaggagagtcctctaaaagttctcacagacttcagtgtaaatcgtctaatcgtttccatcaaatagattgttaattattgattgattatgtcattgtagtaccttcagtgttggttttgagatttttcttttcttttttttctttttttgagacggagtcttgctctgtcgcccaggctggagtgcagaggcgtgatctcggctcactgcaagctccgcctctcgggttcatgccattctcctgcctcagcctcccgagtagttgggactacaggtgcccaccgcaacgcccggctaattttttgtatttttagtggagacggggttaaccgtgttaaccaggatggtctcgaactcctgacctcgtgatccgcccacctcggcctcccaaagtgctgggattacaggcgtgagccaccgcgcctggccggttttgagattttttcaccttgtcctttaatttctgtatatttaccatgtttgggcattgatggtaatactagttaacctttctgagtgagccaagcactgttctaggtgcgttgtaattatcaactcctttaattcttagaacaaccttgtgaggtaggtagtattattaatcttgtttgccataggaggaaaccaaggtacacagagattaagctgcctaaaatcacacagctgccagttcatgaggctgagatttgaatctaggcaagctggcttcagagtatacattctttctttctttctttttttttttttgtgagacaaagtctcattctgttgcccagacaggagtgcagtggcacaatcttggctcactgcaacctctacctcctgggctcaagcagttctcctgcctcagccttctagtaactgggattacaggcacgtgtcactacgcccggctaattttgtatttttagtagagatgaggcttcaccatgttggccaggcaggtcttgaactcctgacctcaagtgatccacccgcttcggcctcccaaagtgctgggattacaggcgtgagccatcgcacctggcctagaatacacattcttaatcactgtcctgaattctctcccatagctgttgggaactttaatctttactgcttcttttctcatccaggaaccattagcaataattagtgatgcctttaattaatatataatatgaatatagaattgattttctgattataggcaggctgcgaggtgagaagatatacaaggttggagaatttttgttgattgtacacgtagtaggaatttgagtacagatgaaatcccagtaagcttaatgagattagtgcatgtttgccaattactttgggttatttggaagcaggtgtagtaggccgaacaatgatcttctgaaaggtagacactccttaatccctggaacctgtgaatgttaccttatatggcaaaaaatgactttacaggttatttggttttttttttttttttttttttttttaagaggggccaggcaggagcaacaattaaacccaatgtatgactgtgctgtggtgtaacttctgacagcaggatgtctgaaagagatactgctctttgctcttccagcccctgagagacagggtatctcatagcctccaacctcctgctgggaggatgaggaaccatccttcagtgcttgcctgcctgagtttgggctgccactctagaactccctgctcagcttcccagccagtccagattgtggaatgtggctgcttctccccttttagctggggcaaccacaggtggttcaagcaacctctgcctgggcctgttgaactccaccaggaggaggcagccccaaagttccacacatctggacatctggggccttggacagtgatatggtcagcacatggagattgaatctatgtctgaggtggatacacattaactaagctcacaagcttaatgaataagctgtaacccaactcattaatgtataccagccagtgtgttgcagccaaatccttccaggcatgcaggccccagaacaaagaggattaacaaagagcagatgaaaacaattctagccagtaagctaaaggagaaatctgctggggaattctgagaaagatgtctttgctctgtaaaaaggaactaacaaaaactttgcatccagtattggctgagatctcattggaccacagacctctcacatgacaaaattataaaaagcaactattaaaacactggagagtgatcaaaagacatggctattggagacaatacttggaagaagggactagcactggataagtttgtcattttttgtagctttttgcataagggaagcccctaatcagggtcatgtggggtggttaaaactagaatataagcccacagttgtactggcataaaaaaccagagggcagagttctggtgaccatatagctgataaatgaggagaaaatcctggagaggagaaggagccacaaatgggtagccccaaattctgtgtgtagagtcctcaaatttctgaaccctacatgtatgggacagactccaagcagcacaggtagggctaacatatctgaactaagatttcaggtcccatccagcggatgggacagtatgtgcagtttgagagttcagccaagttaactgcctgctaaaacaaacacaaaaagcaatacttctcagaagaatagaaggaattcagagtccctacaccatacattcacaatgttcaggatacagtgcaaaggtatttgacattaggaaaaaacaggaaaatgtgacccatacaaacaagaaaaaggaatcaatggagaccagtctcaagataactcagttgtaagcattaatagacaaggattttaaagcagttgtataaccatatttaagaatataaatgaaatatgctcacaatgaatgaaatgataggaaacctctgtagagaaacagaaactataaaaagaccacagtggaaattctagcattgaaaaatacaacatctgaaagaaaaaggctaacaagaagcaatagcccattttttgcctttggccatagtcaggatgtgatgcttattttgccatagtcttctggtcatgaggatagctagcctgaagacaaggcccatgtactgcgctacatatggcagagcaagaatataggaaggggttgggtacggtggtgcatgcctgtaatcccagcactttgggaggccaaggcaggcggatcacttgaggccaggagttcgatgacagcctggccaacatggtgaaaccccgtctctactaaaaataccaaaattagccagacgtggcagtgggcgcctgtaatcccacctactccggaggctgagtcaggagaatcgcttgaatctgggaggcaaaggttgcagtgagacgagattgtgccactgcactccagcctgggtgacagagtgagactcctctgtctcaaaaaaaaaaaaaaaaaaaatatatatatatatatatatatgaaggatctgggtctctgggccactataggttaggttaacctgggaacttacctgccaccagacatcttgtactgggagaaaaagaaaacgcacttatttaagcaacttctgtttggagcttatgatactaatctgagaaagaaagcattgttagggctcagaaaattatacccccaaatatgccactttggacttcaaatcgagagaacctggggagccagaaatgcaagaaagggtcttctctgaagttcccctatctacctaaaggttgtatcctccagaagatattcaacttgtgaatctctttcccagacatctcaagtcaaatagatgtatactgaaggaagattggagttgacaccacaccaagcccagataaactttgtctcagactttcatctcttctttgggcccattcatcccccctaaagattatttactcatcctgtaaattgccttacataccccacttccctcttccctatgaagagggtatttaagatttagccatctggcccttgtttgagtttcatactttgtatgactccacacttgccacacttgcacataatacctttgtatgccttttctcctgttttcttttttaaaggactttacacagatgattaaggattttaaaatgagattattctggattatcacagtggcccctaaatgcaaacacatgtattgttatttgaccacagaagaggagagagtgttgtgactgcagaggcagagattggtaatgcagccatctgaagctggaagagtcaaggaaggctactcccctagagcttctagaaggagagcagcctgccttcattttggcacagtgaaactgatttgggacttcaggcctccagaactgagagaatgaatttctgttgttttaagctgccagtttgtggtaatgtgttacacctgccataggaaatgaagctaggtatagttacaaggaggaccatcagattcatttaaatctctgccttcactttatttcagagggtttgtttgtaatttgggaggacagacgataaccaaattacaatagaaaaataaaccaccactggaataacaaccaaaacctccattcatgttttgtctactctgtatttatagtttctaggaagctgggaaaagatggaggtgatatctaaatgctctttttgattttttgaacttgttccttcattgagttctcagcttaagtgatgctctcagttgtcctagggttaaactgtcaagaattgagatactgtttttagttgaaagctttaggcacctaaattttattcgtgtcagaattctacctaacacacaccaggcattgtaagcttcagaaggaggtaaaatcattttattcaggctgctgttctaagaaattgctctgaattttcccagccattctttcctttctatccttcttaataaaacagaaaaacccagaaatttttttaaataaatgatttatcaaaagaaacaatatatattaagtggctttttgggggatacatttagttgctgaaagtagataacatatggcatttaatactcctggaccactctgggtcttttctttgacggtaaaaaggggtgggggtagagatagggatgattgtctcagatttagaacagggcttaattgcttttttcaaagactcatgtctttaattatgaagcaagcaaactgacatacatttattacatggtgaaaccttgcatctcatctagtctatcttgtagcaattgcttctgaacagatgttacctgaaacacctttgtgcagttggtggaatgctaaaatttgtcatgcttttattattgttgtcttgaattaactctactttatggcgtaactttattgctgtgtcctagaatctttatatatttattgccttataaattggatttaaaattggctttttatatagaatgtaaattaacatgtgtctaacttgtttatgctgcagaataatacaggaaaaaactgctacgtattacactaatgtaattgtctttaacttagcacatagtatcctctaaactaggaatcaaatgaatgctaaagaatatgcttatccttacactcttgcttgtttatctcagaaactaatttgacttttagatctataaaatatagattaagcataaccttttacttcatgggatattaaggatcaaagcatgggctttctttgaacaggatctacaaaggtaacttttctttcagtagcagcaggatggcattgaaataccttaccattgggagtaatttttctcaaatagcaaattgaatagtctttattaacttaggggagaatttaagagtttaaataagctttggtcctgaaacattcatgttactagttacttagtgaaatctatttggaaatgcttgccatagattttattcttcaaaagacccactgctatcttttcttacagttttttgtagaagaagcgttatgagtaacatttatgagcagtgacttgaaccactctcaggggttgaatcccagcaatatcacttattagctgtgtgaactgagcaattacttaaccgttctctgtgcctcccctttctcatgtgtaacatggggttgtcatgaagattaaaagttatgttttgggcctagaatacctggctcattgtaacctctatggaaatatttgccatttataggattgttgtttttgttatcattagtagtaacagtaataatagtacaatttttgcctacactttagggcattaggaatacattggatatttgaaaagctttctaatcttggaaaacttaattgaaccaggctatttcctcttggtgtgctggaggcagagccattctgttcttagttcttatcctggcataccaggtaacatttggattgatgcagagttctgatctgatgactgaatggtcagagcaagtttctgaagctttcttaggggcctgttctttatgtctaaagtggggataataggatgatgaaacttggggtacaaatgtaacttacaaaaaaacgtataaaggaaacaacttcaaacttaggaaaaaaaattcttgtgatactccaatatggacttgaatgataataaaaataatgttactaatatatgtacagatataaaactaagtgtaactctttatgcctatcactttttacagctataaaactaaaacagatttacatctacaatccaaaacaaaactataaaacccataaaattcaaattaacagcaacattaatttaatgcgattgatgatgttttgctgaaattaagtcatcattattggatttaatagtggaaaaatatgtgtatattttgctgtttttctttctatcaatttaattcttgggtggaaatggaatcccagaggctgaggaagatatgtgtagactgaggagttcacagatagccttacactgttagcagaggcctgtcatcggacaccattatctttttcataggtgttggcttgaggatgtagatgaagtagtgaactgttataaacctgtttttaaaaagaaaatagccatatataaacattttttagtaaatgttataaaactgttgaagcagcagaaaaaataaaaactcttatacttccagcttctatattcatttttctcttgaaatctaattttccatacctgtgggtgcatagtttccagaataatgtgattttggaattataaatagccatttggaactgaactcttcctaagtggaagagcttgtgaaaatctattgtgtcatgatgttgcttggccctcattgagaaccatattggtagtaaatacaaaagtatttacaaaagtaaaaccaaaagttcctgagagaacatggttatagagtgggtcattcacaatgtccagaatatgcttactttagttctaatgtttaagataatcttgaaaaaacataagacttaagtagaatttgtggaaggcctctgtagaccacagtttggggtacccagagatgacttgagttaagaaattagatgtgtacctgaaccaggcaaatgtttttcaccttagtcctttgtttagtgatgaggtaaaagtgattagtaagtatcagtagtgaaggatgtatacaatgtgtttcaaaacagtttgcttctaatagtttttttggttaaataagaaacttgcaatctttaaaaaaatatattttatcatgtatgtatcatacaaaagaggtgtaaaacactgtatactcactaataagcttaaaacattaaatatcataaattccattgaaatgttcattttctcccttcttatctttatctccttctaatctttactcttcatttcctgggtttacagggcttttttttttaattcaattttgatttttttaaattcaattttgatttttttagggttccaatttatatatatatatatatatctttccctaaaagtaaatctgtgaatggaattaatactcagtagctttctgatctctccatctttgaggatcatgacagatcttaaatactggaaaggaagggggagactatgaattaatgtaccaagtgtgaggtcattctgtgtgctgagggatgtgggatatatccaagtagctgtggtctaagtacacaccctcttgaattaaagaagactgaatacctgttcagtcatagttctgtcaaaggagttatggtgtagaatttcttgaagcccttagtaaaagccctgagtagattaattgtgagatccataatgctgcatttatttagttaattttattatgaagtatcttcccaagatacagagagtttatcccgtaattgctgcatttttttccgaggttggctgtttatttgggtgtcataaaatgaaactttgtaacattcagtttttaagtaaaagatttgcaaattggtgacattaattatggactttactatagaattaaactgtttttgtttattaaaacctttgattgaattccttgcataatgacaattacaattcttttttaatgaaaaaattgacagcctgggaaatgaacatgaaaaatggagtgcatataatctgcattgagaaattcaatatgactatttcacttctttataaaaggtgacggtctccaattaaaaccatgttctaactccactcagtctcttttgagggtataattttgctcttattgttatgttatattgaacctgcttttagttactttatacatgtgtttgtaagcttttggaagtcactttctgtgtggtgcctggtatagacttgtgcttacagtaggaatctgaatgtttggctaattgaaaatcaaaacaaagtactcttgtaactttatattgcctggttcattaacccattcatgatgaatttgtttaaatgttattaataattactcatttctttttataaaagatcctagtggtggtgggcaagggtatgtaaagactaccagaaacatatgtgggttattgaagaacttgggcctggcaatgtggctctgaagtcccacccttaaactgtgataaaaagacttgagagagactcaaacgtgtctgtatatccttgggcaaattatcaacctttgtgcctctgttttcccttctataaaatggaagtaattagtctgtttgcttatagattgttgtgaggattagttgagttaacacatgttacgatagcttaggcacagcacaattaatatgtgacaactattattaataggggagacctcatcactatagtgttaagttctcagttattgacagtattttaacctcttcttcctgcttcctacttcctttatcctcatagcttttttttttttttttcctgggggacactggtattgtgtccagggactcagccattcattgcagtgggacacacaccagaggtttgtttggtgcctggatatattcccttcctttctgtttcatgtagacctactacagcctctgtacattgcctctctttctctgtctgcctcctgctgtcaacatttgctccacactaaacccacactccacaaaagtaaccatggagctccctttgaactgggatgccttcaaactcctcacttcctcacacctcacataaggtagaatatcaataaataatagaacctttggcctccttgttcagttgcctcagatctccaagcctggagcaacctggcaggcttctgtggctgaactgggttcctgcatcctggtggaaaccactcccagctttgtgaactgatgcccttagacactgggtatctgtgtgtcctcagtgctgctagataacaatcatcatcacaataaccgcatttgttcagctcatacaacgggctgggcactattttaatcacttatccctcacacagtactttgaaatgggcactctccctactgttattttgcacatgagggggttgagacacagagagattaactgggaatagggcatgatgggtcctgacttttcactagctctttggtcatctccttttcaatttctcacagcatttatgctaaacctatcacttctttatctcatctattggcctgattcttttttgtcccaaatagttttttttaattgaaaaagcggccaggcgcggtggctcatgtctataatcccagcactttgtgaggccaaagcaggtggattgcttgagtccaggaattcacgaccagcctgggcaacatggtgaaaccccgtctgtacaaaaaaatacaaaaacgttagcctggcgtggtggtgcatttctgaagtcccagctgcttggaaggctgaggtgggaggattgcttgaacctcgaaagctgtggttgcagtgagccatgattgtgtcactgcactccagtctgggaaacagagcgggatcctgtctcaaaaaataaataaactgaaaaacaacatctgtacttcttaaaaagtccaacaatgtaggagtacaaaggggaaattccctaagcctcccttccatcctagaccaccaattaaggtccccctccccaccacctgccatgatgacatttattattttttcttttttaacatgaaagaaagtatcagagaagtaaagaaacaaaagatggctactccataggcagagcagccccaagggctgctggttagcttattattttcttttatatctttttttttttttttttttgagacagtgtctcactctgtcacccaggctggcgtgcagtggtacaatcatggctcactgcagccttcacctcttgggctcatgtgatcctcccacctcagcttctggagtagctgggactacaggcacgctgcaccgcttggctaatttatttatttatattttatagagacagggtctcatcgtgttgccctggcttgtcttgaactcttgggctaaagtagttcttctacctcagcctcttaaagtgctgggattgtagatgtgagccactgcacctagctcttttgtatccttccaatgatattctgtgtgtatgtcaagcacccacttttttcccacatgggaacataccacagcattcgcttaagatcttaggaatgattactcctgactcttagcatgccccttgatacctttttcagagaaagttttcctagagcttgctgtaattgtctatatctgcgaccattcttcattgtttctcctccaatatccacacaaggaatatattttcctatttgaggttaatctctttactgctgtttttggcccatccacattctgtcaggaaggttttgctttttacacgctccatcctgtaatggtgctgaaatgtttaccattgtgaaagaaaaagcagaaggaaaaccaaacaacccctttcctcaactttcccttgaccctttgtctctctgaataccatgctctgcttccttcctttttagccactttctgtgaattacttgttttcatttattcggtaaatttttgaatgccagttatactgagcatagcacacgggtagatgcaatttggtccttgatttcaagaggtttatattcagtctggtatggggaaagagaggtgtgaatcaacacatactacagtgttgctggggagttcatgtagcataatctttaagaactcaggctgtggagttaacttgggcttttttttgagtcagggtcttgctctgttgcccaggcagatcaactgccaaacccagtgctgatttttgtcttaagcctcaccctatatgacttcttcattgtatttgtacaaaccttgccccccttgaaaccatggtctaacatgttcttctcttctgatctttggttattcctttccctatcctttaaaatgagtctttccaagtaatctctttgattttctctttttactttatacgtgcttctagtgtgaactcatccatttctttagcttttactaccacttagattagtgctttctgaaatgatggaaatgttgtgtcctgccatgtccaatttgatagtcactagctatatgtggcttttgagcacttgaatgtggctactgctaccaaagagctgaatttttaatttgtgtaatttgaattaagttgtgtttaaatagccatatgtggctaatggctagcatattggacagctcagatttagaagctgatgacttcttaaaactccatctttattttaggatggtcttttgagcttttgtccaaaatattcaaccttattttacatggatggcttagaggtacctcaaactcactgtatctcaactcgaatttatctgctttctcataaacttctttcttttgtattctcttagtcagtgtcaacattttatccttggatttattttcaacttcttgatctttaacttccatatgcattggttatccagtaaccttgattatgcttcctgggtacttatagcacttgcctcttctcttctcctactgtccctgacctcatctatcttaccttccatctctctgctgggttattgcaatagattgcaatagcttcctaactgatttccttggctctcgttcttgggtctactctgttttatccaccatgttgctgctacaatagttttctttggaacccaagtgtgattatggaacctgcttaaaacccttcagtttctctcctgcatcatccacaacttaaaggccaagtagcatgatcttgtcctttaaattttgtcattgcccacatttctagattggatccctcaacttccacctgaaattccagttcctattcatacaatttacttgtaggtccctgcatgattgcaatgtatttttacaagctagacctcctgtctagaaagcttttgctctgtgctggtttggtccattccagtgtcctctgtgcatgcttgaagcaaatctggaccctgaggtgttccctggtatctgtaagcagatcttctggaatgcttagatcagtgtcagttatagcactaatctcactgtactgtaccttacagattgaagtttctgttagccttacttatctgatagaggggaaggggaggcccaagagcaaattttccctatttgagtctctagttccaaacatgtaccaagtagattgatgaacaaatttaccttttttttgttttgtcccaatctcctatacttaagaaccttggctgctcagtcttccaaaaatggctatattttccaaatgaccttttctctgtaaataggaatttgcacaagttgaagacacatgctgagaattttcctatggtattcttggcagcattttttttcctagttcttcagctgacagacatttgcctacattcaagtttaaagggactacctatgggccttggaggcttcacctgtgagtcaggtgtttcttatagactaccttccagtaacgtgatttaactcttatagataacatggacattttattctggcaaagatgatgcagttttatagcctatggagctaccctcaataagtttacgagtgaaacaacatcagtgatgacagaaacaggcatgtgagaattatcttcacatccttgtgagatctgcagtccttagtaattttcactagattattaggatcaatgggtgccttcccttacctgtggctatcagctgctgacttcctgcaaaccttgttgcctttttttattagtgtgtttgaatggtgcgataatcaacctaaaactattgtacttttaaaagtcctatacaaatatgcttaaatcattgctgaagtctcctttggcattgttggaggatttccaaggacagttaggctgcagttgcttgagcttgtggctggactacagaaattggtgtgttcataaccagactgcaatatagactgtaatgtgttaggatttcactgtattgcatatggcacagtgcaaattaggtacagtattgggccgctctgtatcaaatcccattctagaatttctctctccaaattccccacattgctttggatgacaagtgcaaaggaaagcattaaggagatgaatctgtgtttttcagtatgtttagctctggcaggcagttactaatgttatattgtttttttgaatcaccaagaagggaaaataaatgacccagcttatttctttttcctctagaacttattggattgtaaacttcttcagggcaggtaccatattttataggtctttatgacccagcctgcacctggtggcctggtaacttagatgtgcagtaactatatcctgtttggttaatatttctgaaagaaatgtaaaaggtaacctacatcttatgcgtagtactggaactgcatgtaaaaactggaattgtgctcttcatttttcagatgctcattttataaatatgtaatcatctttttgattccttttaagagataaaacaacttagagggtgtaataagtagtattaaattatacaagaaaacttaatggtaattcagttatttagaataagttcaaactttatcaataatttaagaaattaaattttctttagctgttgtattataattcctgacaagcattttttagtgacatgttggaatgtggataattttggcttatgtttcagtctgaattgggagtgtatggtttataaggtttgtggtatataccccagctttaaaaatctataaatgagaaataaaaaagcttttcatttctattacacatttgagagcaacttaaaaaaaaaaaggaggaaacaccctagcaaaccatgtattcttattagtgttagtcaattgacagaaattgcaacccccctccatgcccatttatctttgaggttttgttttttgagacggagtctcgctctgtcacccaggctggagtgcagtggcacgatctcagctcactgcaagctccgcctctgagttcacgtcattctcctgcctcagcctcccaagtagctgggactacaggtgcccgccaccacgcccagctaattttttgtattttttttagtagagacggggtttcactgtgttagccaggatggtctcgatctcctgaccttgtgatccacccgcctcagcctccctgctgggattacaggcgtgagccactgcgcctggttttaaggtgtggttttgtagtcagtgttgttgttatcatttagtaatcatccaattggaattatgctcatctttcttgttaagatttcatttttgaattctttgctccataaataattcagaaactgcttcagcagctggctgtcccatcatagttctggggactgagggaaaggaaggagagtgaggctggatttttgactcattcccagcctaggtactcaccaacccttataagtcacttctgtgctgttcaatttcctgttctctaagatggggataatagcgagtttttagggttgctgggtatactagtaatcgcaaagtgtccagtaaggtgtagtagtagtgataaggtgggctgtatcatatgggtacctagggacccatttagcaatcttgggttctgtctcagttaaaggcccatttggtctaaaggaacagatccctatacaatatctactgtaatcctgaaaggaggaattgtaaagatacacaagagtagcacctctaatcaagctggccgtcacaaaggactggaaccaggaactaaaagctgacagcttttctcagtctctttccctctcaggccatccagtgtctctttgcttctcactaggcatagctccactgttgattctctgcattgtgtggcttcctctgctttgatcttcacacagccaagcctagaacctcataattccagatagacatacatgtccttggtccgtgcaagagtagagcctgattttcatatctgaattccaattctagaattctgggaaaatggagatttgattggctctgcttgggtttatattctgccttgtgtttagctgcggctagggctggcttacaaggaacagtgaagactggtgggcctacctctatggcataggcattctcagagaagagacagtgtgcaggaggcagatacacccacaggtgtctaccttgtttacatgtggggatctttggagatttcttgatgacagtcttggtgctgaaagactgagtctaaaatagtttgcctagttttagtagttttgtttccaggttgcacattagagttacctggggacctttaaaattatccatggcaggctccatctttgggtattgattcatttgggctgggatattacataggcatccgtattgggaaaagaaaacaagctttcaggtgattctcatatgtagtcaggttgataaccactgcctaaaatgttccctgcaccatggtagggctggggattcaaagttgaggggaacatagtacctgcgacatacaaacagaaaaggaggtataaacacaaactgcaagacaaaccattatcggtgacccaagggaattgtaaacaaaagggctgtgggaagaaggaaatgagatcatttctccataataatgaaggttgatccacccttactctaaatttttatctgcagtacctacttaatctgtttacctcacatctgattcgtccatctgactgtgagtctcctgaggccctggcaacatgctggctctggggatggcattaggaaactgccactgcatagatttttcaacccccatatttgagccccaaagaaatatgacagcatgtgaaaggccccagagggcagcccaacataactgacacccagcaaaacagagctgctggtaaattgaccatgacaaaaatcaagcccacaggagaggcagtacacatttaaaatggatttagatggattacagactggttatggggccctagaggaggagaagactattgggagtatccttgagaatgagtgagctgaacccaggtgatgcctatatggatcttactgtgaaggaagcagaataacattggtcaaagtttctgaacctcaggtgtagtattttgtgtaccatggtcttttctataagtcttctaccaagcctatggggaagatgcttgtttgcctcatagtacagttaagaaattcaggctcagagagtttaagtgctcaagatcacacagatgattggtatcagagctggattctgatccaggtgagtcttatcccagagccgaggctgttcacctctgctcagtactgctctattgtgccacagtgcaaggcaggatgtaaaagtgctaggaaggcacgcttgatgtgggcaagcttagagaaccttcctgaatcaggcagcatttgaaaggtgagccaggtattgagagggagaggactgcggtagtgtcttggtcaaggcccagaaataaacagaaaccaaggtaggttggtttaaggtgaggattatttaggaaagtattaaaagagaaaggctggccggatgaggtggactcacaccttactgtaatcccagcattttggaaggctgaggcagaaggatcacttgaggctaggagtttaagaccagtctgggcaacatagtgggaccgccgtctataaaaaaaaaaagaaaaaaaaaatgtggggcatggtggtgtgctcttgtaatcccagctacttgggaagctgatcgcttgagctcagtagttcgagactgcagtgagctatgatccctccattgcattccagcttgggcgacacagcaagaccctgtctctaaaaaaaataataaaaaataaaaaagaaaggaaaagggcatattggagatgctgaggtaaatcagagattattaactgcaggaagggaaagagtccctgatggtaggagctggaggaggggcaaccatggctggtgctgggctgtctacaagggtccctgttgctgggactcgcacacgtgtggagcacattaccatctgcatgtagacctcttggggggactccttagggttggcgctcaaacttccgaggggtcctcagagttatgtttaaattgttgtaaatactgtttttcttactgttttttctctagacatgctaaactggtccctctaccccctagactaattccatattaaaaaaataattgatagaattaactgagtttttccaaaaattgcctttattggctttacagtgttttgagagtatttctaataccttctggtaaatgactcctggaagcataactaagccacttaaagggccctcaagtaaataatgattatttgagtacagaccttcctccctaccttcagtaatttgtataatatgctgaatatgctgatctgattattatttactgtgtaagttggttatttatatttgtatacttacaaaatatttgtgactattcagttagaaaagtaaaagcccacgtctttgaaatggtctgggactgatctgcctcctccttccctctcactgacttcattttgtcctgttggagccaacaagctcccttgtttcttgaacatcaggcatactcctcctgacagccttgttatggctgttttttctattgcaaacactcccctgcccatccatatagatgacaccttagcccactggcaactctgctcaaacaccactttgtcaatgaggcctatgcctacctcaattccccatgtttaaaattgcaacctgcaaaccctcttggcttatgctactttttatttttatcagagcattcatcaccttctaacatcttaaataagtaatttacttattgtgcttattgtctgtttccccaataaagataagttcttttagggcaaaaatctttgttttatttattgatctctcccttgtcaagaatatagcaatatttaattaacagttgttgcatgaatgaatgttttaggaatctttcattctgttagaagaacaaattctacattccaagttttacctgaatcatggctaaaattttatttgcctttagtcttagatcattgctataatgcttgcctgttaattagcatgcatttaagcatatatgattagcaggtggagactccgcttttcttccaatcaccattgaataccttattatgaagcattttggttattggtttatcttgttcttttggttgcaagcttgtaaggggagagactgggtcttcatatttaatgatgtgtctcacacatgttggcctaattgtgtagtagaaaaaattagaattatgagactaggtcttgcttaaaatctttatcttttatttcttatattttggcatcatgaccttatttacattaaggaattatctagtaagtggtatttaccctaactttctcaagatggcatgatatcatttacatttacaataaagaaaaatgatagatttcttttaactctgccattaataagtgtcataaagtagaaaaataaagcaaagtcaatatattattgttgccacagaaattgaatttgtgtcaaaaggatttgtgcttgtgatgtagtgattcgtatatttttcttggaattaagtctgtagcaggtgacaacatcaataattcacagaaccaaggagctttttgagattggataatttatatatgtgaattagaaaacagacgaataatgtgcttaatatattctgacatacttgaaaatatgcattaaaaaactagcctattaaaaagtctgtgcacatatttattagatgttttttagattttcattttttcttttactaatacatacatttttatttgaaaaggaacaatctgtattttctgctcaatctgaaaagtattatccatagtaacttaaaaaatactttctgtattaaaagtaaatatgcttattgagacaactgggaaaatacatgaagatatgaaaaaaacccacaaatcccataatccagatgtgtaaaattacctatgattcctgttttattttttccatatatatgtatattaatgaagttggaattatgttacatatgcaattttaaatgcactttttttcatgtaccattgtattgtaagcatttttccatgtcattatagttcatattggtaggactgtgatttatttaatctttcctatgtttggggaaatctcaggctgattacagttctagctatttaaagtaatgctgtagtgatacatatttgtatataaacttttgattgtatttcttaattcccaagtatggattctagaagtagaattattaggttaaagtgtgaacatgggatttgttttaccaaattgtttcctaaaatggtttaaccaaatttcctttatggtgatgctgaaatataaacaaaatctttctcaaatatatgtgaaagaatgggtgatgctctgtcagtctcaggaacatccaatctaaatttgtgttgtggacaagatgtctaggatgctaagccactctcagaagtaatttagtagttgcgataagcttcaaggtgactctgggagttctgggatctctaattctctgtatagcaaatactgtaaatgcttttcagccttctccagacaatgaaaaaggtcttggattcccataacctagaactgaacctacttgtaaagtggttcagagattcgatttgcttttccctggacatgttgcaaaagagtttttcatctggtagtataggtgaaaagaactgaaatagacgaagaggcatcttaaaatatgtacaaaagctgtgttactaaattagccattatatttttccttttattttaccccaacattgaatgagttcattcaaggaaaaagaatattggagttatgttagaatgaaaaatgacttgttaggttagcctctgtggggtgcaatctaggtcagagtcccaagccacaatatgataattgtttttttctacagaggcagttctttcctagcaggtatgttgcctccttaaaccttgtgttctcagagaaatgcatcttttcactgctgtggacacttgaatgatgccttctccttaacgctgatctctcgttggctctcctttcacgatggaggaattgaggggcagggaggtctggatacttgagtgcatgacagtagagaagctttggatagtgagtaatacatggtatgtttgtctttctgaggttggcagaattgcagttttgaataaatgagcagattaaaagaggctggagagcttttcctaattctcacctgttcctaacatctcccctttcacttttttccaccttggactgaaaaaacatgtcaacttaaaagtttttctttgtagtatcaaagagccagctctactcttgtcctcagtgctatgaaagcttcagtattatttttggacctttcttagatgttaaatctggagcccttgaagaataatattttcacatctatgtgtgttgtgtagttgccagggagatgatccatagactctgtaggtgtgtcgagagtcatggctggtaggaatattactttaaattttcatagtctttataattggtgttgacgttaagataaacacaggtgtgtgggctagaaatgttatcagattgaagtacatattcatacattattgttggaaaggaataatctggacttcaaaacaaaaatgtgagcaacatctcaacctattatcagccatagattatgattaagagaagatgattaagagaagactaatcctttccttttttctttaagatatcctcccctcccctcccctcttccctcttccctcttccctcttccctcttccccttcttctccttctccttctccttctccttccttcctgttagtaacctgtgatttattcattttgtcaagcaaatggtatcatgtcatagtctgatacaatgaacaatctttaatacttaggtactaagtttatgtttatgagactgaatgatttgtaccttagactaagcatttaaataaatgatgcaattggtaattcatcatacataccagagattgttgaattatcttaaaacagtgctaattggtacctttcacttcatggcagtaaggcctgtcccaactttatcagctctctgttttcacttctttgaaatactcttgtacttcttatctatacccttcatgtggcttgtttcaggtatgtccagtttttaaagtgagctacatgatgagaaattcatatgtgtgcaggctgagggaatgtttaatggctgatagtggtggagtatggagtagggtttctcacgtggtcctgggcatgctgccacatcattacaggcatgacttcttaaacatgtgggttcccaggtcccaccttagacttactgaataagaatattggtagactgaggccctctaatctagcttttcagagaaagtcttggtgtgattcttgtgcacgccaaacaaacaaaaacctggaaaaaccagctggtccggaggatctagcttatgaaaattgtgtctgagtctttaatcttacaagttttcctcatgttggtaatccctcataacccacttaaatgacgtaaatttttggccaggcgtggtggctcactcctttaatcccagcactttgggaggccgaggtgggaggatcacctgaggtcaggatttcgagactagtctggccaacatggcgaaaccctgtctccactaaaaatacaaaaattagccgggcatggtggtgcacgcctgtggtcccagctactcgagaggctgaggcaggagcatcacttgaacctgagatcaagtgcactgctgcactccagcctgggtgaccgagcaagactgtgtctaaaaaaaaaaaaaaaaaaaagtcaattttaatggaattaaactgtgtcagccaaagattatttaaaaatgctaccacatatttggttctgataataataaattgatgcaagcctactggcttgaatctgatggtggctgtcatgttcctaatgatatcaatggacagatcctttgctccattggcctgctagttcagatatgctaaccaatgaaagaaaacataaaatttgcgaaaagtcttgggctacagcttggcatctttttcactgtgtgtggacctcctgggtttgtatattgctttgtgtactacaatttatctgtctttgttacttgtaaactaagttagtggggaaactatttcacatgcctcttgatattcacagcatttagcacagttctctgaaagctctaaatccattttttgacagcatgtactatcttcaataaaagttttgatgcattgcttaaatgggaatatagagaccgatgttctgtgtttctacttttttccccccgactcctatgttcttttgaagaaaaatctataaaggctttttttctctttcaattccagagtgaccctcttgaccattcatcctaggaactgtcattaacagaaaacattgttacccatctgtatgtggttctccttactttttagggagaaaatagaattagtatttgagaaacataggaccagaggaagaaggatgagtttttagcttaggaaaagagccctcatattctttaatatcacaccttaaccaataaccagtagtcttgtggacagaacggttatttattattattttttttttttttgagacggagtctcgctctgtcgcccaggctggagtgcagtggcacaatctcggctcactgcaagctccgcctcccgggttcacgccattctcctgtctcagcctcccgagtagctgggactgcaggcacccgccaccacgcccggctaatttttttttttgtatttttagtagagacggggtttcactgtgttagccaggatggtctcgatctcctgacctcgtgatccgcccgcctctgcctcccaaagtgctgggattacaggcgtgagccgccgcgcccggcagaattgtttataatttaaaatcatgagttttatttgatttcagtgccataaaacattaataacacctctagaatcataggccaggtaggtaatatatgtaaaggtcacaaagtcacatttagatatgaaagttttaatgtctaaaactgtatgcttctaacttttttttttttttttttttggtaaatataaccctaaaaatttgctatcaggttattatttttaaaggtgtttcctagttgcttccatttaatagtcggttttatgtttctatttcctttttggagtagatgtccacggtggctactcatgaactggattgatgtttgcagttaactattttcctgaactagaagacagtaaagagcattgctggtggctataaaacagaggtacttcattttaaacagtacctcaagtaccaccataaaatcaatatttttgtgttacaaagttttttctaattttaattaaggatattacccttatagttttgtatttacaaaagtaaggctaaaaccccatagaattatctgaggatttagttagtcattttcttcctttctccctcttcttggcaatttctacttcatggatagtccctattttatgtgtataagccaaacaggcaggaccttgagatcatgtaaactttcaatgataaacttgaatttagtattaacattcagacatcctacaaaagattgccacttgatatagtgtttacattttttcactaagtatttagtgtttattttttctttaattcacgtttaaagtaaactatgatgagacattccagtttttaagggaaattactagtgcttagatttatttagatttttaatgctagcctatctttagtggtttaagattgcatgtgtgtacataactatgtaatctctattcttcagcaagctaaatcttgaaatgaaacctattctgactttattgttttggtgtagaaagaaacacaattctcagatcagttttccagctccttactctgttagtgagtttctccagtcccgtctggactcttgaatttgctgtgatttcctgccctattgacttctcttgctgatggtgagaattgataggtaagtgttctctggaagagaaggaatgatgaatttgaccttcttttctctcagactctgttatactctccacatctacatccctttgagttttcttctccatgcaggatacacctgcatcttaattctgttgtgattcatcacatgttctttgggaaatataataacataggttataactgggcttatgtacatacctatatagtttgaaaacagatcaagcctttaggaaattaaatcttttaaaaagctataccctcaatgagatagtttcagaatgtatatattaaaaaaaaaaaaaaaagaaaaccatgaccaaaaatggatccctgggttgccttgtttttacataagagtggctgttctttttcctgaacgttgtgagcccaactgaaattttaaaaagatggtctaattttagacctttgacagtatataagtgtttctcttgaatgtttacaactggattttgcatcatgtaacttacatttcctattttcctgtctagttttattttccttttactttctgtatcttttatgtagtttttagatcataaatcttgcctggaccctagtcgtctttattttaaaattatttatctatttttattgtcttttactcttactttttaaaatatcacttttatggcattttcctgaggcaattcaagctggttttgggaatattttatttgtttaagtagatgtttttctctttattgtggcataccatcctaaataggatttcagctttatagtttatttctttggctttactttttaagcattaggccacttggcatgccattgtgccagaagttcattacctgccacttttttttttctttttcacaggaacttgaaatgaacccttttgagagtgaaatgagatgtgattggagtgatacctctgattgtggaataacaagagtgaaatgtggttaaccaaatgcaataggctggaagcctctactggcaggaaggcacacatacaacaggctgttagaggaagggcgcctcacacaggcattgccccagctcctttctctgcaaactcaagagccctctacgtttgggtttaattttagtaatggtctctggggtgacactgtggccctaagttccttacatactttacatcccgctcaggatcccaaccacttttaaggaccaccgtgcgtacttgttaatttcaaaggctgaagatagtattgataaaaaagcaaattctatagcctggtattagatactaacccttagttaatccactattattacttccttattcccaagtcaaagtaggtgattctaattcaacaaggcagtttaatctggagcctagtggtgtggctaatggtctttcatttggctacattttctttggtatacacaaaattcattttagatacaagttaccttctttcctttgcactagaagaaggaacatcttggtgaaagaaagggagaagagaatctgggatggtgatttacattgtacagatttttaatctggatcatcactgaggtagattcatgagcatgaaggtgtacttgagtatacaaacatgaatgataaatttcattctattaagtaaatgttgaatttaactgtgtaccacttagtctgttagataatggttattaacatctgtccttataaaagagtagaccttgtttcctatttagaaaatgtgtttgaccctttccctgcccctttaaaaattgaatgctccagtgaataagagaaaggagaattggtaattgattccagttacttgaatacaatatctttcccgacactgggacttataaaacttagatttctgtgttttttctctaaataattatttttttcttttgaattgtattttgcaggaaactattcactctctagaatggtcttatgtttgtctagcaaggaaatcagcaaaagggtccttgaagctagcaatgaaattgaaaagtgtctactgtcaccactcatgataaatcaaactgatgttaaagatgcaaatagtcattttagtacattcttctctgttactagaattgtttaagttaattaagccagcaaagtacttcattatctattatgctgcatactaatggtaaatttaaagtttcactgttctataatatgaaaaattttctgaaaaatcatcacattaaaatcttttatatccagtgttctttttcattttattttttctatgtgccctcattctcagacagatacattgtgttctaagttaatatacttaatggtaattaatactgttaattgggataatatatttattgtaccatagttaattttttagtttgtgagttttacaaagtaaaaaaattttagtaagtgtttggaactatcacacgcagggtaacttttgtccatctttttgagaaagagattaaaacgattatatataatgtgtttttattggactgtcagaaatttaattatattcaagttaggattgtagaattttgaatgtaccctattaactaaaataaagaagctgttataaattactaatatgattgcttttttttaatttgcagcatttaaatattaggacactgacggatgatatggtaagattatcctcaacttttcctttgttatgaattgtaactaaccatataacgttgatggtgtgctctgctaacatctttgaaatggctaaaagtcacatatattggaaacgtactattcttatagtgctgaaataagaggcagaactggtaaaatacactaaattgttggttttaagttgtaaagtgaatggtggatatgttaattaaaaaaatttgtttaattacaaattgttagtcaactttgaatcattcaaatcaactctcattctttaggaatgagttgcacacttcaaaaaagaagtaaaaatagcaaagacatgtcagcttttcagaaatatgtagttgctaattaaagtaagtcagactaaaatattatgcatatatatttttaaaattttgcttaaaaatgagagaaccgggtatgccttactacgttttttatgttgaaaataatagggcttctcatagtaacactttatagcaccattgtagattcttgcatagtcaagtaagtttttctgagaaatatatttttaaatgtaacttgtggttaatagtaaaggaataacaagaagaacaacaacaaaacacaaacaatgacaccaaaaatatgtaagtgtgttatagaggaaaaagcatggccccccattgaccaggctttgcattaaacttcaccatatatgaagcatgaaggagaatgcctagaccatagtaagcacttagaaaatagtacttctaatatccaaagtactgtcttatgcacctgggtaaggcagaatacaaagacgaatgaaacgtagatcttgacatgaatgacttaaaaattgtattagaatgttggtatgttttattcctttgaatagtacctaagaaaagcatatttacatataattttctggatgacattttcatatactaacatatagaaattggtaacaatacagatttctcaccttgcaaggtagatgtctttattttacagttgacaatattgaggctcagacagattaagtagcttgctcaagtgtgcccagctggcaagtgatacagttatagcttgaattttgttccacattgctttaagtctcatatacttagtgtgctaacttaacccagcttgcaaatggcttcttaaggctgataaaccatctgcaatttttatgtttgaagttttatgatatacaatgatatatttgtaacagctttgatctgttcagaagaattgtacaaccattactacagtcatttttagaacattttcgtcaaccttaaaagaaacgtcatgttcataaataatccctctctgttttccctcaactccctcagttctaggcaaccaccaatctactttctgactgtatagatttgcctgttctggacatttcatataaattgactcatatcgtatgtggtctttcgtgattcacttatttcgcttaccataatgtgttcaaggttcatccacattgttgcatgtatcagtacttcatttgtttttttttttttttttttttttttgagacagggtctcgctctgttgtccaggctgaagtgcagtgacatgatcatgactcactgcagtcttgacctcctgggctcaggcaatcctcccacatcagcctcctgagtagcggggattacaggcatgcaccacctcacctagctaattttgaagtttttaattttttggagagacaagatctccctatgtt

SEQ ID NO: 131 - DNA, 28449 bp, Homo sapiens
  source 1..28449: mol_type = other DNA
aatttggagccacgttcctctgcgcggaacgtggagcgaggagttgccattcgaatttcctacgcggcctccgtgcgattggctggttcgcggatggcgggacgacacgattggctagtcgctcacaagccccgtgccctggttggcccaagacagcgcggaagcggggagttaaagagtctatgcctgtcgtggaagctggcctggcccccggagctccctggagtcggtactgggggcttcgttttgtacgcaccggtaggtacgctctttgtggtccctggcctttcctcctgtctgaatggagaggtttcttttcccagctcctgacttgcctgcccgctcgcccctggtgaatgggagcagtcagggagtaggtgtggaagagaggggcaccagaaagagtggccacgtagggttgggggcgacgcctccttcgcactccatccagggaagccggctgcatctcaaccttccagaagtagactcttttccaccccaccccgccaaggtgtagcctctgtagcctcctttgattgcaagtaatgcagtctccctttctatcccgggaggggtggaggggaggtcttggcgaaaggaggatttttggaggaaaggggaccccaggcagttaatttcctagcccctgtcaatcatacttctctggctaggactcatgtgcaagaaaggcacaagcttcctcatctcttacctgcttgctacaaagaattgtttaatagcaactgtagttggatagggtatccgaagaatgttcatagtgttgagacatgagatgatgaatttaaaaaaaattgtagctataagtcctttagttgagaagagatctgggcctgttgtaacctttagtttcctcagaggcagatctgaattcattcatatttgattgctgcgtataagccacttcacttctctgagcttaatactttcgcaaaataatatcactagtaagttactgctatagctttcaaggttgtttcgaggatcagttgagaacatttatatgtgatactttttttgtaagctgtatcatagccccaagagtgtgaggttttgagttgttttttgtgacacatttgtcgagtacattttaatagttaaaattaatatctatgggactttgtaattttaacatgcatactcttgatttctttttagttttctctctgtgctatgggagatgtcaaggaatcaaagatgcaaataacaccagaaactccaggaaggatccctgttttaaatccttttgaaagtcctagtgattattctaatctccatgaacaaactctcgccagtccttctgtttttaaatcaacaaaattaccagtaagttattcctgactagtgtttacaactaattttaaatgtaagtaattacaaataattttaaatgtaaacatctgtctttacaaggtaaggaggaaatacattatggagcatatatagctgcaatatacttttttaaattgtagtgttcattataatctagtggttaggttaataagttagctagaagatttttttttttttaagttcaagaacatacgttagcttcctgcagttgtgggtgtagctacattctgtggttgacgatatagctactaatacattagagaagaagctgcatcatctaatattctgttctcacttatttggcaaacattatttgagtgttgctatgtgtcagatacagtgctaagcagggattacactgtgaacaagttaggatcattaggcacaaatccttaaggaggttatactccgatgtatgggtcacaaactttctgttaggggccagacagtaaatatttaagctttacaggtcatttggtctctgtcacaactactcacttctgtcttgtatcacaaaagcagccataggcaatgtgtaaagagataaatgttactctgttccaatacagctttatttatggacacatttgaatttcatataattttcacatgtcacaagatatttttttgtttgttttcccaaccatttgaaactgtcaaaataattcttagcttgcaatctattataaaaagaaactaacccctattttaatgtgttaaacagaactagatgagtaatatcaaggcagtgtgataggtgatatgattagtacttaggacaatagtaatatgaaggaaaagtgttcttcaggatattagaaaaggcttcatcactttatcttttttttttttttggtagagatgggatttcaccatgttggccaggctgatctcgaactcctgacctcatgtgatgcacccacttcagcctcccaaagtgctgggattacaggcatgagccaccatgcccgggccactttatcttattttactgttatttgctacactggataagttcttttgaccttggatctttcaacctaccaagttacttagaaaaactgcaaatagggtggctgtttctgctacactttcatacaggttttacaatgagcaagtatgtactagtggaaggtcgagcagtttatattgagtcatttcatcaatctgaccttatgatttttaattgaatcattaaaatttatctcttggtcttactaaaaataaataatagattgacggcagcttaatcctcaaagttggaatgtatggcatcttgcgtttttaggactgaatttgcctagaatatatttctaattacagattaggatttggataaacctttaattcagttgcatggttgagtacagaaaggcagcactggttgccattcataattattttaaggatcaactatgttgtgagcttttgcagccacctccaaagtgactaaggactttaatttcagttccttcttagtgaaagtaaagacgtttgttaactgtgagagatttttacttttacatgggcttagtttatcacactgatgagtgttaattgtgaaagttttatatctttattactctgttgtgatttttctcgtattacgtaattccaacccaggtgaaagattctgatattttaaaagagatacaggctgggcgctgtggctcatgcctgtaatcccagcactgccaaggtgggctgatgacttgaagtcaggagtttgagaccagcctggccaacatggtgaaaccccatctctactaaaaaaaaaaaaaaaaaaaaaatacaaaaattagctgggtgtggtggcgggtgcctgtaatcccagctactcaggaggctgaggcaggagaatcgcttgaaccggggaggtggaggttgcagtgagctgagattacaccagtgcactccagcctcggtgacagaacgagactctgtcttaaacaaagagagagagagatacaattaagtcagttgatcgaatgtgatatgattaccctttgccatttaatttcatggtaaagtcaaattttaaaatacaagctttaaaatattttcatattataaccattcatattatttctcacataggttagcattttgatgaactattttagtttgcctttactcataagctcactttcttttgttaagactccagggaaatttagatggtctattgatcaactagctgtaataaatcctgtagaaatagacccagaagatattcatcgtcaagctttatacttaagtcattctcggtaagttttcctttcttgcacctaagtctaataacactctcaagtgaagagaggtaggaaattctaaatgttgagtatttttctatgtaaaggtatcagggagaaaaaattttgatgcagattttttctatctaaatgaatgagttcaaagaactacattcagaaagattttcttgccaacagttccagacctgagtagatacctttttcttttacaagtaaccttttccctctgctactgaggtgacagctctgtacccctagcactcagttaagagaagaacattttgaaatttgcacttttctacatggttgtggcttctgccattaacttgtttcagtttgtctttttgatgatttggggtaaagcaaaatgctgtttcattgttatctatgtttggggaaacctaaaaccccctcaaagagttacgtatgcactgaatggaagggtatccattagcaacagagcggttttttagacatcatccaactgtaacaattcacttggaatctgaattacattttctagaattctacatatcacccagtgcagtcttatttgttgatgtgttgtttaggtttcaaggcactaatgtactgcagatttagttttttattacaaagtgtaaggtcctattattcttttgtagttttagggactcttgtttatatgttttatagtctgattttttaatatttgaaaaaaatcaaatacatggtatgaccagattttaatttgctgtcctaaggtagacatgttgttagtccaaaacaaaggataatccttttccctttgacttaagaattcagtcacacaacgttgcacacatattgagatattctggtaaatacttactggcttttctcctccatcttctctttgcttggtaacatgatgaccattcaatcataaaattaatgtccacccagagtgttaataggaagggaatagaatgaggatgaagcatgaaaggattttaacttaaatttaaataatacctttgaggccaggtgtggtggctcacacctgtaatcccagcattttgggaggctgaggcgggcagatcacttgaggtcatgagttcaagaccaggctggccaacatagtgaaaccccatctctactaaacatacaaaaacattagccgggcatggtggtgcacacctgtaatcccagctactcgggaggccgagacaggagaatcgcttgaacccaggaggcaaaggttgcagtgagctgagatcatgccattgcactctagcctgggggacagagcaagactccatctcaaaaaaataaaataaataaataagtaaataaataatacctttgaaagagaaggtgagatgaatatctaaaagcaaatgagtcacagtgactaattttttgtttcacacgaacttaattatgcttaattattttgtctcatttcttcaatatattgaatgatggacaattattatattgatcagtcaagagatacttattgagtactgtgagggactgtaagaaacactgaagaagtacaagatactaagagtcaagagtcaaaaatataattagaccaaagttgtaacacagtgcttctgttcttactactaaatgatatattgtctgcaaaggtttataaagataatcttggtgtctcttagtacatagatttatcatatagaagaatggaaaagagtgggaaaatattataatttaatttaataatataattcaatgaatggttatggcttctaccaaggatagtcaatatattcttcacagagcatctcgtttcatccttagaaacaagcagtgtctttcagtatctcttcttacatattagccctctacttcaattcttcccatccttttcatgccaccatccacacagaaaattgtaactgaaaagcataccagtgtaagcaggtgagtcttggccatgtaggtgaccagtcctgaggtcccctctcctttgccaccctgcaaaggctcaacattcaggccacacctatacctatatgcatcatactggtgttcagtggtatgctggtcaggatgctctcccctgtatgacttcttagaatcttgtttgatctgactctagagtatttggccacagtgatttttacagtttccagcaatcacctgagtatttcatgttcttgaagtccctctgatgaagtagcaaaaggtttctgaatgcagtaatcctagttcagagcttacttgctatttgctaagcttgttatgtgctgccattttgaccatgataagatgaagagaaccattgataagatgaaggccattttgttatcctcaaaatggctactgttcaagctgggatatgtgggttgacactgtagtttattttctcatacttctcccacttgaaaaatctacttaatttctgaaatgtatacattctcatataagctttattaagccatgagcaagtctatatgtgaaaaaaattcacaccatggaatactatgcagccacaaaaagcatgagatcgcgtcctttgcatggacatggatgcagctggaggccattattcttagcaaactaatacaggaacagaaaaccaaacccctcatgttctcacttataagtgggagctaaatgatgagagcatgtggacatatagaggggaacagcacacactggggcctggtggagggtgagaggagggagatcaggaaaaataactgatggattctagacttaatacctggatgattaaataatctgtacaacaaaccccagtgacacaagttacctgtgtaacctgcatttgtacccctgaacttaaaataaaagttaaagaaaaaattctgagacaaaataattttaaattgtaaaaaaaaatatgtcttaccaatttactgatggaaggcaaggattctttcctgtaatggaataaagaagtggtcctagaaagctaactgctgagtccttggcaagtatatgctttgtgcttggacccaaaattttatattaaatcttgtagctgagaagtttatataacagtaattgcagattgtatcaaagtgaaaaaaaaattcatttggaaaaaatgttatattgtcagtgttttatttcagagttaatatttttgactgtttagaactgtgaactatcctcatctattttacagtaaaagttgattctaaaattattgccatgataaacttgttataattgaagagaaaaactttggacaatttttagatgtatgttgaattaaatacttcttaatttgtattaagggacaaagtttatcaaatttatattgttaaaagcaatttaatatcaatgtaagtcttttgaaataaagtatcattgcattcaaactttgaatggaaaagagggaggtaagcctaacagctaactgctgaatttcagaatactgcctaaatgttactaaatgttacaagataccactagtattaattataaagtgagcttaacatttgccagttttcaatgaagggagattatttatttgaaaggttattttttaaaatgttcaataagcttaagtaatagcatggttatttttcttctttatctttgtatagaatagataaagatgtggaagacaaaagacaaaaagccattgaagaggtaacttaaactgttactgatcattaaatcagttaaggatcaattctgcatgtacatcacttcttttaggaagactttcttcaattccttcactgtcctatctcccctccaagcccttcacagtcccatctatataaagcacccttctgtactgtcctaagaccaataatttccagctatcccagtaccttgcatagcacttgcatactgttgtaatgatcagtttagtgtttctgtcccctagacgcaatcttttttggccaatactgtacttcatcctttcattctcaggacctagcacaatttgtcttccttgtgccttcaaaatgttgattagcacaaactttgtttcaagttggagtttatgtagaggaagtcgaatattctcaggccttcagagtctagattggcattgggaatggctttgtctttttttgttaatactttggatttttaagatattcatgaaataaaatctcttactgttaaacaggaaaggtatatcataatgtaggctttctaaaaaataaaaataattaagttttttgcttttttatgtctgttgaattgcctttcttagcatctaaataaggttattattattattattttttgttttttgagacggcgtttcgttcttgttgcccaggctggagtgcaatggcatgatctcagcccactgcagtctccgcctcccaggttcaagtgattctcctgcctcagtctcccgagtagctgggattacaggcatgcgccaccacacgcagctaattttgtatttttagtagagacgggatttctccatcttggtcaagctggtctcgaactcccgacctcagatgatccgcctaccttggcctcccaaagtgctgggattacaggcgtgagccactgcgcctggcccagcatctaagtaagggttacttaccttgttctttcctcagaaagtctttatgtgatggcagcatttctgatttttacttttctgcccctctagccccctcaaccctcctctgttccttagccgtacttggctcttccgtaccacaaaagactatgtttactcctgctaaacattacctacttcttcttctatctagtaactgcacagttttcattctgactcagtcacttggttcttccccacctgaatattctcagactctcaaaatttccaacattttgaaaaaatactttctttaagaatccttaattttaaagagaaacccagcaggtaaacttaagaaaatttgtttcttttcaatatatatttttgaaaatagaagaaacatatacatatagtaaaaacaaaaagaaaaaatataaaataaaaagcctcctgtttccccatcccacttcatgaaggtaatgactataacatttcttatgtgtactttcagattaattttacttatttaatagcatatgtccttaaaatattttcgacaaataggattatcattctcatactattatcgttctcatactgcatcctcctttttttgcttcatgatttttcttagaaatttttgataaccagcatatacagatttttacattctcttagcaacagcatagttacctagcccctgttgacagatgtttaaattgtgtttattatttttctgtcacaaataatgctgcagtgatttgtatatatatctttatattcttgaaatggacctagtaagtcagaggctttgtgaattttcagttttggtagattttaccatattgccctcctaaaaggttataccagtttatactcctgattacagtgtgacactgcttgattttccatatctccaatattgattattatcagaattcttaatttgttctactcctattactttaaaaatgactttttttttttgtatttctttacttttgagtgaacttatacatcactttgtaagtttataggtcctttaattttttttctggtaattgtctatatctgccccagtccacctttaaaaaaaaaaaaaaaaagaatcttttcctcttagattcatgggtaatttagttaagaaaattagctctttgtcatatgtatagcaaaatatgaagaaaatatgtttggttacttgcaaaacctagggaagggaaaacactgtggtagaaatgaaagaggaaagaaaagtatacaaatgctctatctcatttgaatatactggccagtagtgtgctggtgaatgtttaacaacttgctctctggtcgtggaaggagtacgatttatagcgattcctgctatccatagtgtaagtactccaaccatggccagtttcaagctactgatgtgacatcactgaatgggaaaggaagaatagtggcacaccattatatgtaggaattccaccatacagatacaaaatacattattaacctcaagagcatagacattgataaatatataaaataattagcaagtggtgagttttggatatttgttacctttatttttaatatatttaattgtaagtttacataattttatttttaatattggttttaacaactggtgcacagaattcttgaaaatttaataatcagatcttgagagccagaacaaacaagccagcttcagtgccgtcattcatactggcctacttgcatgtctctgtcttaatatattccttcccttttcatccttttttttgtaaccccatcaaaaaaacctgggaaagaaatttaaaatactttgtctatgattaatcctcttagtttagtttgcaagtttcaaatttaactggttgatttgaagtattaagattcctctttatatatactttaaatttcttccatttttcctttggtcatttgtattaaaatttttgcatacagttataaagttagtatatgacatgtttaataattacttggaaaaacacaggtaccgtctcacattttgggtggaatttatgcctaattgtatgactttaattttcctagtttttcactaaagatgtcatcgtaccctctccttggactgatcatgaagggaaacagctttcacaatgtcattccagtaaatgtgagtgtactaaaaatgatatgaataaaaatcaaaaaagtcggtgaatataaagcaacatatcatgaagtgccagtatatctgctttgtaagaagcttgctttaaaattctggataacatagaatttaactccttttagggttagaattaaaaatttgactaaaatttattgaattgttttttagctgttatactctgaatttaactttttcttcatgactattgtgaatgtcagttataatgatggttatagaggatccatagatgaagaaatagttggtattgaatatagagatgagttgttaatgactttagcagtattttgaaggttaatattttagataaaaccgtaaattgtgttgccttttgctaatttgctgatttcttataaaggtaaagaaaggatgaagacttaatatgacctctgggacagtgtattattgctgagtatctgcaaaattaataaggaaattaaagggcaagccagtaagctaacaattatctttctacctccaggcaatggttgtcatatatttgttctcactgctctttgggttgtgaggcagtattcaggaatcacttgtatatatgcatccctcatcacagtggaattacactgtctattgtagtataccttaattatgctctcagtataagagggaatgtttgttccattctttatcaaaaaacacaacataataatacaacaataataggtaagctgggttagtactttctctatgccaggacagtgctaagtgctttcagtaatttcttataactcatatgaagtaggtgtaattattggccccattttataggtaagaaaacctagttttagaaagatgagagcatttgtccagggttacagagatgataaaagtgggaaaacctgaattcaaaattctcaaatcagatgctgtattcttagccattatgaattagtggtagcacgcaatagtagatggaaatctggattgtaaaacctcctacttttataaaccagagaggtgaccttgatcaaattattctctttgtacctcagtcttttatttgtgaaataaaaggattgaactagagttgtccatttacatccccccagctctaaaattgtgtgtccaaggtggcattctcatagatactagtttttcacccccagattctttactgttggattttttcaacagatgaatcaaccttcttaagtgattttttaaataacatttttgtattccaagtatcctgttttagttcaagtgatgcaggatcaagaagatgcttaaaaacactttagactctttgaaatctaatcaagcccacgataacagtgcagtggttaataggataggctccagagctgtgctgtttactgtgttgttgggagacaattctccataggcctcacatttctgcacacctttcatgaagtggcatggacaagttctgttccaaactatcttttctagggtgtttgtcttggaaggtagagatagtgtgtcccaccagagcagagggtaagtttgttttgctgtccagtatagtaaagatgatgtctccctctggagcagatttgtttgcagtctctcttaaaagaatgggatttcctaagcttggggttccttagctatggtgaaaacccattgtgtgtccaccagccacctgggtattttaatttagaatcttttaagatagagagcactcctcccatgattaggagagacacaagatggaaataaaaattttattacttacaagtcctaggggtacacagcatacctgaacaccacacagggaggtcaggaagagagagaaagggacccatgggccaacgcctttattgggtccagggcattatccaaacagagttttagttggtgggtttaaagcaagcaggcatgcattgaggaggtcacacagtgactgagagatagtcactgtggcatgtctgtgtagtccatgtgcggtatgagggttggggggtcagtcaggtaggccatatgtagatggcccatagggaggtggttaccaggaggaatttatataaggcagatatctggatcaaccacattgaggtatagaactggaaactgtgtcgggtgaatgagccctgctttttgtatgagaaagtccagcttgtatgcagaattataagaattcactgcactggactgtttcatgtcatcttcttggcacttgggagcaaagggaattaataggaatgttaagttcatgctgcctgctgtgctgaaaataataaagtcctttatctctgcccccagaagcctcatgtctttagccagcaccaatggaactttgacatgttcacctgttagttgccaagttgggtagaatcttagaccctttatagttcttgacagttgtggccacgtgtgactatttaaatttaaagttaaatttaaaaatggagttccccattcacaatattcacatttcaggtgctcaatagccatgtggatatcgagtagtatagatagagaacattcccatcatcacagaaaatgttctattggatgctactttagggccaaggttggcagcccttaagtgtaaaggattcaataataaatacttaagcctttactgaccacacaacctctgttggaaccactccactctactgctgtaccacaaaagtagccgctgacaatatgtaaatgaatgtgagtgtgtaccagtaaaactgtatttaaaaaaataggtgaaaggccagatttgcaccatgaacaatagtttgctgacccttactctagtgtaatattatctaggtttgaattgtacccagtaaagctcactagctgtgtgactttagatgagttacttagcttttctgtgcctcagtttccttatctataaaatgatggttattgtggtacctctaagataatgtacctagcacatggtgtttggttatctacctaaagattaacaaataaaatggtgaatgaggggaaaagtggttttgtttatacatgttagcttgtgctggtagcatttactattattaatatttatgcagcaaggtgcttcagtgcatatcctcatgtgtttttatttatggacttgagtgagaatttccctgggatatatacgcaggtagaggatttctgagttatagaatatatcgttacctaatctgactacacagtattagagtgctctctagaatatctgcacagtctgcacagccccagcagtccctagggttcctgtgtcccagcatccctgcctgcccttggcattatccagcttttacatctttgcctttcctataggttatttgacattctaaatgattgtttcagttttctttttgtcttcatagactaatgaccttttacatttcatagaaaatgtctatttgtaattcattgatatgtttcaattggagttgctaaccttttttttcctgttaatttctaagataccttacatattgtggttatattggtcttaaacatttcaaatgttatctcccattctgtcatatgtatgttactctttgttcttgatatcctgggttgcatagaaatttttattttggtgcagtcaaatccatcgatttttttttttcctcatttgattgtggtcttaaacttgtctaagcccttctaggggaagcaaccaaaacacttggaatagagttgaaaagtgatgtgataatgttgctgtaggtgtctttctggtctgaggaaggcaaggaaggcatgctggcagaagataaaatttaagctgagatttgagttagactcttggaatgcaggggagaaaaggcagggaggagagagcataagataatacctagagatgagagagatacctgtttcttgtttgtttgttttaggtactcaaataatatttaattagatggcaaccatgctagagaaatagacatggttttgaaaggctttgtaagccattgaggtgtttggattttatcctaaagactattgcagggttttaggcagagagagtattgattacatctgccttatagaaggtcactctgcatgcagtgacaaagtcatctgcatccaaaattttctttatttacccgttttgatagtatttcacagggaaatttaatttattcagcaacccacttacccattttaaaatttagaattgttaggttactacactctattttgtcattttattttagaattcctgagttgtttctggttttggggggagggggggtttgtttggtccccttgctttttcttccttttatcttacttatattagtctttttgagatggttttggtttttgagtttttttaatctggtgatttttcaatttataaaactttagagttaaaataatttgcacccatatttttaactcttcttgtgaaagaaactatatggttttattgatcaaatttcaggttttgtcaaaataatctggcattttaatctgttgaggacattgagggtagctaaaaggtatccctaaccttttaaggttgacgtcatgaagagtaatcatcatttccttaaaaaaaaaacattactttgggattcatcagtcctactactgggtatttatccaaaggaaccaaaattactatttcaaagagatacctgcactctcatatttattgctgcatcgttaatcacaacagccaagatatggagtcaacctaagtgtccatcaacagatgaatggactttttaaaatgtgatatatatatatatacacacacacacacacacacacacacacacacacacacacacacaaaatggaatactattcagccttaaaaaagaggaaattttgtcatttgtgacaacatatatgaatctagaggacattatgctaagtgaaaaaagccagccacagaaagacaaatactgaatgatttcacttatatgtagaatctaaaaaagtcagactcttagaagtagagaatagagtggtggttaccagacggtagggaggaggggtggtgggggagatgttggtcaaagggtacaaagtttcagttagacaggaggaataagttctggtgatctgttgcacagccaggtaactatagctgataatgaggtatcatatagttcaaaattgctgaaagtggattttaaatgttcccaccacaaagaaaagtatttgaggcaatggatatgttaattagcttgatttgctcttgtcatagtgtatacatatattgaaacatcacattgtaccccataaatgtatacaattatttaaagaaaaatgtaaaaaaaatattgcttggtgactccttatttgctgtggtaatcctttagttttatccttgtattccctcaaaggtaaaaaaataatagaaacataccaaaatatatacttatatatgcagattttttttaatgttgcaaaataagtttccactttcttaattttttactttggaaaaagtaatgctaaagcaaatgaagagtataaaacataggatttttcacttaaaatgtcttacaggcactaacataaatagtgactctccagttggaaaaaagctgaccattcattctgagaaaagcgatggtgagtatgaacacaatttgaaaagaaggatgttccatattaagctacattgaattctaaacccagttcaggtagtaacactttactctggaattgaaattgtttcctttttttttttttaatttatttttgtttttttgagacagggtcacactctgtcacccaggctggagtgcagtggcacaatcaagagctcattgcaaccttgacttcccgttgacttcccgagctccagtgatcctcccaccgcagcctcctcagtagctaggactacaggcacccgccaccacacctggctaatttttgtatttttttgtagagacagcatttcgccatgttgcccaggctggtctcgaactcctgggctcaagcgatctgcccactttggccccccaaagtgctaggattacaggcatgagccaccaagcctggcctgtttggattttttcaatgagctacataataaccatatgagagctgacctttaaaaacaagtatagtagaacagatgcatccagccatgttttagaaatagcactagtgttttgttttcttgttcaaagcatgtgaattgatttctggtcttggaaagcattcttttgaaaattggttaatgtgagaaatctccccccagatataggctggcttccttttcaagtgccagtaccagagccaggagttaacttttactattaacacgtttacaccagttgcggagagtgtgggaaaccacttctagaaaggtggcagggtatgtgatagaatgcagaaatgaataattccatttggctggaacatcacggggagatgattgactgggcagcacatgctgaattgtatagtgtatactttcattgatttatcccatgtttgaatttgtttatttatttgcttgtttccagctgcttgtcagacattgctgtctcttcctgtggattttaatttagaaaatatattaggtaaatactgtatttgtttaaacttttaataacttgaaccaaaggttttgtttggctggctttttgtaaatggtaacatgggaaatatgtggcagtgcctctttctaaagaagtggggaaactgccctgaaatttctctttttcttgaacatggtttgaactagccttattatcatagtgaactttattactatagacagaaactataaacattttattgatattatactaacaatgtagcacttaaaaactaaggaataatttaagatgtaaaacatcaaatatgcaattaaactttgccctctttttgggaaaaaattcaaacatagtgcatgctggcttcttaaaagttgagtaacagaagtataattgccctttaaaatgactagctttgccttttctcctattattaaatataggtgactattttagagctgatgaatttgcagatcaatctcctggaaacctcagttcttcatccctcagaagaaagctgtttttagatgggaacggaagcatctccgactccttaccttcggcttctcccggaagtcctcacagtggtgttcaaacatcactagagatgttttattcaatagatttgtctcctgtaaagtgtaggagccccttgcagacaccaagttcggtgagaagtatactaaaaagcagttggctaatatgctgtcaagcttgaacccacattttgttgttgttctatcttaggctttcagcagcctgaagccatggttgctttctgtctctagtaaataagtggaaaagagggatgaggaagggcctttactggcctaaccagaaacagaaactaagaactcatgactgtattctctcccttggacacccctgtgagctgcccagattgctttcagaaggagggatggttgtcttttgagtattatgcttcacagaaactaactctagttcgtatgttatcattagtcatagggatgttttaggtcagactcttcaattttgtatttagatatgtacaggatgaccagatttatcatgagtctcaaggaaattcagcataggttatttactaaagtgtgtgagatttacagtataatacaactggcttggcattaataaatttaaaaatttttcacagatggttgcttagtgtgaaacttaatggtttgttcaaatacaatgtgtttatattttgactaacatatttgatactatttcagaatttttgtagcaatcttcttagttgtctttgttgcaaggtgtcttttggtggttctcgtgaactattactagtttataagtgtgttttgaagaccatgataaatagcatgcagcataagagttaaggaagagaaccatatacatttatttactatttaattttattacaggggcagttttcttctagccctattcaggctagtgcaaaaaaatacagcttgggaagcataactagtccttcgcctatttcttcacccactttctcaccaattgaatttcagataggagagactccactctcaggtatgtctcataataaaatacctagttaaaagttttatactatcaatatttgttattagagaggttcttttaatttgtcttaatgatagagctcaaaatgatcactaaccttctaacatttaggaactttgatttttaaataaaagaacagtttaccttcaaaggctggaattctcaccagtttgtactgtagtgttaaatatagttactttaattagcaatatttacatcaaacactatcaaaggaaatttagcaatttccatttgtgctattgtttttgacatcacaatttcactttggtaaacaacacaactgttacagaaatgcagtttttcctggcatgaaacatgattaccatttagtagtgacttttccattttcatgtttttatgatgtgattttttttcccttcccacctttcagaacaaaggaagtttactgttcattctcctgatgcttcatctggaacaaattctaatgggataactaatccgtgtatcagaagtccttatatagatggctgctcgccaattaaaaattggtctcctatgagacttcagatgtatagtggtggtactcagtatcggacctcagtgattcagataccttttactcttgagactcaaggtgaagatgaggaagataaagagaatattccttccacagatgtctcatcacccgccatggatgctgctggaatacacctacggcagtttagtaatgaggcttctacccatggtacacatttggttgtgactgccatgtctgttacacaaaatcagtccagtgcttctgagaaagaattagcactgttgcaggatgttgaaagggagaaagacaataacactgtggatatggttgatcctatagagatagcagatgagaccacttggattaaggagccggttgataatggcagtttacccatgactgattttgtaagtggcattgccttcagtattgaaaactctcatatgtgcatgtcacctcttgctgaaagcagtgtcattccttgtgaaagcagtaacattcaggtaaggtatttaatattctatagccccttcctcactgccttggtgttctttatcctttctaagattatagtataagaaagataatggattaaacatgaggactacagtattatataatattttttaaaaatattaataccaagtgatatgagaagagtaaatttattttaattatgacagataaggcatattttatattcacattaactgatatttgtatggagtaggaaaaggtaagagcagaaaagaaattagcctgctctagagaaatcaatcctgctagagtcaggcaggattcatcactgtttcatgtggatccagtcccccaaaacatgcaaggtctggtatagtatttgcattctaaaaataaaatcatttttgtttttcctttatgtgatttaggggggataaaaagagtttagagcactggttttttttttgagatggggtctcactctgtcacccaggctggagtgcagtggtgtgatcttggctcagtgcaacctccaccttctgggttcaagcaattctcctgcctcagcctcctgagtagctgggactacaggtgtgcgtcaccacacctggctaatttttgtatttttgtagagataggatttagctatgttggccaggctggtctcgaactcatgacctcagttgatccgcccacctcagcctcccaaagtgctgggattataggcatgagccaccgcgcctggccttagagttcttttatgtatgcatttttgtgcttttcttttagaaacatgatttatagcaacatttttcatgaaattatacatttccaattttgcaatgtctctgacaacaggaaaacctgattcatttaacagatacgtatacttcataattagcactttggaaaggcatttgttccattcattgttgtgttctttgagctgagaattttgaaggaacttctttagaagttctgactttagtcagaaggggatagcaataacatctaacactaacgtagcattactatgtgccaagtcctattctgagacctttacatgttttactttgttgaatttttacagcaatcctgtgaggtatgtgtactgttatccctgttttacagatgaggaaactgagggtcagagaggttaagtaaattacctaaagtttctatacaactagtaagtggaagagctgagatttgatcccagcagtctggctttagagtccatgttctttaatccaaaagttaatactgacttataataatagctaatacgcacatagtgttttgatataccaggcactcttctaaccactttattaattcatttaattctcacaccaactctataaggctttagtgttgtcagttttggcatgctgaagttaaaactcagggaaggattctaaatgacccaaaattaaatatagtattttgctcatatttttatgcttctgttgcctatcctgacttacagcttcattgctcaaaaaagattatactagaatcacttttacatattttagcttctctaaagttggtttcataaatagaaaaaagcacatataggcttaaaagtatatgccttaaaggcattgtttgctgcttttactctctgccttttttcactttctctctctctctctctctctctctctctcttttttatatagaggaattacaaaatacttttgttgaaatacaccttaatcatcatctaatccaactaacctttggaagccgtgggtagcatattctcccataattgtagtcactactaacttgtcaaactatctatgcttaattacacttgcagggctattccattcattttttaacttctcttactattacaacctcttccttctattgggtaaaaatatgttatgtgataccccccaagcagtctcagttttactctctgggccataacatcataatgtctactaaaaatgtttcatacattacatttctgccacatggttagctttctgctagctttctgaggaagagtacatttctaaagacattgcatgtgtgatcatgtgtccgtctctcacatttgagagttcagaaatgtccttcagagtttgaaggcattgcttccatttcagtgagagatctgaagctatttcagtgcttaatcttttgtttatgatctctttttatccccaactccctggacatggataggcatttttctttgtctacagggttctgaaatttcagtgatgtcctttaatgcgggtttctttccatccattatactcttcactcagaatgcccttacagtctgtaaacttactcccctcacttcttggatcttttcttgaataatatcttagatttctcctctgctgcttctagtgttctctctggagcaacttttgattctccaatttctaaaaatctttttttttttaaatctccttttttgaatttttgggcaatttcctccagtttatataataacctttctattgagttttttattttctacacttttgaaatgcgttcggtactaattttaaaagtctgcaatgtggctggcaaggctggtctttctactctccagcttgtttccttcattctctgtttaggtcccactagctttccaaagttttaaaaagccacgttttctcttgttacagggcctttttgcacatgctatgtagcatttctatcccattttacttagttaactcctatttatttttttcattgacaacttattgattacatcctcaagccttcccagatcacattagccaggccagacctcattatatgctttcatgattccatgcacattttgcattctttccaatcagaccactaatgcagcagtcatgcatgtttttatccccagtgcttattaaaaagaacccgtcacgtaatagccgctcattaaatatttgtgtaacaaaaacagaacgaatacgtaggttaagttcaaccagagggatggtatttactgagagtaacggggagccaggatttggaactctgaggaagaattgagagggatcaggtaaaggaagtacagcccctgaaggagactgaaaagaaccagccaaagaggagaaagggacacttagaaagcacagtgtcatgaagcattttaagcaggaaagaatggttagcattgccaaaataggagcaagcaacattgggcttgaaaaggggctaatggactaataagaaaagtaattaataactgaacagcctcaaggtgaatggaaggaaggttaaagaagaagtaatgaaataacgtgtgtagataactctggagtttagttgtgaagggaaagaaaatgatacctagagaagagcatcaaagtcagatctttttgtagtttgcttttttactttgtttttacttaacccatttatgcctaaggttgcaattttttgaatttttgcaatcagaccttggcgatgaccttgaacaacagggtataagtaactcccacatgcttagtgttccagtaatggaacacagaagaaacagcatacagcatttaaatgaagagagagaagatttttaaaaactaggagttgggcagcataattattaatataattattaataggtatcagtcacatgtccttttcaagtaccagagaccatgccaagcattttacagtcagaagctaatccctgtaataccttacagatataatagatatcgtcatctgtcaaatggtgatctgttttataaatgagggaactgaggcatgcaagagggggtagaatctagaaccctgataggagtagccgcagtaactcctccatgtttaaaggagggcagggtgccaggatgggtgtgggtgcaaatgtatttagttgaggcgcgagcatggcattaaagaacatgggcttgggaaaccgtaatggcagatttcagtttatagcccagctctgttagctttataaatcccagaaagtgacagtttctttcagcttgtttcctcttctttaaatggggataataataggattacaggatattagcatgatcattgtgattaatataagtaaacagtgcctgaacactgttggtgggaatatgaattagtacagctattatggaagttcctcaaaaaactaaaaatagaactaccatgtgatccagcaatcccactagtaggtatatatccaaaggaaaggaaatcagtatgtcaaagagatacctgtactccagtgtttattgctgcactattcataatagccagaatatggaatcaccctaagtgtccactaatagatgaatggataaagaaaatgtggtatatatacacaatggaatactattcagccataaaaaataatgaagtccttacatttgcagcaacatggatgaactggaggacattaagtgaaataagccaggcacagaaagataaataccacatgtactccctcatgtggaagctaaaaaggttgatttcatagaagagtatagaatagtggtaggtagtagaggatgggaagggtagggggagcagggatagggagaggttggttaatggatacaaaagtacagctcgataggagtaattctagtgttctatagctctatacggtgagtgtaattaacaatttatcgtatattttcaaatagcttgaagagcagattttgaaagttcccaacgcaatgataaatgtttgagttaatggatatgctaattaccccaatttgatcattacatattgtaaacatatcaaaatatcatgtacatcataaatatgtgtaattgtgtgtcagtttaaaataataataaaagcaaaaacataagtagtaatggaaggcaaggtcctttgaatggtaacaaacaagggggactgagaatgatgagggaagggctaaagtgctgggcccagatgtcaaggaatgttatcacagggcacaactgttgccaattgaaagttttaaaagacaatgacatctgatttatgtggtagaaaaataaatttagtaacaaagtgcatgttaaatgactgacatagagacaccatttaaaggcaccatgacccaactggaatataaagtttgcaattagaaccaagtttgaattagagttcttttatttccaggctgtgggatcttaaggcaagatttacatagcagtgaatagaacatgactttttaatttttgtcccctcatccttcttagctataaagtgagattgatgcctgccttgatgcctgtgggggataacaaggtatctgttgcctggttggtacatattaggcattgacattagcagaagtctagatgagagacagtgaagtcagccaccatctcaacttggctctcatcaatcctgctcttcccatagtgtgggacaaactccccgcatgccttacttcctgctgtactaatgagtaactcttccctccatatatatccagttacatattagtattgcattataagccagctatttggcagtgatgaatattagaaggaagagctattggcagaatctctgggagcaatctgacatttatatttttgatcaagtagctattgaatgatagcagaacaaggcttttccccaaaaatgttacacatcacaaggcttttgttctaattggaacatgacctctagtagtaagcagatatgtatccagccttgaaatctgggaacattttttcaggattattaagtgataaagagtgccgtttctaggctagtctgtacctttgtgagggaaacaaaatgacagtcagctttttccttccctctgatcctaacttgcagggagggcttaaatgcaaaatgattcccttgtggattgctttctttggtgctcagcattatacaggtaaatggagcgttgtgcagtgaacagaacctggacttaggtctcacatcttcatcacctcatcactggatgacattgtgaaagttaagctttttaagccttaatttccttctctagtaaagtattagggttgttgaaaggagaaaaaaatattaaatatatagagatagtgcctggcctttttagacactcaataaatgtttccaagctggaagttcgctagaatctttcttttttgctcttttgcactgaaacagtgtatcttaggatgctacaatttttattaacatgaaaagctgaactaacatctagagccattatatatgtggcattattgtgaacaactaggtgtaaatataatataatccacttttttaaaggcagcatgcctcaagccatttagagacaagcctggaaaatgcgttggaaggtgaagttagttgtaatactcatttttgtctactaggtacgatcacaaaataacaggaaagcattgtgtcagtaggctgttcactgattcttaaggaagttacaagatatatttcattggaaggaattgtaaaatgactacaataatcagtactatgcaggactaccttttatatttgtgcattacttttgaattttgttcaacatgatcaatattacatgttaggatcattcagatgtagtgaatgagagtttatagtggtttacttatttaaatatttgacttttaagttcctcacaatatatttttttcttttttctcctgtcagatggatagtggctataatacgcagaattgtggaagcaatattatggatacagttggggcagaaagttactgcaaagaaagtgatgcacaaacatgtgaagttgagagtaaatctcaagcatttaatatgaaggtacggagaaaatatagtgaaagcttaatattgtttagattagaaatataaaataattttgattattagacaatagtactattgagaaactatatgaaatttaaaacactaaaaggtaagcctgttttcttaacatccaataacctttaaatattttggttactctgaatacacaagtatcttacatactacaaagtgtgcaaaggtagcgtgtatttgatgagggcatttactgaaccttccaggtggtggttatatattcatacttgaagaaactcatcataatttcaggcactagtcaggacagtctttaattttatgtgccaattttttttgcattttatttttttgtagagacagggcctgctgtgttgcccaggctggtctcaaactcctggtgtcaagcagtctttctgcctcagcctcgcaaagtgctgcgcgattacaggcatgagccaacatgcccagccttgtatgccgtttcttttttttctttttttttttttttgagacagggtcttactctgtcacccgggctggagtgcagtcgtagaatcagatcactacagcctttaactgctgggctcaagcaatcctcctgcctcaccctcctgagtagctagaactacaggtgtgaaccaccttgccctgctgttatatgccagtttcttataaaatactataaatatcagcaaatgtgcaacaaatgtttaatagggaggccaccttagttttcctttctgttgtatgtagtaggagcaaactgcctttctgttgtatgtagtatcagagcaggtctcttctaatattaacctgaacaaaatccatcctatttcaggatgcagttgtctatctaaacataagtagagataaatgaaggatttttttaaattttattattttattttttttgagacaaggtctcattctgtcacccaggctagagtgtagtggcacgaccacagctcactgtagccttcacctcccagactcaagcagtcttaccacctcagcctcctgagtagctagggctacaggcatgtgccaccacacccagctttttaaaatttttggtagagacagggtctcactatgttgccagggctagtcccaaactcctgggctcgtgcgatcctcccaccttggcctctcaaagtgttgggatgctttttgatgcagaatattgatttataaaatactgtatctttactgtcccttcagagttcagctaaagaaacgtgcttttaggttttaaaaacagtcccgataattgcatcctccagtggtcctacttaaactgaaaacaaggtattgtcttctttttcacagcaagaccacacaacacagaggtgttggatgaaaacagcaagcccttttcaatgcagcagtccatagaatgcctctgtcagaatcaaagactaagcttaagagttcctcgcatatatcgttgtgcacaggatcaacatgatggtgactgggaaaaaattacttcaagtaacatgcttagctttccctccttaatgtgaaaaatcaagggcttactgacataggaacaacagaaatgctcctggaacttcaagttgctgaattataagtttattttttatcaataaatatttttatacttacattgagtgatgtgtttaacaacaaattgtgacagagctgagtgctcctatcttacagggtcaatgaactacttattaagccttactggtagcactgaatttagcagttctgagaacatgtgaaactatgttaaaactgaaggcactatatatttttacataaaagcttgaacatacagatgaattataacctatgtgaagaaatcttagatataaaactaacttttcaaagatacaaaagaaattaaacaggtttcctgaaattttagttcttggtctgttcacctctgtggggaaaattcttagttccagtgataactgttctagttactacttttaagtatgtaaatactagaaaggtagtactagtgacatcatcacgtgtattgttatctatggggcaaatgtgtggtgcccagaataaaatatacctcatgcctagggtagggacatcctttccagctcaaacgtgggtagggatgtgggagaataagaatgtgggagaaccaagagaaaaagtggggctgggagagtggagttcccgtagggcataggcctgtgaagtaacactggggcagatatgtatgttatatacaactatttttttaaaaaacttatatccatgttgggagtagatgggtatataacagtttggaaatactatctttggagaatgtatttttgtatttataaatcaacttttaaaaactgtctcattcaaaagggaataaagacctgtgttatcaatg

SEQ ID NO: 132 - DNA, 32744 bp, Homo sapiens
  source 1..32744: mol_type = other DNA
gagccactgaggcctgagcgagagccgacggcgggcgggcgcagctgctgccggagcgccggcgcgtgctggtgggccacacacctttcctcctcttcactcgcgagccctcggacatggtggcccccggctccgtgaccagccggctgggctcggtattccccttcctgctagtcctggtggatctgcagtacgaaggtgagtcctgccctgccccggccaggaagtgggctcccggaccaggccccccgcgctttcccgtctgcgcccgggcgcctgtcccggagcggctcgggaggtggggcgagcgctgggggagcccgcggcctggcttgggcctgagcccgcgcccggttccgggtttgtctggggaagaatcgaggggactggcgggccgcggggccgggacagcgggtttggactaaggaaccgggccgcaggagtcggaggaggcggggtgcgggggcaccgggctacgacttcaggaagtcctgggacgcggagacttgggcagcctttgggtcctggcctcgcttgggaccctcgctgggcgcctggggacactgtcagtcattggtgctggctgggaggaggcactaaggtggccaaaagacttccttcgctctggagttcttgggtggggaaggagtgtcatgtccggctgggagttggaggggacagtgttgactatttaaaaagtgtgtaaccatccccattaagatgcactgtcgtgtagagaaattgttagtttggtgcaatgaggagccgctgttggaattccatctcccggacggccaggcactgagtttgtggttttacaactcccaacatggtgtcattcaacgtatggctggcattacttttccaagttcgctgtaaaaaggttcccttaaaaagatacgaacgattaaatttcacttcagtcctgcagactggaatgttggctactccagaatagcgaaaatagagggctgtcctatcttagatggcagcggggaggagtaagaattaaagttgatagtgccgatttaacgaatgcttctggcgcggttactgtgcgaaatattcgagtgtaatgacacatcacatgcactgatctattttcatccccataaaaagggctagttgtcaaggaggtcaaattaaacctttgagtattccattcaaagggagcgaggaactaaaaattgggaattgtttatagtgaattcttctgaaagttctcaacttttttttttaaagtagtactccccagtttttaggtgtcacccatagcaatgggcttttgcttttgcttcccctggtaaccatattttttgaaccccaaatcagaacacgtagtgtggcaacattgggacaaagaatttgacagtgaggctgcccccagaaaaatctaggggattggaatttgaaggtctgtaccactttaatatgggtcatatattctagttcttttgcattttcaaaagcttcattcctcctgcccccgcaccccaccatccctcatctgtagtatttatctccagttatcattaataatttattttggacacttaagagaaagttgcctatgttctgtttaatggtgatttttttttttaagttacagagatgcacaattttgaatgattgcttttcccactactttttagaattgctgttctgtatatgagtctgtaaggactcttaactcttcatttccctcctgtggtattttccataagaaaaccacatttgagagcttttctgtgtaggaggcactggtgacatttctcagaggagtgccagagtgtcttctttaggaccattgtctgtgtaaaatagcagggacttagtacaggtaacagaaaaaggaaagaaaggagcctttctgtaagccatatcttattcacgaaagcgtgtggtattcattcctactttacagaccagggaactgaggctccaaaggttttactaaagttcattttgtgtgcacgctggagacagaagttaagtagttgacaacatcatgtgagtccaagcacttttaagtgatggcagctgagaaaaaaaatcagcactttttttttttttttttttttgtaattaacaagaaggttatttcctgggaggtttaatacagtggttctcaaacttgagtgtgcatcagaatcgcacatggagggctttttaaaacagagtgctgtaccccacttacagagtttgattcattaggtcttgatgggacctgaaattttgcgtttctagaaagaccctggatgaccacacttgagaaccactggtgtaataaattatatagaggagttaaattaggtgtctgctatgtatttgacactggatttggtgatagggatataaaggtaagaactctgacttgaattagcaaaccgttagcccctgttttcccaaataaattgtgtctggattcactaatctcatagttctctgaaaggcaaatggtgctactgctaggcctgaggcttaataaaattgtgttgtattaaggatttttgttaaataggtaggttttagctgctcttgtcacacaaaaagtaattatgtgagatgatagatatattaatctgcttcactcttattaatctgcttcactattgtaaccattttatgtgtgtatatctcataatactatgttgtaaacatcaaatatatacaatacaattcacttttaaaaaaagaaatgaaggagaatggttatgagagaagtgaatgtggaactaagagtggcacaggatggggaagagataacctagtgtttttctgattttgaaatatttgcctttgttttcttctagatttttctgttaattgtcatccagagacagaaagtatatatcatgaattgaaagtttgagtcttttggcaccctcccttctcaaaggcgtttgaaagagtgaagtctaaagcactagatgagatcgaatttttggaatagaaagaaaactttagtagtatctgctttagtattctcatgttacagataaggaagttatttcatttctttgctaatggtttgtcctcttggtgacttgagtagcaacacagcctgggaacgaaaccttttttctcttatcatagttttatctctttttcttccttaacatgctatctggacccaatttttctttatttcattgagctgattaaaccatatattttggccatggggaaaagaatagttgaaaatatatagttgaaaatctatacgtataaaatattgtgataagttttatttgaaccatgataagttttatttgaacctaacctattaaaggtatgttttgtcttttctaggattttcttgacattatctaaatagggaaagaataaagtagcaaaaatgagtgactttaagtaatttaaataaattaagtatcataaaaggtggtcacatattttctagaattattttaaattctttaataagataggctgtagttagcagtagtatcaaagttccagttctcttgacatagttagtatttgctgagaaactgcctggaaatgcagtggttttcattctgtgaggtaggggaagttgttctgggaggggatgcactgtagtaattaggttttattttcccatatgaagttaattaattgttgttaagtttaatttctactgctgtggtctcttttgattagtgtcctgcagttaatctttgtttatatggaagtatcatgggaacccattcacctgctcttcagaacgcaaacatttcaaccatagatttatttttctttccatatctttagaaagctacttaaaaaaattaaatctgatgagtttgtatcatttggagttctggaatatggagaagactcatttaatcagtcagcaaaggcttttactaactatattgctctttggtgaggtatatatacgtagcatagaactcatggcttttgcttttgagtttacagaccacttagggtttaagacatgcatttgtgaagcattcacgtcctctttttctcctttcccgctttagactgagtggtccattattgtagttagtgtactgcaaatgcccatttattttctggcccctgtaatcttctgttttactcacctgccaaaacccaacactggttaaattcaacttggccaactgtttttataccttataggtaaacacggacggaggaaaatggagacaactttgctgattagtctcatttatctttatttttattttcaattttttttcgagacaaggtcttgccctgtcacccaggctggagtgcagtggcatgatcctagctcaatgtaggcttgacctcctgggctcaagcagtcctcccatctcagcctcctgaatagctgggaccacaggtatgcaccactgcatcccctactaagtttttaaaattttttgtagggacagggtcttctatgttgcccaggctggtcttgaactcctgggctcaagcaatcctcatcccttggcctcccaaagtgttgagattacaggcacgagccaatgcacctggccctgattagtctcattttaaagaaacaatctcagtcgcaaatgcacattaaatactgctaacactcccacaattctttactatgtctattcttgaaaatcaatatttcaaacattttcctcctttctgaagcctctaatttaaactctcctttcctctctcccctacctcattcttttagaccttgtctttactgagaaaatgaaagccatcacaaggcaagttcttctttctacctcaaaattcactagcttatctacatttgtacctattctgctactttttctcatattgaaatacattaaatgtctctattcccagataaatctaatctgtgtacttacaccctggattccatttcctctcaccttctgaaaatgttgctcctacagttgtatctttgtgctgctataacaaaataccacagactgagtaatttataaaaaaaatttcaacctgaattttggagagaacattcagataatagtagatgctgaacttcctgtactatctttctttggctagattccactgtcttctgtgtttctgctacaagacttcttttagactctaccccaccttgctagagtcttggcttagccttctgttcttttttagagaagaaacttagggctttcctcattcctcatattctaagtgctccaacctgaataaccatctctctctctgggattgctctctggtctgggtctgccaccgcctttgcttgaactttagtatctttgactatgagttcttgcctcctttagtctggttcttccagtcttgattgtaactcacgtcatacctttaaccccccacctttaagtttaaaaaaatccttattttctgctctccaaaatataagatattctaatactaatttcagtgaaagacatagttggctactctacctttttccctgcccttgctgcttattttgctgacttatgatcactgcttgtctaaggagaaacctattgtctaatgctgattaggaaatggcatgatgtttggttgtcttacctctctgaaaataatgtttacagaccatgtggcaaaggaataaaaattacctgtggctcaaaagagagtggattgcaaaaacagccaataattcgcaaataatttgatttttcagatgtgtctttatgaatcattgatcatatgtttgacttgataattgttatgtattttagattttattctgatgaattataatacgtttaagtaaaaaggcaaatagttaaattcattcaacaaatattgcatacccactatgtgcgggatactgaattaggtgatacaaagaagaaaagacagctcctcctctcaaacttgcttttgataagttttgtggagttgggactttgagaagcaggcaaattgtgaaaagcaatatatagagagagtgatattgcaaagtgaagtcatgtacttctgagtgtggaaatgcaaaatataggaagattgaaggagctttttttccctctctcaaaacaatacagtgtgagggaaggtttcacaaaggagccagcatttgagggcagaatctttttttttgtttaactttattttattttagattcaagatatacatgtgcaggttacatgggtatattgtgtaatggtggggtggtatgatttagatctgtgccccacccaaatctcatgttcagctgtaatccccagtgttggatctggggcctggtgggaagtgattggatcatgggggtggtttctaatggtttagcaccatcccccagagctgttattgtgatagaattctcacaagatctggttgtttaaaagtgtgcagtatctcccccctctctgtcttcctccggctctggccatgtgaagatgtgcctacttctcctttaccttttgccatgattgtaaatttcctgaggcctccccagccatgcttcatgtacaacctacagaaccgtcagccaattaaacctcttttctttataaattacccagttccggctgggcactgtggctcacgcctgtaatcccagcactttgggaggccgaggtggatggatcacgaggtcaggagttcaagatcagcctgggcaagatggtgaaaccccgtctctactaaaaatacaaaaaaaaaaaaacttagcctgttgtggaggtgggcgcctgaaatcccagctacttgggaggctgaggcagagaattgcttaaacctgggaggcagaggatgaagtgagccgagattgcaccactgcactccagcctgggtgacagagcaaaactccatctcaaaaaaaaaaaaaaaaaaattacccagttccgggtatttctttatagcaatgtgagaatggactaatacagaaaattggtactgggagtggggcattgctataaagatacctgaaattgtagaaggaagcaactttggaatggggtaatgggcagaggttgggacagtttggaggactcagaggaagacaggaagaggaacgaaagtttgaaacctcctagagacttgttgaatggttgtgaccaaaatgctgatagtggtatagacagtgaagttcaggctgaggagggctcagaatgaccgcagatgaggaacttattgggaactggagtaaaggccactcttgctatgctttagtaaagagactggtggcattgtacccctggtctatggatctgtggaactttgaacttgagagaggtgatttagggtatctggtggaagaaacttctaagcagcaaagtgttcaagatgtgacctggcctctagcagccagtgctcatattcatgaacaaagaaatgatgtaaaattggaacttacatttaaaagggaaacagagcagaagagttggaaaattttcagtctgaccatgtggtagaaaagaaaaacccatttataggggagtaattcaagcagactgcatgaatttgcataagtaaagaggagccaagtgctgatagccaagacaatgggaaaaagggctccaaggcatctcagcgacctttaaggcagctccttctatcataggcccagagacctaggagggaagaacagtttcctgggccagggccctgccagcctcaggacactgctgcctgcatcctagttactccagctccagccatggctgaaaggggcccagatatagctcaggccttcagacggtgccagcccaaacccttggaagattccacatgctgttaagcctgcaggtgctgaaagccaagaattgaggcttgggagcctcagcctagatttcagatatatggaaaagcctggatgttcaggcagaaggttgctgcaggggcagagccctcatggaaaaatctctactagggcagtgcagaggggaaatgtggggttggagcccccaacagagtccccactggggcactgcctagtggagctgtgagaaagaccaccatctttcagaccccagaatggtagatccgctgacagcttgcaccatgcacctggaaaagctgcagccactcattgccagcccttgacagcagccgcgtgggctgagccctgcaaagtcacaggagtggcactgcccaaggccttgggagctcaccccttgctgcaatatgccctggatgtgagacatggagtcaaaggagattattttggagctttaagatttaataactgccctgctgggttttagcacgtgcatggggcccgtagcctttttcttttggccggttttacccttttggaatgggactatttacccaatgcctataatcccattgtatcttggaagtaattaacttgtttttgattttataggcttataggtggaagggacttggcttgtcccagatgagactttggacttttgagttaatgctggaatgagttaagactttgggggctgttgagaagggatgattgtattttgtaatgtgagaacatgatattttggaggagctggggcggaatgatatggtttggatctgtgccccacccaaatcttatgttgaattgtaatccctaatgttggagttggggcttggtggtaggttttttgtttttttttagaaatctccatattgttttccatagtggttgaactaatttacattgctgccacccatatatgtgttacaatttcttcacctccatgctaacatctatttttttttaagctttttagtaatagccactcagacttgtgtaagatgattgatatttcattgtggttttaatttgcatttctctgatgattagtgatgaacattttttcatgtttgttggctgcttgtatgtcttcttttgagaaatgtctcttaatgtcctttgcccactttttttttttttgagacagagtcttgctctgtcgcccaggctggaatgcagtggcacgatcttggctcactgcaagctccgcctcccaggttcacgccattctcctgcctcagcctcctaagcagctgggactacaggtgcctgccaccatgcccggctaattttttgtatttttagtagagacagggtttcactgtgctagccagaatggtcttgatctcccgaccttgtgagccacccgccttggcctcccaaagtgctgggattacaggcgtgagccagtgcgcctggccctttgcccactttttaatggggttctttgttttcttcttgttgagttgtttgagtgtcttgtagattctggatattagtcctttgtcggaggcataatttgcaaatgttttctctcattctgtagtttgtctctttgccctgttgattatcttttgatgtgcagaagctttttagttaagtcccatttgtttatttttggttttgttgcatttgtgtttggggtcttcgtcataagttgtttgcctaggccaatgtccaaaatgtttaatctatcttgaggtagtttttgtatatgctgggagacagagatccagtttcttctgcatatggctagccaattttcccagcaccatttattgaattagggtgtcctttccctgttgtttatatttgtcagctttgtcaaagatcaatctgttggatgtaagtatgtggttttatttctggggttctctattgtagtccattgatctgtgtgcgtatttttgtaccagtaccatgccattttagttactatagccttgtagtataatttgaagtcaagtaatgtgatgcctctggatttgttctttttggttaggattactttggctattcatgcccttttttggtgctgtatggactttagaattgtttttcctagttctctgaaaaatgacattggtgatttgataggaattgtgttgaatctacagattactatgggcagtatggttattttaatgatagtctccaaatccatgagcctgggatgtttttgtgtttatttatgacatatatgatttgtttcataagtgttttgtagttctcatggagatctttcacctccttggtcagtgttttcctaggtattttatttttttgcatatggcttttgtaaatgggattgaattcttgatttggtttttggcttgaatattgttggtgtatagaaatgctacagatttttataccatggttttgtatactgagactttactcaagttgtttatcggtcttggagtcctttagtagaatctttagggttttctaggtaaaaaaatcatatttgtgaagagacataatttgacctcctcttgtcccttttggatatcttttatttctttttcttgcctgataactttagccaggacttccagtactatgttgaattggaatagtaagagtgaacatcattgtcctgttccaattcttagggtgaatgctttcagcttttccccattcagtatattggctgtgggtttgtcatatgtggcctttattatgttgaggtatgtttcctgtatgcctagttaatctagctagcagtttatcaattttgctcatggatttggagaatataatatcgttaaaaagacaacactacctaaagcaatccacataccacccaaagcatactgtcttggttactgtagccttatagtatagtgtgaagttgggtaatgtgatacctccagcttagttctttttgctaaggattgctttggctattcaggttcttttttggttttatatgaattttagaatatatatatttttaattctgtgaaaaatgacattggtaatttggtaggaatagtgttgaatctgtagattgctttgggcagtatggccattttaatgatattgattcttccaacctgtgagcatggaatgtttttccatttgcttgtgtcatgtatgactactttgagcagtgtttaatagttctccctttagcaatgtttcacctccttggttagctgtattcctaggtattttactttttgtgtgtggctattaaaaatgggattttgttattgatttggctctcagcttgaatgttgtcagtgtatataaatgttactgctgcttgtacattaattttatatcctgaaactttactgaagttgcttatcagttccaggagccttttggtggagtccttagggttttttaggtatagaatcatataatcactgaagagaggtatttgacttcttttcctatttggatgccttttatttctttctcttgcctgattgctctggttaagacttccagtactgtggcaaataggagtggtgagaatgggcatccttgtcttttctagttttcaagggaaatgctttcagctgctgcctgtttagtatggtgttggctgtgggtttgttatagatggcttttattgttttcaggtatgcttcttcgatgtctagtttcttgagggatttttatcatacaggggtgttggatttcatagactgctttttctacagttttttttttttttgagacagagtgttacattgtcccccaggctggagtgcagtggctctatctcggctcactgcaacctacgcctcccacttcaagtgattcttgtgcctcagcctcctggggctggggttacaggcatgcatcaccatgcctggctacttttttgcagagatggggttttgccatgttggccgggctggtcttgaactggcttcaagtgatcctcccacctcagcctcccaaggtgctgggattacaggtgtgagccactgtgctcagcctttctgtatctattaagatgatcatacgggttttgtttttaattctgtttatgtggtggaccacatatgtttgcatatgttgaaccatccttgcatcccagagacaaagcccatttgattgtgtgggtgtgtgtgtgtgtgtgtgtgtgtgtgtgtgtgtgtgtgcgcgctgttggatttagtttgctagtattttgttgcatatgtttacatctattttcatcagggatattggcctgtggtttcctttttttggttgtcttgcctcattttggtatcaggttgatactggtttcatagaatgagttagggaggaatccttcctctttgatttttttttttttcgggggggaatactttcagtaagattggtaaccagctctttgtatgtctggtaaaaattggctgtaaaaaatctgtcctgggcttttttttttttcctggaagattttgtcaggactaatttgattttattgctcattattggtctattcaggatttctgtttcttcttggttaaatcttgggaggttgtatgtttctgggaatttatccatttcctctaagttttctatctagtttgcataaagatgttcatagtagtctctgatgatgttttgtattttctgtggtatgagttgtcacctttctcatttctggttgtgcttatttgaatcttctctctttttttcttggttagtctagctagtggtctgtcaattttgtttatcctttcaaagaagtttttgttttgtagatcctttttctttttttttctttttggtcacaatctcatttagttcattctgatctttttatttcttttctcccagctagttttgggtttgttttattcttatttttctagttccttgaggtgtggtgtgtggttgttcatttgcgatctttctatctttttgatgtaggcatttaatgctgtaaacatgcttcatagcacagcttttgtggtatcccagaggttttggtatgctatgtttctgttttcatttgtatcagaaattattttgatttctgctttaatttcattgctcgcccaaaagtaattccggttgtttacttttcatgtacttgtgttgttttcagagttccttttggtattgacttctaattttattccattgtggttcaagaaatacttgatatgatttggacttttttttttctttttctttttcttttttttattgatcattcttgggtgtttctcgcagagggggatttggcagggtcacaggacaatagtggagggaaggtcagcagataaacaagtgaacaaaggtctctggttttcctaggcagaggaccctgcggccttccacagtgtttgtgtccctgggtacttgagattagggagtggtgatgactcttaaggagcatgctgccttcaagcatctgtttaacaaagcacatcttgcaccgcccctaatccattcaaccctgagtggatacagcacatgtttcagagagcacagggttgggggtaaggtcacagatcaacaggatcccaaggcagaagaatttttcttagtacagaacaaaatgaaaagtctcccatgtctacttctttctacacagacacggcaaccatccgatttctcaatcttttccccacctttcccccctttctattccacaaaaccgccattgtcatcatggcccgttctcaatgagctgttgggtacacctcccagacggggtggtggccgggcagaggggctcctcacttcccagtaggggcggccgggcagaggcgcccctcacctcccggacggggcgactggccaggcggggggctgacccccccacctccctcccggacggggcggctggccgggcggggggctgacccccccacctccctcccggacggggcggctggctgggcagagaggctcctcacttcccagtaggggcggccgggcagaggcgcccctcactttccggatggggtggctggccgggcggggggctgacccccccacctccctcccggacggggcagctggccgggcagaggggctcctcacttcccagtaggggcggccgggcagaggcgcccctcacttcccagacggggcggctggccgggcggggggctgaccccccccacctccctcccggacggggcggctggccgggcggggggctgacacccccacctccctcccggatggggtggctggccgggcggggggctgacccccccacctccctcctggatggagcggctggccgggcagaggggctcctcacttcccagtaggggcggccgggcagaggcgcccctcacttcccagacggagcggctggccgggcagggggctgacccccccacctccctcccggacggggctgctggccaggcaggcggctgacccccccacctccctcccggacgaggtggctgccgggcggagacgctcctcacttcccagacggggtggctgctgggcggaggggctcctcacttctcagacggggcacttgccgggcggagggactcctcacttctcagacggggcggttgccaggcagagggtctcctcacttctcagacggggcggccgggcagagacgctcctcacatcccggacggggcggcagggcagaggtgctcctcacatctcagacgatgggcggccgggcagagatgctcctcacttcccagatgtgatggcggccgggaagaggcactcctcacttcctagatgggatggcggccgggcagagacgctcctcactttccagactaggcagccaggcagaggggctcctcacatcccagacgatgggcggccaggcggagacgctcctcacttcccagacggggtggtggccgggcagaggctgcaatctcggcactttgggaggccaaggcaggctgctgggaggtggaggttgtagcgagccgagatcacgccactgcactccagcctgggcaccattgagcactgagtgaacgagactccctctgcaatcccggcaccttgggaggcggaggctggcggatcactcgcggttaggagctggagaccagcccggccaacacagtgaaacgccgtctccaccaaaaaaatacgaaaaccagtcaggcgtggcggcgcgcgcctgcaatcgcaggcactgggcaggttgaggcaggagaatcaggcagggaggttgcagtgagctgagatggcagcagcaccatccagcttcagctcggcatcagagggagaccatggaaagagagggagagggagaccgtggaaagagagggagagggagaccgtggaaagagagggagagggagactgtggggagagggagagggagagggagagggacaatttggactttttttgagtttattgaaactttccatggccaagcatatggttgattttaagaatgttccacacacagatgagaaaaatgtatattttgtggttgttggatagaatgttctgtaaatgtctactaggtccatttggtttagagtttagtctaagtctggagtttcattgttcactttctgccttgatgatctgtcttgtgttgtcagtgggggggttggcgtcccttcattattgtgtggctattgatctgttttcttaggtctagtagtaggagttttatgaatcttggtgctccagtgttgagtgtgtatatgtttagcatagttaaatattcttgttgtattgaatcttttattattttataaataataataaccccagggcccaaccccaatctcagccctactccactctagcgctatagttgtagcaggagtttttctgctcatctgcttctatcccctaatagaaaatagtgtattaatccaaacctttacactgtttaggtgctattaccaccatatttagagcaatctgtgctctaacacaaaatgatatcaaaacaatggtagcactctccacttcaagtcaactagaccttacaatactcacaattgacattaatcaaccacacctagcacttctacacatctgcacccatgcctttttttttttttttgagacggagtcttgatcttctgcccaggccggactgcagtggcactatctcggctcactgcaagctccgcctcccggatacatgccattctcctgcctcagcctcccaagtagctgggactacaggcgcccgccactgggcccagctaattttttgtatttttagtagagatggggtttcaccatgttagccaggatggtctcgatctcctgacctcgtgatctgcctgcctcggcctcccaaagtgttaggattacaggcgtgagccactgcgccccaccgcacccatgccttttttaaagctatattatttatgtgttcgggatccatcatccacaacctcaacgatgaacaagatattctaaaaataggaggactatttaagactttaccccttacttcttcctcccttattattggcagcttagcacttacaggtatgcctttcctaataggcttttactctaaataccttattattgaaaccacaaacgtgatataccaatacctgagccctttctagtactcttattgccacctccttaacagctgtttgtagtatcagaattattgtctttgttctaataggacaaccccacttcacaactctaattattaatgaaaataaacccttcctaattcaattaaacacctaataataggcagtatcttcactggatttcttatcagcaatagtattatccccacctcttccccccagacaacagtaccacctcatctaaaacttacagcccttagtgtaacctagggattttgctagcaatggagctcagtcttctaactaataatcttaagactattagtcttctaactaataatcttaagactattagtcttctaactaataatcttaagctaaaatatccattacagacattcaacttctccaatatactggaattttactcaaccacaatccattgtacaaccccttgctcaagccaaaatctggcttcacttctactatacctagtttgattagaaaagtccataccaaagacaatttcacagacccacgttacagcctccattaccatatccactcaaaaaggcctaattaaattttatttccattccttttttatcccctcctttctaactctactcttaattatctactctattaccccaagtaatttcaattacaacataatcagcaacaatgttcaaccagcagccaccaccaatcaacacccataattatataaagcacctgcacccacagaatcctcatgaatcaaccccggaccctcaccctaaaaaattattcaacttcctacactactaaaattaattgtaatcaccaccccatcatattcaaccattcatcaaatcaacaccaattctattaataaccctaatgataaagttcctcaaatatcatatttgatccttaatgtctcagggtattcctcaatagctattgccacagtataaccaaaaacaaccatcataccacccaaataaatctaaaagactattaaccctgtaaaagccccaccataattcaacacaataccacaacccacagcaccactaataaccctaaacctccataaataggagaaagttttgaagacaaacctacaaatcctataaccaaaataatacttaataagaataaagcatatgtcattattcccacatggcttgtaaccatgactaatgataggaaaaataatcattgtacttcaactataagaacactaatgattaatatacataaaatacacccactaattaaaattataaattattcatttattgatctccccacaccatccaacatctctacatgatgaaattttggctcacttcttggtgcctgcttaattctccagaccatcacaggattatttctggccatacactacacaccggacaccttaactgctttctcttcagttgcccatatcaaccgagttgtaaactacggcagaatagtccactattttcacgctaacggtgcttcaatattcttcatctgcctcttcctgcacgttggccaaggtttatattatgggtcacttatgtccctagaaacctgaaatactggtattatcctcctactcaacaactatagcaacagcgtttataggctacatactcccatgaggccaaatatcattctgaggcgctacagtaattacaaatctattatcagccattccatatattggaacggatcttgttcaatgaatctgaggtgggttctcagttgataaagccactattgcatgacttttcaccttccattttatcctacccttcatcattatagccgtagcaattctccaccttttattcttgcatgaaacaggatccagtaacccttcaggaatttcatcagattccaacaaaatcaccttccacccttactatacaaccaaagatatcctaggtctaatatttctcctcctccttctaataactctagtattattttgacctgacttcccgagcaatccagacaattacactttagccaaccccctcagtatcctaccccacattaagccagaatgatattttttgtttgcatacacaatcttacgatccatccctaataaactagaaggtgtactggcccttctattctctattctattctagcagttattcttgtactacatacgttcaaacaacaaagcataatattctgcccattaagtcaatgcctgttctgaattttagtggcggacttgcttacagtcacatgaatcagatgatagccagttgaacatccttttgttaccatcggacagccagcatctattatgtaattctccattttccttgcccttataccactcactgccctaattgaaaataagctacttaaatgaaactgcccttgtagtacaactcaatactctggtcttctaaaccagaaatggagagtctctccccaggacaactcggagaaaaagcattcccgcttcaccgtcaacactgcttcaccatcaataccgcttcaccatcaacacccaaagctgaagttgtaattaaactattctctgtattctttttggcacatattttaactaatatgtcagtattgactgccaacactaatatattagtactcctatgtactttgtgcattactgttaatccccatgaatgatatatgtgctataaatgcttgattgtacatagtacatacacacataaccttacactaaagagccattccacatgcatataagcatgtactaacaatcccttaatcaactatcactcattcagacattacactcacatgacgaaactcgatccacatgaatatcgaccagtactggaaacccttgatattacatagtgcatacgttcattcactgacgtagtgtatttcagtcaagattaacctcgccaacatggatatcccctaccaagctttggtctgttaatctaccaacctccaagaaatcatcatccctctcgggcgtgttactctcctcgctctgggcccataacacttgggagtgactatactgaaactgtacctggcatctggttcttacctcagggccatgaaactaagattgaaactaagattgcccacacatttcacttaaataagacgtcttgatggactagtgactaccaccctattaaccagttacgggagcactgtcatgcatttggtatttttaacttttggggatgctgtcactcaccattgtggaaggccttctttgccttttttaaaaaaaaattttaaattgttgttggtttaaagtctgttttatctgatataagaatgtttactccagcttgctttttttcccagttgcatgatacatcttttgttacccctttactttgagtctataggtgtctttagccattaggtgaggctcttgtaggctgcagatggttgtgtcttgtgttttttttttttgagacggagtctcgctctgtcgcccagactggagtgcagtggcgtgatctcggctcactgcaagctctgcctcctgggttcatgccattttcccgcctcagcctcctgagtagctgggactacaggcgcccaccaccgcgcctggctaattttttgaatttttagtagagatggggtttcaccgagttagccagtgtcttgtttttttatccagtttgccgttgtatctgttaggtggagcatttaggccatttaccttcaaggttaatattgatatgtgaaagtttgttcctgttatagtgttgttagctagttgccttggagtcacaattgagtaatagctttataggatctgtgagctttgtatttacatgtgcatttatcatggcaaacatcatccttttgtttccacatttagaactcttttgcgcttttcttataggtctagtctagtggtgatgaattcctttagtgtttgcttgtctgtaaaagacttcgtttctctttcgtttatgaagcttagtttggtaggatataaaattcttggttatagtttttttgttcgtttgtttttggagtctaaaaagaggccccaaactcttttggcatgtaaggtttctgctgagaatttcactcttaatctgatgggattccctttgtcaatgatttgacacttctgtctaactgcttttaagattcgctgatagtctgatgactacattccttggttatgttcgtcttgtatagtatcttccaggtgccctgtgaatttctaatatctggatgtctgcatatctagcaagatcaggggatttttcctgttttatttcctcaaatatgtttttttaaaatttcttactttttcttttccttcacaatgcctgtaagttgtaggtttggttgttttacataatcccatatttttcaaaggctttgtttgattttaaaaattcttttaagattttaaaacaaattctttttttttgtctgactgggtaatttaaaagaccagccttcaagaagtttttttttttttttttttttaaagacatctgtctcttccttcatttcctagattgcttttctggttatttttgtgttggttttcaaccttctcttggttctcattgagcttctttacaattcccactttgaattctttctctcatttctgaattttcattttggttgtagtccattgccagaaagccagtgcagtctttttggtggtgtcacaacattcagatttttcatggtacctgaattcttaatgctggttttttctcatctagagaaactgacacttgttgttgtttgaatttacttcatttaaatggcttttttttttctctcccccaacctgccttgtgcctatagagtatgctctagggtagagtcttttgctttgcttttatagccttgtgtacttttgttggcaggttttatatttgttgtgcaattcaacctacaggcctgtaggtggtacttactggtatgagccagcagcagcaaaagcagacagatgtgtacctgatctttgtttattgtgagattcactgtgttgtttcaggtgatgggctagacagtggaaattcccccatcccctgagcttctgtttagcagtgggtcagggcgagatagctggatagagctggatcgtctagcttgcccacgaatactccaatgataagcataggcactagtcctgataggggtggttgaggtctctgctgcatgttagggagctgcactggcttcatgtcctggacagggaggaatgtgatgtgttccctgtcacacccttgttctggggctcgtgactctcagtgcagatgcacagtgttgtctgtctccaggccacagtgtagccgagagtcacagtaaatgcctgtcatgcagttctcctgggattggtttaaggacatgagggcagagtcttgatggatgagtaggaatttctctggtgggcaagtgtgggagaccattttatgtaatagcaaatgcaaagggatgaagcatgagaacacggtctattcagagaagtatagcaagtttagttttttataggagtataaagtaagaggtagaggaatgatggatgataaggctggacccacggcatgaaacctgaccctgaaaggtgttgtttgcttttatatctgaagggatttagttttaatctagccaatgatgtgaaaactctgcagaatttttagtataagtgcattttgaaggattgccctggcagcagcataggggctggatttgaaggaaggtaagatgagagctgggaacatctcagtgaggaggcacaatgcctcttatggggaaagaagggtctgcaccaccagctcttagactgtggcaagttctgttatggaaatgtgaccaaagcacaccaaaagaataataattaattctctctggatgattagagtgtaccatggaaattttgtagaggaagtgatattatcatataattaaatggaaattatgttgggtaaaattgtaatgtaataaagatctcagttttattctggaaagaagaaatgctggatactcattttatcctagaaggcaagagaaatttagtttgaagagtaactcaccctctggggtaagagtatgacatggcttgacatagcagttcaaataattttgcacatgtgttcttggcttccctttagatttcaggttcatcctgtgaggttgaaaatgattgtagctaaaatgttatgttaaatgataggttgagtgagtcaagcatgaaaagcctaataactgtggaaagcttaccctggtttacatggggaaaaggattgttcactgtgctgaaaagaaaactggtctttggaaatggatcttgtttcggtagttgttgtgagtccttgggcagaatggttaactaccttgagcctcagttataaaactatgaaagacgtttacttcctggggttgttttgatgatttagtgaaataaagatacagaaatttccagcacatagtagattgttaagtctgtttgtattacatttctcctcataaagtttcttttttcttttctttttcttttttaaacatttttgtttgagacaggatcatgctctgttgcccagactggagtgcagtggcatgattgtagcacctggcctcaagtgattctcctgcttcagcctcctgagtagttgggactacaggtgtgtgtcaccacaccaggctcatttttaaaattttttgtagagatggtgtttttcttgtccagactggtcttgaactcctggcctgaagtgatcttcctgtgttggcctcccaaagtgctgggataatagatgtgagccattgcaactggcctacttttattgtttatataagatatggggtctcactgtattgtccaggccagtctcgaactcctgggctcaagcaatcctcccacttcagcaacctgaatagctgggattacaggtctgcatcactgagctcacctaccaggcacctttacttatgaaaattttctttatatataaattattttcataaaagaggttttcagaactgtttttaatgtctgtagtttctcgaactaaccagcttcaagtaatatgccaaaaaatatgttttgggatggcatattctggtctcctgcagtcattttttgggagggtatgttctgagccccaaaatctctcttcctttctttccattccttataccaagaggtccaacaggcaaccaaggtattcagttacttttgtgccaacctaataagacactatggagaaactacagagtagctgagaaagctactgtgtttagaaggagaaagagcaaggtaaagtgaattccaatcagctttttgctgtattagatgaaataaggagttcagtgcttttggtgactaaaatggcaggtagttgctcagtaagttgctttgggtatcctggactcctgctttttctgtacttgacctccatatctagcctgttgatataagtcatgtgtgtcttttttctctcttattttttctgtgttcactgctgctactccatggtcatgtcatcatcatgttgcctggattatcatgtagatactgaattggtttccttcttcctctctggatgtttattagagtcacctagcacttaaagtgttccgctccagaataattatgtcatgatggcaaggagagctagctgaaatactagacattttttttaaagcctcattaatcatgtgacatctaggcatttaaatgtcatgtcctttgtttttggatggtcagtttccctattccagccttttcgacaaaggtagcatccttcctacttttccttcaggtttcaggtgagccttcaggggaatcccccgagggctgtccagtggaactttccgcgatgatgggagatatttggtatcatttgcattgtcccatgcagtggtgttggagcttaggtcacgctaccccaaaatatgacttcaggagcccacaatatgctactgcaaaatatgtctctttgtcatattggttatttagagttggttattttgagaaactgtagacacaagaatagctctgaaaagttgcccttttgtcagagaaatttacatctatgagggaaatctttttccctgctctgcagtaggaggagaggggccgctaaatggaaaaggcattgacttaaaaactgcacaacaaatcttactcttgttttcagttttttcctggccatccccctgtaacagatttccccatcaccctccacttcctttattttagcaaatgatggtattccgctgaagtttaaactctcattgaaatctactctggagatttactcggttctcttgaattttctcgcatgtatgtttgaggtatacatatgaaacaactcttgttaatctgtcttttgttacagggagtcccagtttatgaagataaaaaattattttttctctcctataccagccactagttattgagcacttaaactgttactagtgtgactgtgaaacaagtttaaattttatttaattttaactgtgttaggtgctttaacttgtgccctcacagtaccctgtgtacattcccccattataacactatagtgtatgtattcccaacattttattattaaacatatcgcaaagttgaaagaattttacagtgttcatccctatacccatcatctagattctaccactaatattttaatacatttgttttaacacatatgcatctggacatttctgtatccaaccattaatcctttaaaaaaatacatttcaagataacaccagtatacatggccctaaatactttaacaggcatataaccaacttttgtttgcatgtaaaattaatgtataatgaaacgtccatattttaagtgtgtatttgctgagttttgataatcacatataactgtgtaacccacacctctaagcatgatgagaacattaccagcagttccctcctgcctcttcccagtctgtcttttctcttaccctcccaagcaaccattattttgattttcttctgtaatgtccttcagcaccccaaagagcttagcatcatgctcaccataaaggagaaatgcgttggctacttagtttccgtacgtgcctttgtgcacatatttgaataccagtacaacaaagcaactttatttttgctatggtctgaatatttgtgttcccctcatgcccccaattcatatgttgaaacctaatctgatgtgacagtattaagaggcagggccttaaggagaaggtgattagatgatgccctcatgactgggattagtggccatatgaaagaggcctgaaggagcttgttttcccctttcaccacatagggactcaacaagaaagtgcagtctattaggccctcatcagacactgaatctgctgacaccttgatcttggacttgctagcctctagaactatgagaaataaatgttgtttataagccatccagtttatggtatttttgttatagcagcctgaatagaagaactgagacaattttctaagaagatacagctatccttgcagggaagaaattcttacccataccctaatggagaagactcctggttccatcagtcacgtatccatcactggctacataaattactactcttactccatcaccatcccactcaatattcagttatataaagactaaattgtaaagttaacttcagtaatttgtgtataaaataaaattgggaattagggagaaaaatatggttagtacagtcaattcttgttattcatggtggttatgttctgtaaagtcatcgtgaacactgcattagcaaatattgaaccatttctcttaggggaaatacagggttaagtttctgcaagcctcaaatcacaacttatgtcaacagatcaagacataaccttgttttctgtgtgtttctgtttaaagacaccttactatgtatggttgatctattaacattgaacttacagctaatggcagtgtctttcatatttgaagaaagcttaactaaaacacgattttttcagtaaggtacagcccagctttcatgagcataggaacacctgacagtacttcagtactatgcttgggagtcactcaaagtggtgaaatcagtgacaggaagcatacacaaaaaagtggcaccaaatgcacagtggaaaggacaattgtttatactatgaaagctgacacaggaagatggagtgttaccttgttcagcctcagctggaacatatgcttggagtgatttcagtattttgctaccctgaacatgcatgtgttcttgaatgactgaaaatgctgtgaatatgagtttggggattacgaatgaattttagtgcataggcaaattcacaaatacagaatctaaattatgaagattgactgtatatacaaataaacatgtatataatcaaagagaaaatatgcaaagctactgcatagcttgtgtctgtaactggtctgaggtggtagctgaaatatgtggcttccttcatctactccctgttctatagctctcttgccttctgccagaatttcagttactctggctttttttttttttaacctgattgagtgactcataaactttccttcttgaagggactgtgtcttatttgctctgttttttggttgctgtaacgtttcattaaccttgtattgagcatggaagtagtatgacatgccctaggcaatcttctgggttccacttaccctactttgcctccattgcaaaatagcacacttgtttgcccttggtaattcggattcatttttccaactagtagattaaccaatgtttttggcttgttggtttcagtgacataagaagtacaaaatggccatatgggagtctcatcttccaattaatcggaaacattgttgtgtcccctttggaagcatttctcctttaaggactaagatctccaaaccatcagagctcaaagttgccaggactagaaacagaaattttgcaagtggcttatgtgggtataataatgagaggagccatgcctgcttctactttttgattcctggactgacatattctggctgtgggcaagatagcatcatataatggtctgtgattgaaataataaactgcagcttgtaaaacagagccccatcctttcaggtttttgtctcctaactagtgctgctgctgaagtcttcagtaagccattctatgtgatggagtaatggtaaaaccagttaatcttagtgtcatgagcacattgtccacctcttttgctatgaagtgaattccttaaggagatacagtgctgtatagaatgctgtaatgataggtaatacattctgtgagtctatgaatggtggagttggcagaagcattgcaggcaaattcatatctggaatatgagaaacggatccattatggaagagaaccaaataaaatcaatctgccactaggtggccagctgtctctttcccacccatggtgccatactgggaattcagtgttggtctccagcattggcagatcagatgctctgcagtagctttagccagatcagttttttcagttttagaaaggactaatctgtgtgtgtgtgttttttttttttttttttgagacagagtctcgcagtgtcgcccaggctggagtgcagtggcatgatctcagctcaccgcaacctccacctcgtgggttcaagtgattctcatgcctcagcctccccagtagctgggattacaggcatgcaccaccacatccagctaatctctgtatttttagtagagatggggttttgccacgttggccaggctagtcttgaattcctgacctcaggtgatctgtccgcctaggcctcccaaagtgctgggattacaggcatgagccaccgcacctggcctaatctgtgtttttgaacccattcataatctccatccctgccaccatggccactttgttcatgggtccattgcacaagcttagatatgatggagaaggaggttgagtgccacccatagagtatgtcattttatctacctgattattaagagcctctgcattgatgtgcccacctagtctctcatggttcagtgctgctgcttaagtttctgtgcaactctaaaatcccatcatccgcactgaattcaacttatctcaatattgacttcctcctgtagtcatacctgtcctacaaaggggagtgacaagaattttgaaaaccttgttaggtggtccctcactaatacatttctccctctctctctctctcttttttttttttttaattttgtttcagagacaaggtttgctctgtctcctagactggagtatagtggcacgatcatagctcactgcagacttgaactcctgggctcaaaggatccttcctcctgcctcagccccccaagtattaaatagctgggattccaggtgtgtgccaccatgcctggctaattattttatattttttagagatgaggtctcattatgttgcccgggctgctcttgaactcctggcctcaagcagttctcctgccttggcctcacaaagtgttgggattacagacttgagctactgtgcctggccactaataggtttctaaatgtcttagtaaaaggagtgttttctaggccctctcatggacataagtggcaatttggtgtgtaggtaacacatgataaatccagtccaaccttcctatctctctaaacctttggatccctctctcttattatgctagggaaactttggaacctcagccttattaaatgttaaattaatataattaatgcttaattaaattaaacttcaagtttcagtcagccaatcaagtaagctgttaaagccacttccagttttgtgagttaacacattaaatgtgggatctctagtacagaagtagtcaaaccttttctgtaaagggtcagatagtaaatattttaggttttagaggccatatgggttttgtcacaacaactctgttctgctgctatagtgtgaaagcagccatagacaatatggcccatccattaatgggcatggccccattctagtaaaactttagttacaaaaaacggtttgttgacctctgctttataagtatatacatataaatgaattagagccaatgtagtgttatatttcaccctcctggtctagcacctttagaatccattgccatacatgttctgtgggattgtgctagtttatcagcagatcttttagtgtgttcagctacttcctttgggtcatagtatatacctgttcttctggagcctgtcaaaatttgacatgggttagtgacaatggcagtggttagggtgtgtcttgaggaggactgaacatcctcttttaaggcatccaccatgggtaaagctgtcctcaggtttttaagcagtggaagagtcatctcctcagacaaggggggaaaactacttctggtaagggagactcagacggacttgggggttcaagttggtcagtttcatttgggtccaaataaatattcccattccaaatttaaggattccattctttactaatctgtcccctttcacaggagaaacttggtgagaccatgaattcagctattgttttaattcagcaaccctcataattaaattaaattttatatttgattttcagctaaatcagctctaagaccatgacttgatctgaaagttggatctgagctggttattttctccctgtaggtgccccagtgcagcagtccccaacctttttggcaccagggattggttttgtggaagacagtttttccatggactgggttgggtagggggaggatagtttcgggatgaatctgttccacttcagatcatcaggctttagttagattctcataaggaatgcacaacctagaccccttgcatgcgcaattgatgatagggtttgtgctcctgtgagaatctaatgcctccactgatctgacaggaagcagagctcaggtggtaatgctctctggcttgccgatcacttcctgctgtgtggcccagttcctaacaggccatggactggtactggtccgtggctgggggcttggggaccctgctctagtgctctcaaaagaacccaccccacatcaaagtccttattttcataatttctgccattatggtcagttgcagcagccacttgggcttctaagacatgtccctcagtacttcattacagtcaaccaaagtgatagcttagttaattgtgactccaatacctactgtggattactagcatttcatctcccattggcgaggaacttagcactgcactgaagcccaaggccatgaccaaaccagtcctcgaattgcatctctgtgggcctgtctcctaggactgctcccaataccaattgtgtgtcactcatggtccgttgaggagagaccgaaatcatgtagttacttagaaaggggaagtttaatctaagaactgttaagttgtgataggagagtaactaaagatgtaaagagaactctaacggatattctaggactaagagcctcaaggaaggaccaacttgcaagaggggtcccctctaccaggctggggtttagagcttattggagaaggtatagctgtagcccaggtttgctggtggagaagattgctgtgtggctggtccatagtaattgggcaagcaggaaacaatcctttcatgtataggtgagcgaaggctggttagcctgtctacgaagggagtccaggtgcttctgtgggtgtgaaatctggagtgtgtgggctgaggttgccagatcactgaggaactggacccctgggcataagctgtggctaagtacccctggatgtcctcctcatccataccatgcagcaggaagtccaccccatgacagaccatgcagcaggagccagaagacagtaaaatgcaccaagcagaactaggaagtgtcctttctgcagtgttgcttcagtgccctgtactgacaaagcataacattgtactcactgtaaagaggaaatgcctgcaaactccaggcctttattgcagtgcaggtaccgaaggatgaattcagagcggagaggcaacatattgataattggcctagtccatcagatcatgttattgattccacagtagttccctgttttaagacaagtaaatattcaaagctgtagacaggtcctctacttctttgacctcatactactatcttcctcttggctctgctgcagccatccaggcctttctcctgtttctggaacatatctgcatgctcccgacttaggacccttgctggtccctcttcctggaagctattttcctagctgtctgcatggtgagttcctcatttttttcaagtcttgctcagatgtcagtttctcaagaaggcctgccctttacgcgcttatttgctactctaagtcccctgaactccttacctcttcacatggcttgactttttccacagtacttttcacccaacatactatataatttacttatttatcatgtctgtctcctcccacgataacatcaggcgccaggacggtatgaggggcaggagttttttaatgttgctcacttattgcagatacctaaaatagtgcctagtgcattataggtgcttaataaatacttaaatattgtaacagtctctatgatgttcattaaaggtgagattctaccttcaaacaattttcattttattattcaaaatatttttactacttctgcattacacaacttccctttattttctggactggttacattcttttgactgattaggtcaagatgggtacattttttgtcttgtgctccatataatgaaatagggtttgtattttatgttacgttctttacatcatttttcagcttctgtgacttttctcatctgagtagatgactgagacagataactatttttaatattatattttttagaattaaatcttagttcgtggaaagttaactgattgtttttaattttatttttaggtgctgaatgtggagtaaatgcagatgttgagaaacatcttgaattgggcaagaaattacttgcagctggacagctagctgatgctttatctcagtttcatgctgccgtaggtttgtatcatggaaccaaatcactcagtgtctgtcttagtgaattctagtaatagctctttttttaaaaataacatttaaaataaacattatttcatgtttaaataaaacatttaaatatatttgtgggattctgagcgaaatagatggataaaataaatatataacacttaaatgtatgtgcatctaacatgagagaagtttgaaggttagtgaggcctgctactaccaaggataactcaagatatttctgacaaacagcttttctcagtgtattatttggcttctgactttttttttttttttttttttttgagacggagtctcgctctgtcgctgtcgcccaggctggagtgcagtggcacgatcttggctcactgaaagctctgcctcccgggttcataccattctcctgcctcagcctcccgagtagctgggactacacgcgcccaccaccactcccggctaattttttgtatttttagtagagacggggtttcaccatattagccaggatggtctccatctcctgacctcgtgatccgc

SEQ ID NO: 133 - DNA, 32744 bp, Homo sapiens
  source 1..32744: mol_type = other DNA
tcgccctcagtcccacccggtgcctacggggccgcatcgccgcccggctcggcccggcccatgcccagggccgctgctccctcagttgccgccgccgccgccggcgcccagggggccgccgcggctgtgaggtgggggcggcagcgggaggcggcggggcgggccgccggggccggggctgggggcgcagcgcggccggcgtaggtctatgtcgcgggcggcggcggcggcggcggccgcggagggacgatgcgcgagtacaaagtggtggtgctgggctcgggcggggtaggcaaatccgccctgaccgtgcagttcgtgaccggcaccttcatcgagaaatacgaccccaccatcgaggacttctaccgcaaggagatcgaggtggattcgtcgccgtcggtgctggagatcctggacacggcgggcaccgagcagttcgcgtccatgcgggacctgtacatcaagaacggccagggcttcatcctcgtctacagcctcgtcaaccagcagagcttccaggacatcaagcccatgcgggaccagatcatccgcgtgaagcggtgagcgagggcacacgggggcttggcggctgcaccccggagtcaccgtcccggggctggaactccccgcgcggggctccggggaaggggctttctggggggtggctccaagctggaggctttactattgtcattctgctcctcctcctcaatctcaaatttgagtgctttgtttcacaactaaaatttggcatcgtgttagcccacagaacagctctttgtctcttggacgttgttagcattgcttgttacagagcccccaaggaaacaaagtttaaaacttgcaggggggaaaggggtggatagatttgtcttgggaagagaggaactgtgcaggtatagtcgagacatttgcagactgaacaacaacaatctgccttggcaatgtttgacagtaaaaatcgctcacacacctatacagtaaagtcaagtccagaggaaggagacctttctcatctcgttaaaggtttatggttccaaggcgttttacaaaaattaagtctctaatttagtgcaaaactttaaagacagattattaaattatttgaagacatcataagctaaatggggtttcgagaatattaacagaggagtacaaataagccattcacaggaaaagaatgcagcttaactgtttgtttttgtttttttgtttttaatatagccgccttaaccccttccaaaaaaaaaaaaaaaaaaaaaacaccaccacaccaccaccaccagttcctggaaacaaaacagaagcttcttcaaaagtgtgacacaagtattagctaatttaaagttaatgttaataagcctttatatatatatataaattcttttctaaagtatacattttggaaatatggctgataaatgatttaaaatgtttgttttctcttaaattcactgaatatatttttccgtgtaattttaagcattagaaatgtgataatatcttagttcaaagttttggcaaatttttctaattatcatttaattacacattactgtttcatctagttcttgttagttaatgcctgctgataattttggtgtcctttttttcctgccttattctacctagagcctaaatctgaagacctttactgaaagatggttgtaagtgcaccgtagacacagtcacattgtaagtcagtttgagtccactcattttgaaagagcaaggaccaagttatgtgtacccaggggatgatcaaaaattcattacgagtagtgagtttttaatgcaacctatgagatcaaagagaaggctctctctctattgctccacccccccttaactgagtatgcactttaatcgctgaactaaaatcgtgcatgttattcatccttgtgttaaattccaaactagaataaagcagatattttcgtggtctctgctgctaagatttgtaaatttgatagctttgtacttctccagtatcattttcctaaagttaaatgtttatagttaagagatgaacaattctggtgttaaacttagtatgaggatggcatttaaggggctacatttaagttacttaaattcttattaccccctcccccaaccactcaattaaaaagaaacaaaccaaaccaactgcagggtagtctgatacattgccacatgtcaatgttaggccaaatgcatacatcaaaaaataatctaagtaaatgccccaacagcctcacccttcacatttagatatatatgcttaaagatatgaagatgcacatatacactgataaagccacatacccatggctaacttcttgacacaagcctagggaacaaatatggcaaaatattattggataatatggtccacataattttgtagtttcttgtaatttagtgcagattacttttctcagttataataataggttagtctaaactcagcatattggagcaatttgtttattttcactatgacccagaggaaaaacatagagtaaaattctgcatgcccagtatcattttactcactagtctcagttcttgatataaaaagatcattgatcagctgaagtagagttcataaattctcttcaccagaattcaaccgttgtatacataagaacctcttggaccctcacttgtgtgtctttgtaatatggtagtagtaaggtattttacacctcatcctaaccccagcgtctggcttcccatcattgatggagaggacatgtgaatgcaggtggcctcttctttaccagtctttcagtatttgatatctactgtcaaattcagtattcagctttaggtctaggtcagcacttttcaatagagatataacgtgagccacatatgtaattttaacattcctagtagctgattttttaaaaataacataaatatatggaattaattttaatgtattttatttaacccaccatatttaaaatagaatcattttgacatgtcagtattcaaaaattattaataaggtactttacttctttatactgtgtcttcaaagtttggtatgtgtttgacctaccacatctcaattcaaacaagtcacatttcaagtgctcagtagccgtatgtggccacaggctgccatattggacaacagaggtctaaggtgtatatgatttggggaaatgcttgcttatttctctaagcttcagtttccttatctgtgaaatagagattagcatgcaccttccagagtccttgttagaattaaatgagataatgtattttaacattcccaaaacaataccagtacacagaaattgctcaaaaaattctagctgtcattcttactttaataactttgtcatttatcttccttaaatgttacccttgatataaatgtaattttagaagaaataaatttgtaattgcattttggaattcattacttagtatattcaagatgagactaaaaagcaatgaggttaaaataatccttggaagaattgtgttggtattctcttgaaattatttccccttatgaaggatctgatggaaaagggcatgagaatgaacatttaacttcaagtacagtatagcaataatgcatagcactaatgcatagccaaacaacgaatggagcttttcatttttcattttcatttcaaataatagcagtcattttcaaggattgctattacttgaaatgtttcacttttaagaaatgtgaaactgacccatactcccttaagtgtctgtaagtgtacatacctccgtatacatacatgacctcttgtcaaagccaagtggaccaactgaaaatggctatatttgtaaattcatatgctttcttttcttaacttgattttgggtgagatgacacacacaaagaagagtaacagggatataggaaatgtttttcagttgaaataaaactagaatttttttctgattttgtaattgcttttttcattgttacccatgccaggatcagccatggtcctgacatgaagttcttggaacatgatatacaaggcctctttgctgttaggaaaaagtccagaaatcttcaacatgacctttcacagtccagcttgctcttatccctccctgcctgtgcagcctcacctcttgcacccatccttttattctagcacccagaccttaagtccttgaaagtacctttctctgggctctcctttggcctgtggaaatctacctttttgcagagttaattcctactccgtctttcaccctcacccctgcttaacccatttataccggaggttgcaaatgttttttgtgaaatatcagaccttagcaatgaccttgaacagtaggatataaataactcccacaagcttagtgttccaataatggaacactaggcatagatgagttaaaagatttttccccactgagggaagatgtcctctcaaaccaaagtaacccctttcctgtcttcccttactaaactttatgcctcacctctttgctcaatcacacataccctgtcctttcccttttctttgaagcactcatccaaatttaattatttgtgtgataatttatgggtagccagcctttctcacaaaactccaagcccacgtaggtgacacagctcctactagcacataggaaacaagaaaaaatgttgaaaaaatgaatgttcagaaagaaaagtatttgtattgttgtttggcctcagtttccctaaacattttgatttcatagatggaggagatgatcttttaaagttcattttgcagatggagatgatcttccttcagctcgaactttctgtgagaacacttccagttggggcagtgtttaatacgaacctcaaagaatcagaaacatgatgtattccagatggaggaaatggcacaggaaatgcatagaatatgttttttggatgttaaatagagcagactggccaaatggggaatgtatatagaagtgtgaggggaggtaaggtgaaaatttttaaagctaaattactgaaggttaaagacttaggagttgatcatgtagtcaaggaccataatcacaattgtcataggtatagcaatatgtagtgatatggtagatgtcttagtggtaatagactactctgtttcataacaggaagaatagtcataaatgttgtgataatccagtttttacgtgaagtgtgaaaatcctgaattagcatggtgtctgtagtaacaggagagaaaggatgcaaggaatgttgtaaagaatgaagtaatcaaactcagtggtagaggaagaggaaaaggtcagaagtaaccttgacattttgaaatgaacaaataggattatggaggaatagctgggggagattattttcagttttggagatggtaattatccagatagccagcctaataagtaattagaacatttgaataaagcctgaaaggtcaggttatgtatgaatatgaagactcaggatcatctgcgtagttcagattgggagagtagatgaaacctactgggtagagtatagagacagaaatgaatggatatggctaacaatagaaatgaggaatgaatgaatatagccaaggatagaactcgagagttgtaagatacacagtggagacttcctatattgcagtaggcgagaaggcgtggggtgttttaagattgggaaaaagatagttgactagcactacccaaggtgagtaagttgtttttttttaagattattattaattttctatatcacttaagtggtcactttcaagtgagctggctgattgtttacactttcccccttaccataagtagctattaaagcctactctaaaacagaagcatattaccaattgttacacatagatctttggcccatgacagtttggtgctggagagccgaaacgagagtatacatcaaaagatgtctgtcccaagtaagtgaaacttctggagctctgctaccgtttttccctctaaaaatacctgcttccccagtaccaaaacttaattcaaagctggacctcccaggtacagagcctaatagctgtgggtcactttttttttgttttgttttggtactggtgaattagtaggaaaaatttttaataataaatatatataacatgaagaattgatgactaaatcctgaaagtcagacataaatccaaacaaagaatttgggtatgaagataaggactgatggtgaaacctctatccacttaaatacaaaactaagataaaagaattgtgagaattatggctgccaaacagaatattaaagttaaaaagactgacaatatgaaacaaacaatataactagtaagtcaggatgagaggagggaaatagttatgagtgctcacttcatctttcatgagagggatttaaatggtcaaaaaattgaaatttgttttgaaaatgactcgaagagctcagtgtttttcatgatctttttttctttaaaaaccactttattgaggtatgattgatgtacaaaaagccagacatatttaatgtgtacaactcagtgagtttagagataagcatacacttgtgaaatcaccacaatcaatgctgtaaaactatccatcacctccaaaagtttccccctgctttatttatctatccattcattcattcattcattcattttttttgtagtaagaacacaacataagttctgtcttcttagcaaatgtttatacaatacagtattgttaactagaagtactattaccatacagatgtctgggacttacttatcttgcataactgaacttcatacagtgaatcactttatgtggcccagaagtttttcctgaaaaggaaacttttgttttggctgcattgtaaaattacaggttacagtatatagttttctttttgccactccaggattgtaatttttaaagctcaatttggagttggaggagatgatgtctcttcctctctaacattctgtgagagcacttttgtctggccggggtgatgagggaaggggtcaagtttaatatgaaccttaaagaatcagcagcctgtgacccacaattttgtctagttaagatttgataattgtatcaataaaatctacaataaggaataattatactaatacttattttttaatggagggcaaaaataatttaaattattaaacattaaggaagaggtagaggaactaagaaaaatcactggatttcacagccaacaggaagagccaacaaagttggaatctatttgctaaagtttcagtagcaatatacttgagtgatttaatttctgtgtgtgaagttctgggaaattacatatggcacaataaggtgcatatattatgcatgtatatgtacatatttttaagcaaggatctttacataaaaccaagtacactgtacttaagggaattttttttcaggggtatttttttcttttcagttctcttttagtcattgtctttagaaccttactgcctaggggagcatgtatgccttactctggggttttctttgcttctgttttgatttttccctgttttctgtttctctccatctattcttacctactgtttttttacacacttatatttttcaggcctatgttgtaaaaagagttttaagtactctaagtttttttggagtaataagagtttgaatacgagcagactttcaaacaaggtaaaactgatggtgactgaatagttactaaaggaaatgtatagatattgtgtttatgtaggaaatttatcttgaaattttaatggtgtgcagaaatatgccatatattatatattgccatttcatttgttactttgacacttgtggttcatatcattaaaaattattctcagcctgacagagagaagtttaatttcttaaacatcctttctgctttaccagatcaaactcagccttttagtagagtaatatcaataatagtaatgctgtaattgtggacatctgcatttcagtcaagtatgttaaataaagcataaatatattagtaaaatttaaagtaatcaaaataactaaaaacaatatttgaagattctaatacataatctagctaagattttgtcatggtatgtattaaattctttctctggcataattgtatagatggggatttgtttttgttttttatttctctaatacatttaagattttaaaacataccaaaatttatatttagggagaaataaggtgacttataatttttatttttaaattgttatctgtcaaaaagccaaatattggaaaaaattaataactatctctatttttatagatccactcagcaggggatttcacattttcttaaccagggccctcagtaagaagtacattttatattgtgacttagtgcacacataggaataaatacatctagccgaaatcaacatttcataagacagtaaacttgctatgttgcttgtattactttttctatttatttttttctattttatttcgttgtttttaagtgcttttcatgacccaccaaattgattttatcacacatagcttggaaactgctatcctaggacatttttactctaagaaaactaaatgtaactatctgtttaatatttcatcttctctctcctgcttttctggttcccagcaatgctgtgtaagattacgaaaatgaagtacttcccaatgtgagttagtaaatactacctgtaattcagagaaagatagcatttagtcactgaacaaaaagatatagcatatcttttgagaaagcatttatctctgttgtgcatattagaaatatgagaatgtatttctcatgtaatgttgttcattctagtaattcaagataacttttgccttgtgaaaacttagaacagagaaagggaggttgtggtagtattcagacttgaatacatgagtgcgggattatctatttcaagaacagttgctgaggaggttcagaaaactcaaaatagaggtctgctgcatctatccaggataacactgattcacctctccctgtaagacagtaaaactataaatatcttaaaatcacttagtaaagttacccaagagaaacattgaaaaacctttatttaaaacatttaggagtgttctcatgctttcctgacccttagaaattaataattcaaatgtggaaatactatattaataattcaatgcatattagtattttctctactaagtatctttacagctctctctctgtaaatgaaatcttagagtattttaagagacagggtcttgttctgttgcccaggctggagtgcagcggcgccatcagagcttactgcagcctctaactcctgggctcaagcaacccttctgcctcagccatctgaatagctaggactacagagcaggcaccaccgcatccaagtaattctttaaaaattttttctagagatgggatcttgttattttgcccaggctggtctcaaactcctggcctcaagtgttccgactacctcaactgcccaaagcactgggattacaggcctgagccactgcccctggtcctaaattaattcatctttaggtttccaatgaacattatgaatactgtatgtattataattctcgaatggagtattttattgtatatacttatcttctcatccatgaagacagcgaatgttaatctcattaaagctgagatccagcacttattagttatgtaattaggagcaagttgacattccttgcattttaatttcctcatttgtaatatgagtatgatgtagtaactcgtgagataacgaacgtaaagtgtttctttacatagtgaacctaaaatattaataataaagtttcaccaagaatcacagaaataggaatgaaacccagccttttatctgtatactgccacgtgacttcttaggaattaggctcaattgtcttactatattgagatgaattatatacctagtatagtataacatttctgtttttcccattgctttctcctctgtgttttaagtgctctaacactacgttatagaacttatagcatagaccttgagtgctttgtgtttttgccttcccctagagacctaaatatattggctataaatggtggcggtaaattttttgactcatgaggaattgtgatgatttttagtacacatattttaaatattaatatgtgacataaaaagcaatcagcatattagtatttgttaacacttctctttttaaaaaagttaataatgacagtagacctctttatgaataccaaatatgcatggggtgaagataattttaacagtctttatggctagttatatatagtaacatgctggcatagctttttaataatcaaattgagaaaagttttgtctttgtataaaagtcatcactatcaactaatatcatttaagccacctcatttgcatagcattgccttgggcattatacagaataagaacaagatactatctttgtccttctggtgtgccaaaatgtcctataaatgggtatatattttgcagtattgagttatacagaaatatatttttaaagacactttcatttctaagtttcaaaatatttttgcaccaaaaacattgctcttattaggccaccttttctaaggaagtttttattcattttatggaaattcagaattttgtctacaagactaatgacaacaattgtatatttatatataatcgcctttttgtatatgtcttagtctcttcaggctgctataacaaaattccttcgactgtgtaatttataaacaatagaaatgtattgctgacagttctagatgccaggaaatccaaagtcaagacaccagcaaaattcgtgtcacaaatggtgcctcttgctgcatcttcatatggtgtaaagggcaaaatggctcccacaaacctcctttataagggcactaatcccattcatgagggtggagccatcatgaccgaatcacttcctaaagtccccacctcttcattctatcacattggggattaaatttcaacatatgaattttagggagacaagcattcagaccacagcagtatatttagtacatttttatcctccctatctaaaatataatttctccttccctcaatgatccacttacactccactgctttctttttctacttcgtgaaccaacagtcccaacaaactttgacaatcagtaatgttgactggtaaagtgaagcactgaaatcctattgttaagtagccacatacatacatacatgcatacatacatagatacatgaaagctaaccagaaaatgaactaaacttaattatttttagtttattttttatgagcaagtgatgagaaaataatttctaatggttaatccagtttatgcataataccaatgatataaaacttttttacaatggtctagcattaaggaactataatgtttgcataaaccctatgtctgttcttgctggatggtcaactagttttggagtgctgttacctttattgaagaaggatgtaaacagagcattatctcaataggtgcagctgctgtgtggagctctgtgcagggagagtcccccagctgtgtgtgagctcagtcatgggaatactgtgatccaccagcagcatttgtcctgagagaggcagccaggatgttgtatgtttaccatccctgctgaacaaatcagtatcttaattatggtaggatgcctcccagaggtatatacattttaaaaggctactcttgatgacagaaaatgtttattcctaaggccaccctgagcacatcatctggttttattgaaggaaatacttgtacatttatggagggaaggaaatttattttattgcttgcatcagcatatcctactaagtaatgagtcctgaagcttttctttataggccacagtgagtggcttcttaacaatcacatatctattttcctttgaataagtaccattgcttcaatctattcccttttctccaaaggtgactgtatgtctcttttatctgggacagttcaggtctatgcttgttgttctctacatttatttacagtacccctttccatcttgaaagtatctcagtgtgggcaataaattttatggtcactatagactgttacctcaaactctctctttttttttaaatcatgacaattcaaatcccatttgtgcatatatttttgagataccttgtttaaataaacagtatctttctttgacctggccagcttccttttttaaagcttttgttaatttgggtaaacaaatcctcatgaactggaaatgttgctcagttttgaaagatgacatcttttttactaaatgctcttgattaaagatggctgcagattctttgacacaacttccattgagaagtaggatctgtttcctctccctttgagtctgtgctgcctgttaagactgtgttgatccatagagtatgctggaagtgataaccaagccagtttggggcctaatctctgagaagactaacagcttccgccttactttcttgaagccctgagctaccacataggaagtccagctatgctgctggaaaattcacggagaggcccggaggctagatagagaggaggagggagctcccttccagccattcctaccaacgtgccaggcctcaagtgaggccatctttgactcgccagcccagccttgctcactataactaaagacctctgagtggccccagtcaatatgatgtagaacagaagaactgcccaactgagttctgcccaaattgttgacccacagcatcatgcaatatagtaaaatggctattttaagcccctaagttttgggatagttttatgcagcagtagttatctggaacaataacacatttttagataaacatgttattttagaaattattttggtaagagtactattgatccttttggtttctttgtgaagatctttaaaaaaaatttattgaagatgattgaataaattttaactcttaaaataacagcaaatttatggagcacctaccaactgcccttgcaattgatctacccgatgtcatttgaccactctcacccatgcatgattaactgtactttgaagatcacatttaatcgtattaagaatgtagtgtattatggcttaatttcagcagaaaattcaaatgtatgtatgtgccctttgcaactgtttatactcatagtctgaactgccgtctcccccttcactctacccacagggtgtactgtttataaaagtaattgatgtaaaccatctaatttctgttgatgaagaaagagtctattatttggtggtgctctgcctcaattttgatatctagcacctgacacatagaaaatatctagtaaatatttgttgaatttataagtaaagatccctgcattctgtattttgacagtttccctccagatcccagatctctggagaccccttatgcatcaaatcaatttaagcatttcagtgtctaacacaaggcatgataaagaaaaataataaagcattttagatagtgtacatccaaaaatgcgtttttagcctggtggccatggacatgtttgcattgattttgtgacatttttgttactccagacaccatggactacttaaggaaagtgtcagatttgaagaccatcacttcattatctcattctactttgtgtgtctataagtgtcaagaactgattccagcactggggatacagctgcatataaaacattcattgcccttgccttcctcaggtcccagatgtaactttaaaggtagcacacctggcttcaggcagaaacaagactttagctcaaaactccttatactactcagagttcttgggttttttttttttttcttttttctttttttattaacccaccttgtcttagctaggccttcagagccatggttcacagctagtgacttgacttagtatttactgcaggaagatgaacagaataaggaaagctacttctgtttggaaaagatggtattagatattagagggaaaggtatctatcctgtttttctcaaatcttttccacaagaataatggttttcagactagatggttagttttggccatccttggccagaggaatggaagccagagataggagataaaacataaataacagttttggtacatttttacagctatatcaccattaagattctagaactgccttactaacagacgatttgagagaacttagagaaggataattctcatttctgtagtattttacaatatccacagtacttattaattcacgtatggctgtagggcgggaggctgtaaaacaggctgattgcccaagtgtggtgtgtaacaccacactaagctgttagtaaagtcatcatcatcatcttccttaacattacacctaagtatcaattaatgtttgtttcacaaataaggaacctgaggctcagaaagctcatgacgtatccaaggaggcagagctgggacttatttctaggtcctctaactctagatccagctctctcttgtggtacacttcatcttaattttccccagtgaccaaattgtggttggcctggactgttaatctagaaataatttacccagaaaaaaactcaggttcgctcacttgatgagtaacaaagaactccccatgagaatgtgggttttgatcaataggagttttattacttggtgctaggaagtaggacactgtaaggattcttcaaggcactgcctccctaaggaaaagcaacaggagggctttatggggcaatggagaggagagaagggtgcagccttgaatatggaggagggatcccaggtgcacagatgcagtgagccatcatgccagcacataggtcgcatgttatggtaatgaagctgttgcctctcccacagtggagactttagcatagtaagttgcaggggtctgtcaggagctagtttaagccaacaaagtgaccgcattccacacaggctgtagggcaggaggttgtaaaacaggctgattgcccaagttgatgaaattcctataaaccctggaaacctccttgtctgcttacagataggcttttagctagtcgctgtagatctgctacatatttttatgggatagttggttgggggaatcactgaaaaagcaatgttttaaggtaattattacggaagtagcataggatagagtagaagagtgagaaattggaggcaagaccagttaggagactgttgcagtgtcttaggtatgagttactttggaaatgaaagcgtttttgtagtgggagtgaaaatgatgggacagatttcctcacatccagtaattcctgttctgtccatccctgtaatcactactggactagacctgttgttgcggcctctcattacacctgatcatgcttagagactattggacactctgttgcttaccatccactctcccttgccccacagtgaattcttaaaactatctttctgacttctttcatttcagtgttggcttgaaccctgtcaaaatgtaactcttcattctccattggctgctgttgagggccataacctctgccaacaatgatagttttcagctcctttcttcattgtgcatttgttttattttttttttccatgtcatctgttacttctcctggttcaagtgaaaagacctttttaataggcatcgccaataaatctcatgccagttgaaccaaccagttacaacaagccatgaataatgaaggtactcctcttcctcttctgagttgtttattgctgggcagaagaaatgctaattctgttggcctcataacctgagttttctagaaagctgtattatagagattcagtgtttggggttttttttttttaagttttatttagtgttatgtgtactgagtgatttagaaatgataaatattctaagatcttactacaacaatagaaaaatcttgcaggataaatactcttctgttcataatttaaaagttcctaaaaatcttagctcttcatagctttcaagcttctttatttaaatcttcttcattcagaggtagctttaaaaaagtagtgtaattgaactttgtgtactgaattttcattcaaaacattttgccaaagatgctgaaaatgaagaggtgttgaaaagatatatactataatttaatccagatgtaaatttaggtagcagtttcaaataacttgcctattcctgagtaactgactcaatttaatcttttcaagtacaatagtcaggcctgttttttaatgcacaggtttcagatttcagttctcaaaaagataaaatggatgttgtatgtccgaatacctcttccccttcgagagatgaaagctgtgtgttctccatatatgtgcccgagcttcagttttccttactatttaaattatgtaaaaaagcatgctttgttgacagatttttaaatgacatattttttattaaaatgtacactctagctacacattcaagtatcaaatacagatcaatgaccactttcgtccaccttattttgaatgacttagatattacgcttaaaaaaaaaaaagaatcaattagtttattcagataggttttttacatttggtttctaaatgataaggtttggggcttctatttgcaaacacttcctcacagataacacattactggcactttacagtggaaaatctccatttctaattaaaaaaacagattaaatgtagttttattatattcctttttcttaacatggatttttgaggtactgtgacatcttgatatgcctgaagagcactgtggtcaattggatgcaatatatagatctaatagtgaaggaaatgtttagaactattgtttttatttccaataacatgttgtacttcagtgttaatattcattatgctttcagtctttagccagttttggatataaattaaacagtactgcattgtacagaagtttaaaattggttagtgatattctgctgagtaagaaactgactgtgatcagcttaatcatgtgccttccgtgatgtaaacacacagccaacaggcatgtgcatgcaatttgtcttgaaggttatattacttttcctgttttaatgaagaaattgtttataatcttactgattttttttgtttttttttattgaggtagaaattttatgcagtaaagtgcacaaattgtaggtttacagctgggatgtgtacacctgtaaccaaatcccaaatgaagatggacagacatttcaggcaacaaagcaggctgcctcatgttccatttcagccacttccatactcagagaccaccataaatgagtcatgcctagtaatgaacttctggcttccatcattcagcatcctctatgggattcatccgtgttgttgcatggaccagtagttaattctttttaatggaggtgcaggatgccccttgcatgaatataccaggatttcattaattgttctgtcgatggggcatctggatagtttctaggtaggggttatgaatgatgctactaagaacattctagtacatatcttttggtgaatgaatatgtgtatactttcttttggtgtagcattattggatcataagtacatgtgttcagtactaatgtatactgccaagtgatttttcaaagtagttgtaaacagcaagagtaacaattattccacatcctaaccaacatttgatcaagtcagtctttttaattttaatcaatccgataggattctaggaacctcagtgtgatttttatctttgttttcttggtgtataatgatgtggagtaccttttcatatgctttatgaccatttgggtattttctttggagaaatacccattcaggtcttttgtccattttaaaaattggattatctttttttataatttgtagaaattctttatacattctggacacaagttctttattagatgtatgtattgcacatacctttccccaatctttggcttaccttttcactcacttaatagtttccttgagtgagcataaattcttaattttattgaagtcaaattttaaattctttttatggttagttcctttttgtgtcctgtttaatatatctttttctacctcaaggttctgaggatccattctgcatatttacttctagaagtattataacctaactttagtttctatgatccatctctaatttgtacgggtggtgtgagatagggggtcaggggatttgtttgttttgttttgcatatggctattcagttgacccaacatcatttatataaaggaccatctccccagtaaattgtagccgtacctttgtcataaatcaggcaaatctatctgtgtgagtctgtttctaggctattttctcttttgcatttctcccttcttatgcctaaaccacaatcttaatttttgtaactttatagtaagtattgatatctggtgtctaatcctccagctttgtttttcagatttgctttggctcttctaggtattttgcatttctgtagaatcctttgcattttcaagaatcagtcacacacacacacacgcacacacacacacacacacaaccaacggaaccttctggcattttgattgggattgcatagaatccataagtcaattagtagagaaattatgtgttaataatattgcatcttccagtaagtaaatgttatatatctttcattttatttagatatttttacatttctgtaagcattggtttgtaattcttgttgtgaaggtcttttacatctttaactagattattttcagtatttgctgttctttggtgctactgtaaatggttcattttaaatggattttctaattgttttctaattctaatatgtttgaattctaagtgtagattaacctggtatccacaacccttactttttaaaacactttataagttatgtttatagtttttgtttgtgtcttttttttctttgcctttttgcactgtctgggaacttaattgtacataacatttccttttttatacttaaatattcttttaatcattttgattataaagcataaattacatatgtaattacctttttaaattaagtgtttataattacatgcagttttatgaaataatcaattccatgtactctttacccagtttttcccagtgaggtaacatcttgcaaaactgtagtacaatatcacaaacagaatattggccttgatacagaacatttctatcaccacaggatctctcgggttgcccttatagtcacacttactcccctccttccttccattccccttccccatccttagtccctgccaaccattggtctgttctccttttctataattttgccatttcaagaaagttatgtaagtgaagtcatacagaatgtaacctgttcggattggccctttttactcagctaaattccctggagattcatccaaggtgttgtgtgtatccataggtcattccttattattgctgagtagtgtatctgatatagatttactgccgtttgtttacccattcacttgaagaaggacatcttggttgtttctgatttttacctgtaaacatttgtgtacaggtttttatgtgatcataagtctttatttttctgggttaaatgcccaagggtgcaatttttcactcgtgatgattatcatggttaattttatgctgccatactcttctctaaagtagttgtctaattttacattccatcagcaatgtatctagtttgcgtcctcgccagcattttagtgttgtcactattttttattttagccattatgataaatggcaaatgatgttgcacatcttttcaagttcttatttgccatctacatcctcttcagtgaaatgtctattcatggcttttgcccattttctaattggatagtttgtttttactattgagttttgagagatctttctatgttctagatattagtcttgtcggatcgatgttttgaaaagtttctccaagtctgtagtttgtccttttatcctctcaggtctttcacagagcaaaaattttaattttgatgaaatctaatttggttagtgtttatatgatatatctttttctatccttttatctttaacttatctattatatttaaagtggatttcttcttgatagcatggatgtaggtctttttaaaaaaattaagtctgaaaatctttttattcatgtgtttaaacctgcgtttaatgtaattgctaatatgcttcaattaggcccaccattttactgcttgttttcaattttttcacctgcttatttttttcttctccctcttctgccttctttctggttatgtctaattttttatattttatctgttgtcttttatgttttttaaatggttgttgtaggtattacattataaatacctaaccgttcacagtctacttagagtttgtattgtaccacttagagtaaaatgtaaagagcttacaaccatgtaggtctctgctttccagagtttttgtatgcgttacatccacctatatcaaaatcctcaaaaaggactataattttttgtacgtttatacatattgtaaagaacttgaggaaaaaataatcttatatttacatagtatttactatttttctttcctcatttttaaaattgcaagattgctttgatactattttccttcagcccaaggaattttctttagtatttcttttacaacagatttgctagtgataaattttcttagatttccttcacttgagaatattattttcctttagttctgaaggatatttttgctgatacagtattctgtgttgacagggttttttgttttttcatttagtattgtaaagattgttctactgtcttctggcatctgtggtttctgatgagaaattttcagtccttttgtttgttctatatgtaatgcatttgtttctttggctgctttcaagattttatctttgtctgtagtttcaaatgatttgattatactgtgctttgacatagttctgctcatttattttttcaatcttttttctctcatttattcaaattagatcatttttgttgatctgttaagtttactgaatcttttgtcatgtacagtcttctcatccgtgaatgttttatctcagatattacagttttcagttctaaaattttcatgtggtttattgtattttatgagagcattttatttttctgtttatttatagagtgtttacctcatagagcatggttataattgcttctttaaagtctgataatttcagcatctaggtcatatgacatctattgatagtttttacccttgagaattagtttttctggttctttgcatgtttggttattttagattgtgttggacatttttagtattatgttgcttagtctctggggccctgttacagtcctctgtagaatgtagatttcttttttccttttagccaataaccaacccactgaggttcaaactgcaaactttctccttgtttggaagatgattccgatgtcagttcaattttcaaagcctttactatgctgtcttgtgtatacaccactcagtggctagtctgagacataggagtggtttaaattgtagttcagttctttaacctttgttatactgctttgagtcttcccactcatacacagctcatattagcttatgttgattcatacacagaattagggaatctttttctctacttttctcctctctggagggatctctgggattcctcctgttctctttagaccacaagagcccatttttggtctggccagaaacatggtgtttcagagttttagctttctgcactgccacacagttcttgcaattggggtcatccttctggtaaaatgggaagagaaaaagaggaggaagtatactggggatttctcccactctcttcgggactgagggcccatttcccagttctctagccagaaagacagatttctaatgaagttttagctactggcactgtctactgccccagctctgctatcacttactctaggtgaactgtgaaataagaaggaaaaaagtgagggttttcagcccacacacatactcacgctcaaagggccccctttaccctgatcttctggttaaagacagtctcccagagttctaattgtctgtgtgcaccaggaagtgcccaccctcagctcaaggccacaagaaaaaaaaaaacgggaaaaccaggaaactcacttgcatgtaggtctctttcttcttcaggcgttggttctcttccacaaactgcttttttctctttacttttcagagttctttggtaattgttttttgtgttttgtcctgagtttttatttgtaatcagcaggagataggcactttaatgggcttatgctatcctggccacaatagaagttctcaagtggtttttaaataaaacatttaaaatggctgtgagttgcatctccatcatcagttggtccattgtggaccagtggtccacaatccagtggtccaatgattgtgataatcaaagcattagaaatctgttctgatataatgtcaacactcagtttctatgaaagcagattattttattggttgagatactcctaatagctttgaatatcttctgggtatcattactctccttactttttacattacatttacacatttctctctgttcatcttcagtatgcattctgaaaccaacaggacatcagagctggactgtggttttctttaattattcaagctaaattaccagaaatgcccttttaagatgaaatatttagtcgcttcaaaacaagtcaggttggaggaagagggcaggtttacttagctcatgtttttcatccttacaagcagtattgatgtttcatgctagcaaactgtggtagaagccttcgagtcctaaccaaaaacaattctttcttcaaaactcccgtaacactttatcaaaactcccataacactttattaaaagattaaaaatgtaaatcctaaggatagggtaacaagcactcttaagcactattggttttagtataaatttctagatgttcactgaaactttgtgtgtgtctgtgtttacatggcaatttgatgaactaagctaggaatatgatttttctggctcaaaaggtatgcaaaagattataggtataaacacgtgagagatatatatatatacatatatatatataatgcataccctttgaggcagaaatcacacttctaggtgtagttcatcagattggctgcttattttagccaaaaaatgggggtgggggccttcatatgcattaatggagtacagataattaaattacggtacagttatagtttctataaaatggaatgctacctagccattaatacgatacatattattaaagtggaaagctctataatattaaatggaaattgaggctactaaatataatacatcttcatatacgctaatggaggacagataattaaattatggcacagttatagattctataaaatggagtactacctagccattaatatgatacatattatttattaaaatggaaagctctgtaatagtggaaattgaagctaccaaatataattggtataatctctttttataaaagctataggtatacttatattgatatatggaggaaaataatttggaaggatagatatcaaaatagttatagtgatcattctcacagagccaagattaagaattaaaaaaatgtttttttgtttcctattaagtattgccaggtatttttttaaaatcatgacttatttaatttgagcaagagtaggagggacctatatcatgttggagaaaagatttctacattctaaagggtaaaagaactagaatctatgagaagaaggggcagggtgttacagatcacagttccttatatacaagtaaacttttaaactgtgactttttaacactaacatttaacagacctgacagtacaaaatgggttgcctgtaggtatgagttccacgtcactaaaaatgttcagacgtaagctccaaagccatttggtaagtttatcatggaagtaattgaagcatcagtttttttgacgttttgccttgggactctcttggtagatgattttaactgtgtgaaaagatgaatgaggggacttagaaaagcctttctgattctcatttccaaattcaaagagaattatatttcaacctgcttatcactaagaagataccagcatgttaaaattcacatgaagtatgaccttctttaaatacgctacgatgcagcaccctcaaaagtaaagtacagaaactgacagtagtggtatctgtctacagtttatcattggtgaataaatgaagggaagaaggaattgagtctggacttgccgcatatggaaccatgaactatacacatagaatgttgtttggggtcacaaagtagtagattaggccagtgattcctaaaccctgctgaacttcagaatccatcttcagagcttatagatatagacatattacatattttaatagactcttgggtcctgatcccacagatttagattaactagctctggaatagggcccagaaatcactatctttaaaagaattctcaagttgtgttgatgatcagccaagttcagacacgaccagaataaaatatatatacgtatacatacctacatatcaggacagttacaagaaaggagaaagcaaaataaagtattttgataaacacatcaagttcttttgagttactgatattttaaaaagctgtctcggtgagaagcccattaacattctacagctaagtgatgctacagccagtatttctgatgtttcattcagtccattaagcagagctgcttaaaagaactagttttatttatttatacatttataatcaggttcatgaatacagtcaacactatggaaattcttgtcaataaaaaagtgtttgtccacagactacacacagaaataaaattattagacctgcatcagtcaccgtctgagctggtcatgcccttaaaggaaatttcaaggaagatgggctgaagttggtgagatatctgctgatgtttaagatgtaagcaaggtggtatcttactcatgatcaggttaacaataacacatacattgaacagtttgagaattttgcatctttagctttatgtccaaatgatgaaaagggggtaaggaagaaatgatgaaaagggggaaatgatgaaaagggggaaaatgaaggcaacctgcaaaactgataatgaaaatagaacatgaaagtaactgtcatcacccactaacaaagcacctcatcttcctaaataacagagtcagccctctaagtcagtctgtcataagtgccagatttgttttctgaggccacttttggcacccgaattcctgaggtctagcttcaaatgagcatttcctccactgccagagtcctgcaggaggctgtagagatggatcccacagctggtccctgcactgacaggcatgctgtcgccggctcaggcattgtctagggcatgtcctgcttagaatgctcttcccctagaacctgcacggtagggagcagattcccagaaacccttcccatctttgttcacagccactttcccaacaaggcctgggatcatcttatttaaaactgtggcacctgtgctccccacccaccacctgatccacatctttttttccattgcacttaacacttttattgtaaacccagaattgacttgttatgtttattgttgatgtctgcgccctctgctaattacagagctttatttgctttgtccattgatgtaagtgtctagaatagtggctagcacttagtatataaatatgtgttgagtggatggataagtacatgatgtattgattgttcgattgttcattactagctatttatgccacatcaggcagttttcagtatagccttcagtattcacgtagttaaaaccatcccaaatatttgtgtttgaacaacgttgtctgtgaaatggaactgcctaggtcatgagtgcattttggagttctgctgttgagtcagagcatgctggcagtagtggctccgcttgtagaagtgaaacctcctgcttatgttttggccccatgagatctcataagatttcccccaacatttttggctttactcctgatgcacactttcatatctcttaaagatcagcctgttggacgttattcttagaacagtgctaagcactcagcaattaacctagtcaatgatatgtgttgactgtgggtgtgacccaccatgtctgttgtgatttttaacttcagagtatcttaggaattatccagtccagctcattttatacttcaagaaactcaggaaaccaagattaggttaatcttctaaattcacagtactagctagaggcagccccttctgggacaggagtcctagtctgtttggtttcttttttttttaaacccaccatattgctaaaacagatagcaacaccagcttcctcatgcagtgcagtcatctactgtcaacacaggtcttggcttctttcccttcagcgtctcacccatctttcttaaggaggatccagatttctccaaatgttaccttcatatgggaccctattctgtcaccccaatccagagccttcttagaatgcctttcccacaggggccagtatattctctcgagtgcccgctgtttgggaatgcttgcttttctgctttcctaggcccccatcaccatggatgttcagcacagggactctggagaagcacctggttagtgtctggtggctgctttgttgtttttgactcccatcttttttgcctgtctcttcctccagcttcaccctcaactcggtttgccctcaggagttctttacctcctttgatcagtttctccggctccttcttcaccctttgtggcttctcaaggccacatcactagagttaggaggggaaagaagcaagcaccctccttttatctagtacttcatttttttcagcattatctcatttgccctttacagcaaccctgtgttaagtgggaacagatactcttactccctttttactatcaaagaaatgaaatacagatatgtaaaggaaatgatctcattggcagaactggaagcagagcctccaaatctgggtgtagaatcttttctactgtcccaaattttaacagagagacaaaatttatcaccgtctggtattctgaaatgtacataatttttctcaacatcgtactcagtttaaaaatcttctgaggatattaatgtggatttctctagtgtctttagaaacttgattttagaaaaggccactgacaagttagtgatataataaacaggtcctctgatactgactgcattttcatctacatttaccagttattaaatgctgttatatgtggaactgtgtttgcaatattttatttactgttttgagaattaggttgatggtaagatttattcaaattcttgattttaataatgtatcaatacaacttaataatttgatttatttgcaagttttgaaaatccacatattctagtagatcctgaacttaactaaaagtgtaagaaatatttcacatataaaacatgatacaggctgggtgcggtggctcacgcctgtaatcccagcactttgggaggctgaggcgggcggatcacgaggtcaggagatcgagaccatcctagctaacacgatgaaaccctgtctctactaaatatacaaaaaattagtcgggcgtggtggtgggcgcctgtagtcccaggtactcaggagactgaggcaagagaatggcgtgaacccgggaggcggagcttgcagtgagcaaagatcatgccactgcactccagcctgggagacagagcgagactccgtctcaaaaaaaaaatatatatatatatatatttatatatttatatttatatatttatatagatatttatatatttatatatatttatatatatatttatatatatatttatatattatatatattgtatttaaacattctttaaaatatttatcatttatctcaactaatagaaagtgatcttatcactttttattattcatagacagactgaaatttgttttaacttaaattcaaccaatgttttacttaattttattaatgtttttaagttactccactgtcaagcaaagcattttaaagtacactgtgatgtatatactttcataagaaaaacgaaatgtaattacattttgcaagtaacacaaattggaagctgacattgtcctgacatggctggcagtgtctgctccctgccaagcttctctgtatagccaatcaagagagtttatatgcaaagtagcaaatacatggtgttttgtaatgcagctttattctcactgccacttgccctcctagaggccatgggatgcacaaattgtttgtatgtaagagtcctagaagatgttaaaaacccttgtgtcttatgttcagagctgtcagcatgatctaaggcccgaaatcgtaaggtacagtagtgtacagtaaatttatataaagtcctttgatataaattgaagttgtccaaattcatttcctataaaatgataatatccaaattctaggtttgcctttgatgttgttccttccactcatttttaagttgttttcatgtttcacattgccaaatggcacactacctggagtatgccctcttgttgagaccattcttagtttgatatagtgtcaaagaaaaaaagtgagaatgttgggaatttggtttgctttacaagttaggatgagtggagagaaccctcttgacaggatgaagaaatctgtggaagtatcatagcgaacaataaccacctgcctattatccagtttcctgaatgataaaaattgtctatgcatcctgcctcaaaggcttgaccatggggtggttttctcttctgacagatttagctgtttccagtcacatttgttatcacttttgtgcgatcttgctgtttagctcctttaaatcagaaatacattctgcttatgggaagacacacacacacaaacacacacacacacagatttatactaaaatcacaaaaaccttttaaaatgtcttgtgaaaatatattagctatctttcttagaacaaacataaagaagaatagtaaataaatgtgcagtccagcaccagtgttgacatctgttgtgaaatgtgctacatggagtaaccattgtagagacaatcatcttaggcaccaaaatgacttaggagcttctttctttgttctttcttatcacttactatttttattagtttagctttttccaaacgtgtttactcagagatacctattttagttaggaagaaaaagagaaataacaccaattaaagctaattgaggctgaattcttgtcagtcttaaaagaatcctaattgtttctctttgaactgactaatccataaaagttttctgaagggatggggtgtggttgtatttgatagcttccatttggatgatttctactaccttttttcttgtttgagaactattagaacgaacatgatcattttttcaagctggagtgcggtggcacgatctcagctcactgcaacctctgcctcccaggttcaagcgattctcctgtctcagcctcccgagtagctggaactacaggcacctgccaccacacccagctgatttttgtatgaacatgatcaattttatacacatagaacatagtaaaatgctgataattataagttgtttgtttactcattgtagctatttactgtgtgatcaactgtgaaattttgtgcaaccctctctcagaatggaaaaaaaagaggatttagtctgagtttctgagaataattttccaagtatatctggaaaggtaaattgattttaaaggatatataattgattaattaaaacatcatttcataaaactcattttatcatccactgtgagagcagcttcaaatgccctcagatctaagtatcaagccaagtggtacaaatcattttcatgcaactgaagataccatttatgttggaatagcccccaaaaacgaaaatacacgtgacctgtttaactttgtgctaactgttacaatgtatgtgtgttttgtttattctctcataggtatgagaaagtgccagtcatcttggttgggaacaaagtggacctggaaagtgagagagaagtatcgtccagcgaaggcagagcccttgctgaagagtggggctgcccctttatggaaacttccgctaagagtaaaacaatggtggacgaactctttgcagaaattgtgaggcagatgaactatgctgctcagcctgacaaagatgacccatgctgttctgcatgtaacatacaatagcatccaaatatggctgtcctggatgggatttgcccaatgtcgtaggtgatagaaaactcgcctactccactgcagaacttgcagaatgcgtggtgttaatctacagagaactgcagcccttattcagaattgagcagtgattgtcagttgatatctctgagtaacatttgggttcagtaactacagttttcaccatttgtcctcagtctcctttatgcatctgcaactttaaggcatagtccatcgatctacagggtgatctcatttgaaagctatgatggcattgtcgctgagttgacagaagcaactattgtacaaattaaaaataaccataagggagaaaccagaagaattcctctgaccacttacaattaaaatattttgtcttctttaaaaaaataagtaaaggagaaatattttcctacaagagtactgaatttcaggaaatgggatagagcttctaaccaatgtattccgtcaagtaagataataacagctgacctgccaacagcattacagggagattctttgctcagctaacacatttctgtttttcaaaattgatgcttaattgtagctgttattctaatttgtgacatggaactaactcatgcttcaatccttgatagagcaaaactcagaacaggttatgtaaaaatatagtctggctttagaatttgttaattcacctgctttgccacagaaaatggaggctttcacaagggtttgatcagaattaaaaccccaaacccgccctctgttaggggtggtctttataactttactgaacaagagggaagcaactgtgatgggaagagattacctagccttactaacaagaagcattctaatagataaactagtaccatcatgtaaggaagatgaagccatgttgcatccacatgttcccgtttgcagaaacctcacaggacagtacgaatatctggcatttttaagttcattaaagcagcaaattccttctcgcctttaagggctatggttgtagtgtgacccgtggctaacctgctttcaaaatcaagtatttgctgtagcagagctttattgcaggcattttaaaaattgaataaccatgtgaaataatttgggcttaaaagtgaacataaattatagagtggaaggtaagggacaaaagccttttacctttaattttcctggagaattatataaaggttttcttagaacaattttgccctgattactgaagcgtcaaataaagctggagtgaaaattttgttttgaaaaggtgctcaagctctgacatttttggttttcatagtcgtgaagtatttatcatttgcatgactaatggcacaggaaaaacctattcataagttttacaatcaagtatagaggggtcttcagctaacttagttatacataaatgctgaaaagattatcttgagctgggccttgggagaagaatttggccttcagaactgcaatatcactgagcctgcgatctatacaccaccccacattttgttggtttcacagtcttgtgcaagtaacctctggtcttacgtgtgtaactgagagaagagtgtgtgtttgtgtgtgcatgtgtgtttattgttcctaagaatttggcacaagtcagagataattgcctatactaagaatctatactgcagaatatagtgtatcaaaaacttttttcttttaaattattaaagtgtcttttatacttttatgaaatcattggtagccccccaagtgtttaataactggcattaagcttagagggtgaaaaaaaaaaaaaagattgatagtatttttcataatgaaaaaactgaagagatacgtgaatgaaaccaggccatagctgtcataaatctttgacttttgaatatttacattcttcagtataattttttataatcctcaattatgaaccaccttgtttataggacaaaaaaatttaaccaattttattgaaacgaatttcactgtgtaaaagttggtttgattcaaacatgtagagaagttgtagattcaagatatatgatttctctatggaaataaaaatatttgttagtgaattggttgagttttgattcctctaacttctcagaatgattctttagaattctataattcatagcaatttttgacaagtaagattgcaaaatagaaatatctataaagattccacagtttgacattatggcttgctatgcagatgtgaaaataggttaaataatatgaaagatatggcagaatgtaaagtggaaaagatgacctaaaattttgagttgtattaatagttaaaaacatttgtgtcagatgacagggtgggcttttactgtcaagacatgaataagaactgatctggctgcctgatgagtgtttccacgcagccctgcatatttagtgaccaaggcatcaaggacatcccgaaactggaaattcatatccatctggtatgaatatataactcagctggcaaatgaatgtgtttgttgagatattacagtaataaaacacttaagaacaggaagatta

SEQ ID NO: 134 - DNA, 32742 bp, Homo sapiens
  source 1..32742: mol_type = other DNA
tgcctgcgaccgttctcactgagcatgtgcagacggcggtgcgcatgctctgttgcggtccgcttcggtttctgttgcgggacccggggtgtctcctagcgcaaccggaactagccttctgggggccggcttcctttatctctggcggccttgtagtcgtctccgagactccccacccctccttccctcttgaccccctaggtttgattgccctttccccgaaacaactatcatgagcgcgaggctgccggtgttgtctccacctcggtggccgcggctgttgctgctgtcgctgctcctgctgggggcggttcctggcccgcgccggagcggcgctttctacctgcccggcctggcgcccgtcaacttctgcgacgaagaaaaaaagagcgacgagtgcaaggtgggtgaggcctgacgagccctctgatgcactgttggaaggggaagtcgtccctatccgggggagctgatcctcgggtgggagcgagggaagggggcgtagcagcgggtggggttgagtttccccagaagcttttggggtctgctgggctgtgggtggggggctctgaaacagcccttgcaagggtagtttctggaggacgcagtgggcctcagactcgcctcccgtcttgcgggccaagtggcacgagcagctgtattcagttttcctggaacagggaccgtgtggagcgcccttggagttgggcttcacgcctcagagctttggagttggatgtatgcaggtccacgcgtgagtgttcgctcacagccctgtaacatgtacgctgaggaagcgggtgaccgactccctacatgtgagcaacactcagcctagttaacagtttccattagcttttaacttcattgcttcctgtttaattgcattttcctggaaccttctagttggttaggagagcttgttctttctaggactttgatatctcgcttcacaattagaagttggttccttatttgtggagtataacacccagagccacacaaagtgcattaataaagagttgctgtaatggttgaggcacttgatttctgagttttaagtgtaaaagattttaatacacaaaaaaagatacgaggtctcactattttctctgagatggttttaaacacttaaaaggggcaaatggtgggagaaactggtgttttcctagggcaagtcttgaaaactttgatctcttacaacattcacactcaaggttttcagtttaattgctagtaaaagaggcgtaaataaagtaacctgcttttaggttatatggtgtagggctttacagtatacatacacaattatttcgttaagtttatttaaaacttaacatttgggggatgaggatctctttgaaacctttaatgatttcaacaattcaaataatcgttcaacaaacgtttacaatctataaataggcttatttattaagtttgatttttttaagctggtgtttattacagttagctttactatagctgtgaattttgaggttattttagggcattagataagctttaaatttttcataacattttgcagtttctttttaggttgtcagctatcttgaatgacatgtttatacatctgtgcaaaaccttgtatctgaaaaaatatctaaggatatttaaggtttactcaagtctgcagttagtgtttcagtacttaagttcatactctgcagtgcaagaagctttcactcctttttgaggattctgactgaaagactgttgttgtgcttccaagtggaagatctagacttgcaagtacactggtttttccattaaatattttagtaaccaacctttaaggcctagtgtttggtcttactttaacagcagttgtatattctattcctagtgcctcaaagatgaaaaatatatttcctgccctctgggaacctcaaagtaagggacataagcttatgaacagattattgaaatctgatctgttacacaggatgatgtccaaagtgtgctaaaacaaaatgaggaaacatcagtggactagagtctttagggaaagctctatagaagaagtgacagggccaggtgtggtggctcacgcctgtaatcccaacacattgggaggccgaggcgggtggatcacctgaagtcaggagtttaagaccagcctggccaatatggtgaaaccgcgtctctactaaaaatacaaaaattagctgggcgtggtggcgggcatctgtaatcccagctactcgggaggctgaggcaggaagaatcgcttgaactctggaggtggaggttgcagtgagctgagatcgcgccattgcactccagcctgggcaacagagcgagactttgtctcaaaaaaaaaaaaaaaaaaaaaaagaagaagaagtgacatttgagatggacttagaaaatgaataagtgaaacttataggtggtcttccagttagatgattgttttctcaacaggtcctttggtaagtggctaggttgtattctagttattttttagttaatcttgggagtcattttggatgtttaattttcataggtatagggataaaacaggcagagcagatcatttttccgaaatgtttggatttttatctttattgccagctacactcacatctggttaatggaaacaactcttagaagagcaggagggtgtactttcagcttttttcctgcgatatgactaactggtgtagagaatttgaaatacactttaatatttattttctttgcctttcaaagaagatgctataaataacagtaaacagttgaaatttgtattacttcaatcaggatgttaataatttattctcatctatttcgtatttgttaaggaggacagtcttgtacacattattcagaaaagtggaaggaacttcttttaaaaattagaaatgagagttgtgaaatggaaataattttttccaaaagatgctgttaagttagtgaatctgaagttggagaaattgggcaggtcattgatactgttaccaacagtttttccatctgtaaaatagggataatcatatttgattatgacatattccccttgaaaggtattttgcatttcttagaggaaaagtgcaatatttgtcattgttgtgatagtgtagagatgaaacaaatatatcttcaacttatatataatttaggtagtagagtgtttttatgtactgtaaagtttgtctcatgcatttagctcaggatgtaaattgagagagaatcagaagaatgctgaggatttagtaattttctctctttaaaaattatcttatgttgaatttactggcagagaaacaggagtccagtgaatataaaattctatttatattgctgtaacttctgattaattttcttagccttcatagatactgtgagtatgttttcatggcctcctttttttaacttattttacatgtgcgtgcatttggatattgaggaggtgcacattcttattgctttttatagccgatactatttcattctgttcctgtacaatctgtggtttgcctgaccattcttacttgtagggcctttagattgggcccaatttttctctattatgaatagctttgctacagtgtatttagcagtaattatttgcatatccccaaatataaaattctaggtaaagacaagaagaagtttttagttctgtttagtattgccagatttctttcaacaatgataggtttgatttcctttaactaaataataccttgtgttgccacatcattttaatttttatttatcaatttaatagtgatgtgatggtccctaagactttttttttttttttttgagacggagttttgctcttatcacccaggccggagtgcagtggcacgatcttggctcactgtaacctccacctcctgagtttaagcaattatcctgcctcagccccctgagtagctgggattacaggcgcctgccaccatgcccggctaatttttgtatttttagtagagatggggtttcaccacgttggccaggcttgtctcgaactcctgagctctcaggtgattcacccacttcagcctcccaaagtgttgggattgtaggcgtgagccaccacgcccagcctgtacactttttaaatgttttactttcattgctattgaaatttctgtgtcttttaatatttttcttttatttgccttattttgttacgttttgaaaccatagtaataaaagattgagctatggtattcctttcctgtagaattcactttactttcttaaaatcaagggacactgtgtgactgaaataagtagaataaagccctgattataagtgactagatattccaggataaaatccacagttctaatttagtttgtaaaagttttgactatttcagttagctttgtgctttttagctttaaatcaaatcttagtgtgccgagtggcattctgatggctaagaggtgaagattagtgagcagttcacctttgctgctttcaactttcaagtaattactgggttgtcaaccagaattcagaactaagaactaaaaatagtattaattctccaaaatgtctgccacttttttactgtttgatggatagatcacgttcttagatgaaagattaagattttttttcctttgctgtaaggaaaaatgaccaattataccccctagtggttaaaaacaatgtttaaatgaattagtttaacaactttttaataaaaaggaaaattactcagtcatactttcctttcttggtagttatttttagaagcattttataagttgtgtttgttattctgggagcagttgtgtataaatattggaatgagtcagctttaagaaaatagtcctgaatgttgatctgaacggacacagaatgaatatatatgtacctgttttaatttgaccatagaagtagtttgaagattttgaaatacttaaagaaaaaaaatctgtatgtgtatttattggtatagtgataaatatttatcgatatgtagtttcacattctcacagttctctctggaataagagcattgattcttagcttctgggaactcattagtgtttgggtgttgctctttcaaatctgaaatctggcactggaaggacttactttgactatggtaaatatacattccagcaattgtttcttcttcttctgaaaaggtatgttaaactgagatagtttgcctttcagaaattagatttttaagtaaaattaagactgtaattgttcattatagtgaatctgagagttagaatcaagaaagcaacaaaagtctatgaataaaattgtgtctttctgcctgtggcccctcaccaaagtgggtgtaaacttgaacttccaaaggtgtaaactggaacgtctgaaacaaatcacagatatatgttccacacctcacacccccaacacaaacacacagacacacatcggcactacagagattggtctgtgcactgtcagccttagagcccagctgcccaaacccttacttccctattctctcctgtagcttcctgtcaccatggtctctcagtaagttttgtagttaattttagctgctttacatgtatccaacaatttcattctattttcattaaaattaactatctatgaaaggctttggaggaaatttgtgaattttttctctttttgctcctcttctcacttttcaaacctgtttattgccctttgctaataataatggtaaagactacgatttgtgtgtgttgtatatgccttagctaaatttcataacatctctgtgatatttagatgaggaaacagaagctcaataagatttagtagctgtctcaagtgtacaaagctagtaagtattaaagccagaatgcaaacaagcccaagactgagtccaaaaagcctaggctcttcgccactgccttctactctgagcactcttcttcttgtttgcctttcccctggggatccctgaccgcttatcaccctggactttgacagttccagaaaacactctgtatctattatatgtaattttcattttattttattttttagaaacagtcttgctctgtcacccaggctagagtgcagtggtgcagtcataactcattgcagctttgatgtgtctgtgtaatttttaagtagtcaggttttatatttacttctttcgttgatatagtctaaaattgaaattgtatttttcagggctttggggaaagaaccctggtaattatctaggagatcagttgctgggcattgctgatcggataactcagagctcataaataagcatttgtgagtcccagcattgcttttgagacttttattgtgcctgagttaagacttcccttcttcaggaaggcgccactgtggactgctctaatattaaggagttgaagcttccatagatttccttttttatggcctccatatctcaaacccttttgtgacttgtcatttgccatgacccttgtacagtcacatctcttcactgaaatttctttctcccttgaaaatccagttgtaagtgtggggtgggacagatgtgatgatagcagaataaggtgggaataaaagcagaaacgaactaggaaatgggaaaaagtgtagtcctgtggcatggcccgtgtgccttgttaaaacaaaaaaatagactagttgtgaccatagctgggatcaggtatggaactggcagattaggactagaaataaaattgtacatttaggagagaaatttaaaaggaagactgtagagttctaaataaaaccacttctataaaacatttcatagtacaggattgtaatcagtcttgctttctctaagtgacataggattctgcaacttccttaaaatgtttcatgttgtcaaaattttgcatgcttgaaataacctaggtggggacagtttgaaagtgggaatgtgaagcaagtaaaccttgaagttctttctagtcacatcagtgataatctagagtcatctgtctctatttaaggcaaatttctgggaggagatggacttaactcttttggatggtgaataaagatgtttagagtgggaaaaaaaaggcaaacaaaacacacacacacacacacacacacacacacacacacacaccccagagattcagtagctactccaagaacatataaataagtgctgtcattttttttttaatatatgctgtattaggctgttcttgtgttgctgtaaagaaatacctgagactgggtaatttataaagaaaagatgtttaattggcccacagttctgcaggctgtacaagcatggcacggacatcgctcgacttctagtgggaacctcaggaaatttttactcatggcagaaggtgaagcaggagcaggcatgtcacatggtaaaagcaggagtgaaagagttttctgttgagcgagatgccacactttacaacaagcagatctcacaaggactcactcaccatcatgagggcagcaccaagggagtggtgccaacccattcattagacatctacccccatgatctagtcacctcccaccaggccctacctccagcattagggattacagcttgacataagatttgagtggggaaaaatactcaaatctcatgtccttcttatattgcaaaatacaatcatgccttcctaatagtctcccaaaatcttaactgactgcagcattaattcaaaagtcccaagcccaagtctcatttgagacaaggaaagtcccttctacctatgagcctgtaaaataaaaaagcaaaaacaagttacttacttccaagacacaaaggggctataggcattgggtaaatattcccaggccttgggcagctccaccattgtagctttacaaggttcaacccccacagctgttctcacaggttgttcagtgcctgtagcttttccaggcacagggtgtaagctgccaatgaatctactattctggagtctggaggacaatgtcccccttctcacagctccactaggcagtaccctggcggggactctgaatggggctccaacaccacatttcccctccacactgccctactaaaggtgctttgtgggggctccatccctgcagcaggcttctacctgggcacccaggttttctcatcctctgaaatctaggcagaggctgccaagcattcttcgctcttgaactctgtgtgcctgcaggcttaacaccacatggaagccaccaagacttacggcttgcattctgtaaatggcagcccaagctgtacctcagcctctttgagccatggctggagctggagtggcctgaatgctgggatcccaaggctgcacagggcagtggggccctgggtctgacctataaacccattcagtcctcctgggcctctgggcctgtggtgggaggggctgctgcaaaggtctctgaaatacctttgaagccttttccccgtagtcttggatattagcacttggctcccttttagttatgcagatatctgtagcatgcggttgccccacagcctgcttgaatttctctccagaaaaaactttttttttctttgccacatggttaggctgcaaattttctgaatgtttgtgctctgcttcctgtttaaatataaattccagctttaaatcatttatttgacccttcagctaagataggctgttagaagcagccaggttacctcttgaatactttgctgcttaaaaatttcttctaccatatatactaggttgtcactctttagtgcagagttccacagatccctagggcatgaatagaatgcaagtcaagctctttgctgagacgtaacacgtgtgacctttgcacaagttcccagtaaccttctcatttccatctcagacctcagcagcctgactttactgtccatatcactatcaatgttttggtcacaaccatttaaacagtctcttaagaagttccaaactttgcctcatcttcctatcttcttctgagccctccaaactctgcctgtttcccagttccaaaaccagttccacattttcaggtatctttataacaacaccccatcctcggcaccaattttctttgttaggctcttcttgcattgctataaagaaatacctgagactgggtaatttataaagaaaagaggtttaattggctcacgattctgcaggctgtacaagcatgcaccgacatcactctgcttctggggaggcctcaggaagcttttactcatggcaggagatgaagcaggagcaggcgtgtcatatggttacacaggagcaagagagagtgggggcaggtgccacactttacaaacaaccagatctcacaagaactcattatcaggaggacagcaccaagagagatggtgctaaaccattcattagaaattcaccctcatgatccagtcacctcccagcaagctccacctccaacactggagaatacaatttgacatgagatttagacaaggacatatattcaaacacatgcgttgtgtttccatctggattataaattctttgaaggcaagtgttcatgaatttgtattattttgtcatccaaaatgtctagtataggactttgtgggcattaaatacatgtattggctgattgagtttctcgtggtcttcaggatctgttgttgtaaatgttctttggttttcaaatatattgcaaattctactatttttttcctatttaataaattggcttctcctgagatcatcgttcctgctcctggaacacttttccaccctaaattttactttttaaatctttcttattgtttttgtttgccttctgttgctttacagtgagactaaggtctactctcaacttcaaagccctttttctggcttttaattgtgacagttttcaaaattcaaaaagttgaaagagtagtgtaatgatcacctttcactcacctagaccacctagaatcaacagttgtttacattttttcatacttgtcttatttgtgtgtatttatgttttataggggtgaatgtcatgacatctgtggcatactttcacatggttcagcttgaagctctttattgaactatataaactccccggcagtctcatttcctttcttccaatttttaacaattgttccactgacatattaggaggatctcattcttatgacacttttgaaatttctttgtcttgctgcaagagttgatatttagagttattgcaaatgtagcatatttacaaatatattgtaaatggctgtattctatattctgtgttaaggttgactttaattttaattgacttcacattcctcagcatgtgtgagatggtaattcttgaaatttcagatcctcacaatttagaaaaggaagaataaaagtgctgtgaaagctaagatgaactgaatattcaagctgtgtttgattactttgctgaacatcaaaaataggtccataatttagtgttgatatctatgatagactttcttacaaaagtagtgtggaaaggtgtcagaagagacaagaaggaagaaaagtagaggaataaaagcatcagaaataaaaagttacggtagcaacagttgagtttacctactttgtttctgcagtccagctttttaacttgtttcctcgtgttaaagaagcaaggaatccctagttcatgaggctactatcagaattgtgcgtgatagttattatcttccttttccctagactagtggccaggacaagtataatggataggcattaataaggttcagaaggctgactgtcttagtgtcctttaaaaacactggaatagcctagttgcactacttggatggatgggagacgagaggaaggaagagcctttcacagaaacccttatgctgataaacctttattcagactcaggaatggcagtttctttaagataatagattacagctgctatgtttattatttgttatagttattgtgtgccaattatggaccagcttctgcgtgtactgttttctattttattatgatatcattcagttcccacattcaaaattattacttgcccaagagcacttaataaaagtagacctaggatttgaagtgaacccagcattctgatgatacattctttctaaggagaattggaagctgcttcatcagatcaggaagggttgacaaataaggtacatttaatgggtattagatattagatgaaatgccaaacgtagatggataaaaactaataacatgtagataagaaaatgagggaggaaagggtgtgaaaaccccccgtgggctatgtactgaaatggaataagagtgatagtaattggtttaaatgacaccaagttttataaacagaagattaacatggtttctggaaaagaagttttcctggtctctagagttactggaagatttgctgtagttttagaaggagccaatgagtttgatttctaaagttttgacaacattgttttttaaaggttaaaatggaatttaaaggaagtgtggcttgggttggcttaagggctgagtgaggtggagtgagagaaatccatggggagtgctgacagtggagatttccaggactggtgcttgaggctaatttgggttttaaatttagaaaagagaatgcacatgaaatactttaatttgctagtggtacaaatctctgtatgtagcataatgtaaagctaatgaaaatatattttcagaagctctcttcaagttatatgagacagcaaaaagtaaattaatttgctcaaggacaaattgagaaagtatatctgaagagaaacagttaccatgtttttgagatgatgagctccaagctgtcagtttagaacataggaaggaaataaagaactgtccatgaagaatttaagcttctgggtagaaaggctaatgaaagtaacagtgttattctatacttacatgaaactttaacatgtaaatcttaaactttgctgtaattctctatgacatgccttttaagaaggatatgagaatagggcaaggtcctgagaagagcagctggcatgatcaaggagataggtgattcagaagattgagactcaaaggagataggagagagtgcagaaaatgagaataatgttttccctcaatcttagactcttagagccaaaagttgtcccatgaaacttcagagaggacatcataagctaagcaaaaatttgtattacttcatcaattgggtagaaatgggagaaacatttaccctaaatttatatgccctgagacagtgtcctaaaatttttcacatggcctcaggctttcaaactttatgccttgtgttcgaccctctgagatttgaattcaaataatagtgaaaaatacctggaaaacagtgctgaaggaagtactagaattctaatccagcttactgcttgtttttatagggccttcaggctaagaattatttttacatttttaagtggttggagaaaacaaatcaaaagaaggataatatttagggatgagtgaaaattacatgagaataaaatatcagtgccgtaagtgaaagttttattgggctacagccatgctcacttgtggatgtagtgtctacggctgcttttgcactacggcagtggcagagacccaatgtcctgtaaagcctaagacattactctctggccctttacaggaaaagtttgccagcctcttggatagactaataaaattagcgtcatttttccaggaaaagaaaagattgtagtggctagaggaaaaatgttaaatagatgaagaaacactgtatacagtcatgaaccgcataacgttttggtcaacgacagaccagtggccttataagatgataatggagctaaaaattcctattgcctagtgacatcatagccattgtaacatcacagtgtaattaccttatttttaaaaaatttagcatagcctaagtttacagtgtgtaagtctacagttgtgtacagtagtgtcctaggccttcacattcattcaccgctcactcacccagagcagcttccagccttgcaagttctattcatggtaagtgccctatgcaggtgtaacattttctccttttagactgcattttgattgtacctattctatgtttagatgtgtttagctacacaaataccattgtgttaacagttgcccacagtatttagtacaatcccatgttgtttaagtatgtgatggaccacaccatatatatacccccaggtgtgtagtaggctacaccatctagatttgtgtgggtatgctctgtgatagtcccacaacaaaatcccctaataacacgtttctccaaacacatccctgtcgttaagtgacacatggccgtaaagggtgctgagcatcatgctgttctttcccgtgctgttctttctgtttctggtctaacacagaggccgttagcctcctgggactatttacatttaattaaatacaacttaaaattcagttcttcagctacattgactgcattccaagtgcccaatagccacatgtggctggtggccaccatatttgaagaacatttccatcattgcttaaaactctgctggacatggctatgtaatagtaaatacggtactttatgccaggtgctgctcttgaatcttctcaaaaacttcttgaagtagggattattatcacttctgttctacagatcagaacgttgaggaacagggaagtgaagaaacttgcctagaatcacacaactagtgtcagaggcaggatttaaacccacacagcctagcttcagagtcttgcttcttaatcatttcgtgctgagaaaggttgagagtgaggaatacgcttaattgtagcaagagggacatggcttatgtgttgacagtgctgtacagattttgaaaaacaaaacatagaaaagttgtgtagagtataatagctgcattccttcctagaaggaaatcgagagataggaactggactagtattttggagacccttcagtcttctttatgttaaatggatcatttgaattctgacatatcttcatagcagtgttgaccctttctaattagtggaaattattttggcaaaggaagccattaaatgggaattttgtcttcacaacggttgtatgtatttgtgttaattcaagcatgctgtattgctacaatatcatgtcctattaccttgttagctgtgttgaagtctgtgttgctgttgcattataatttcacttgagtagaggtgtaggggccacatatgatgctgttgtcggtattacatgcaaaggctaatgccctctgttgtatagcatgaatattgggtgagcattttagtggatgaacacttccctcttctgaatattactaaatttatttggttttattttaacaaatgcatagcatttcatgtgtcaggcactatttggagtactttgtaaacgttaacttatttaatctccctatccctatgagaaatactggttttttttttttttttgaaacggagtttcgctctgttgcccaggctggagtgtagtggtgtgatcttggctcactgcaacctctgcctccagggttcaagcaattctcctgccccagcctccccagtagctgggattacaggtatgtgccaatacacccggctaattttgtatttttagtagaaacggggtttcgccatgttgaccaggctggtctcaatctcctgacctcaggtgatccgcccgccttggcctcccaaagtgctggggttacaggcatgagccactgtgcccagccgagaaatactgttatcctcattttgcagttaaggaaactgaagcacccatgaagcacatttgacccatgtggtcaaatgtttaataatttgaccacagtcacacagttagacaagtgatggccccgggatttgaacccaggcagtttgaccacagaacctgtaatcttgcctgctgtgttttgctgcctttctggtggcagtggactattgatttgttttgattgtacaccaaccgtctcgtcttgctttgggggatgttagcaagtgtagaggactgttgacagcactagtaagtgaaatcaaaatgacaagtgtggctccgtggcactcccagaagcctcatgactagtccaaaggcagtgtacagctctaactctataaaataaatacttgtcccagctgaacagctcttaatcattttttgattagcaccaaaggtacttcagggcacacgtgacttgctggcttcttcagctagtaaattctgtcatgagtagcctgagctccttttttgagagggtgggtcagtgttatgggtcctgtaggacttcagctacacctgggagaaattttggaagcttcagtaggaaagtgtagcttaaaattagcctatatttcccaggaagttgatacagcttatctccctctaccctgttgttgagcttgatctggtcattgccaccttcttcactgctactaccttgtagttcagtgttcttaaattgatggaagaggtccttcaaagttagaccatgtggtcattggctatccctgtgtgtttaagagtacatgtgcatggaattgtatttccagtatagttaatctagaaatttctaaccaacttggcagcatttcttggttgcttgctgtgaaaatgctaaaaaaatttgtttaaaaatttttgtgctgcagagtgtaataccaaatttggaaaccagatttttaaaaacagcatctatattaatatgataaatgcttttagttaaaatatcttattaattttttagaaaatttagaaagcatttaaaaactattggagacatttgcaactctgaaaattatttgtgtatttttaaaattaattatttaaaaaaattttaagacacagccttgctctgtcacccaggctggagtgcagtggcgccatcatagctcactgtaacttcaaactcctgggctcaagtgatcttcctgcctcagcctcacaagtagctaggaatacaggctcatgccattgtgcccagctaattttaaaaaattaaaaaaaaatttttgtaggaacggggtctcgctgtattgcccgggctagtcacaaactcctggcctcaagtgatctcccacctcagcctcctaaggggctggcattacaggtgtgagccaccattcctggccttactttggtatattttaaatgtatataaatccagtcagtgaatggatttgtaagagaattgtttaaagttgactggaattataacattttacatttcagacatgtcaaattcttttttaattctaagcatgacttaaggctttgtgtcctgttgtttatattctaattttgtgtttccttattttcaggccgaaatagaactatttgtgaacagacttgattcagtggaatcagttcttccttatgaatacacagcgtaagtttttcagcttggcttttatataaaattttatgtgactcatcagaattttgtacattgagaactttgttttctcacagttatggacaagcctgaaaatattttttaaggtgtactcttccaaggtgtggttaaaaatgtgatcttttttttaatgtttctttgtaatacaacagaagcactgactaaacaatggatttctttttttatctgactaaacaaaaagctattttgttttcttaacattttaaaattataaatagctccacatatttttaaacaaaatttttatgtcccacataatcagttcccagaaataactactttgatgtctacctccacattttttctctgaataaatagtctaatctatataatcacatttatacatttttgttttaaacagaagtagattcatagtatttatttttatttttatttttttgagacagagtctcactgtattgcccaggctcaagtacagtggcgcaatcttggcttgctgcaacctctgcctcccgcgttcaggcgaatctcctgcctcagcctcgcaagtagctgggattatagatgcatgccaccacgtctggctaagttttgtatttttggtagagatgggtttcaccatgttagccaggctggtctcaaactcctgggctcaaatgattcacccaccttggcctcccaaagtgatgggattacaggcgtgagccactgcacctggcccatactattatttttgattggcaccttgtttttctcattgaatacattgtgggcatctttccatgtcaatacatagctacctcactctttttagtagctgttattatttccattttagaaattgtatagattccatgtacacttactttcactagtttcctatttaccaacatttgattatttccaggttctttgtttgcttttgagacaaggtcttgctctgttgcccaggctggagtgcagtggcacgatcatggctcactgcagccacaacatcctgggcttaggtgatcctctcatctcagcctcctgaatagctgggactacaggcgtgtgcaaccatgcccagctaatttttttttttttttttttttttaattttttgtggtgatggagtaccactctgttgtccaggctgtccttaaactcttgggttcaagtgatccttacaccttggcctcccaaggtgctgggattacaggcatgagccattgtgcctggcccagttttttgatattgtgaaaaacgctgcatgaatatcctttattcatttgaccattgtataccatattgggtctaaaactgttgctaaaatttagtttaatttctcagctgtttaagagttttaaaagaaaatagtttgctgtagagaaaagtatacacaaaaaagttacgactatcctaaagaattcatatatctaagtatgtctaagaaaagaatacagaagacatgaatgggtagactataattcatctaattattggatacttaaatttttttccagtttttgttttgttaaacatctttaaatctttgtggatattcttaggaaaagtcagtggatctgtggagaatcttcatttgggaacttcccagccccagtttttttttttttttaatcaccagagacccaccttcctctttaggaatctcactaatctgttactattactgtactgatctcagatattccccatatcattccagagtgagcacagaactgccctttaattttctgtggcaaagctgaaattaagctgtaatgtttaaacagaactttattaaagttggttagtaatacaagggaattacaacacagggaatcttataggtgactgactacatcttctccacagcactcttcacagagggtctttttagccatgcttcacatattgggatgtgttggcaagtgtactgagatgagacaactgcaggtagacttgacatacattactgaaatgtcatttttaattaaagatttgaattagataatagcaaggagataagttatgcaaaatttgcttgaataataaggatctaaataattttattattggagtgaacaaaaatgaattataatgagtcaattaaaagatattgtaatatgcattctaataagagaatgttatttagaaaaaaatattcgaaggcataattttaggtgttttgtttttttatgaggagagatgtggtacataggacttggagtatggatagatttcttactcatctactagagctgctacaatgatcagtacctaatctgctctcaagattggctaggtgtttgatatttcatcgttcccttttatgtgtaaaaatttaaatattcttctcccaggtttgatttttgccaagcatcagaaggaaagcgcccatctgaaaatcttggtcaggtactattcggggaaagaattgaaccttcaccatataaggtttgtatttagtgttacataataattatttacttacagcttttgtttttgttatttaagaaaagcctgagataactcagctatcattgctaaggaggagttcatttctctttttcatctaggaataggttcttaaaatcaaagttagaaggatccttctccttctcacagtgtgtcattgataagtctgtcttaatgaacattcacgcaactaatgttaggaatgttaagacggtggcttaaagggcagggctcagatgctctgcctcctttacagagggtcctgaaacccgggtcctggaacccagcttccagtcatgagaggttgtctcagctgctctgtgtctctttccccctgttttccagcagtatctagagacactctccgttagcacgtacaatgctgcctgggctcccgcactgggatttttggaagctaatctttcttttttttttccagacagagtcttgctctgtcgcccaggctgcagtgtagtggtgagatctcagctcactgcaacctctgcctcccgggttcaagcaattctcgtgcctcagcttcccgagtagctgggactataggtgcatggcaccatgcccagccaactttttgtatttttagtagagatggggttccaacatattggtcaggctggtctcaaactcctgaactcaagtgatttgcccgcctcggcctcccaaagtgttgagattacagatttgagccagtatgcctagcctaacctttctattttgatgtatttggaacatctttggtacatttttcgaacaccagttaaaccaaactaagcacaatataaggtattcttttcaacatatgtacttcatcatctctcagaattcttttgcctttaaatctgttatcttttaagcctattatccttccacattgcataatccctgtttgttttgtatctgttctcctactgtacaaagaacaatggtcttttgcttttagaaacattaaagtagtttattataataatgtatcaccatataaaaaaattaaatgatgcaaaagaataaataataataaatgtgcagttccacttcacagtttgttattaaaatttcctgaaaattttcatacacctataagcttacattaaatagattagatttacttatttgttttaacatactatatgccacactttgcatttttcctttaactctctaccatgggcatctgtccacatgagaatgtgtgttctgatggctctaacttgactccaggtgttattccccagcccgacagcttcctctcctggcttcgcgtctctgctatgtcttagacctcatccatagccaccttccctgctttctcacgaggcacccccatctccctcgacattttattacatggagcacaacatttattatctgtccagcaaatcccgaagcctagattcatctcaccaaccgtcttactccctccagcacctgcacctacactgtgaagccctgggggaaaagaaacatcactgtgcaaatttaatccactacaagttgattggttttgactgtaaatatatcctcttcaaatattctttttttttcttttctttttttaagagatggagccttgctctgtcacccaggctggagtgacgtggcacaatcataggttactgcagcctcagactcctagtctcaagtgatcctcctgtctcactcccctgagtggctaggactacagatgcataccaccacatccagccaatttttaaattttttatagagacagggtctcactctgttgcccaggcttgtcctgaacttctggcttcaagcaatccttctgcctcagccttccaaagggttgggattatagacatagacgtgagccgccgtctgacgcctttcaaatactttttttttctttttcgagacagagtgtcactctattgctcaggctggagtgcagtggcaagatctcagctcactgtaacctccgcctcctgggttcaagtgattctcctgcctcagcctcccaagtagctggaattacaggcgtgtgtcactatgcccagctaatttttgtatttttcgtagagatggggttttgccaagttggccaagctagtctcaaactcttgacctcaggtgatctgcctgtctcgacctcacaaagtgctgagattacaggcatgagccaccatgcccggcccctttcaaatattctaatctgaaattgtctaccctaaaattgccagtaacttttaaagtttcctaaacacagtagattcaaaggcctaatgggatgaagtcattgaggaggaaggaactcaaagtgtatggacatgggtgccattgagcagggcaggcatgtaacttgcgaaacacctcttccctcttggggtatttggaagattactttgaatggtattgcattcttcttatagcagatgactgttttcaggcatgctttttaaattttacaatcttaaatattccagcagcctctcagccccatctctctacttatgtcttgcccttgagaaatgatgggtgggaagaatatcagtaatgcccttagtgaactgggaagacagcaggagtccctagcaggaaacagaaggaaacccagcaaaatactcaaacccatggggaggtgttgccctttggggcagactttgaaggcaggttactccccttagtaggatgtcattgggcacatttctgtttctgtgcaaggactgttccttgctcatacacaggaccctttttggggcctagtgcttttcagatttaatcctttgttgtagaagttgaggttaaatataataaaaggagagctttagaatggagaaattgtgtacccaacattttccctgagtcttctggaatgtttcaggatccatatctgtactaaaacaaattctctaagccccaaacttaaagggacagagcaggcacattttaaggccaaggtgtaagccagccataaatgtattgaccaacatttttcatttcactattgattctttattttcaaggatttttatctttatgtatgtatttatttatttcttttttgagtctcacgctgtggcctgggctgggccacggctcactgcagccttgaactcccaggctcaataaatcctctcacctcagcctcctgagtagctggaactacagatatgcccaccatgcccaggtaatttttttattttttggagagacagggtctcactatgttgcccaggctggtcttgaactcctgggctcaagcaatcctcctgccttagccacccaaagttctgggattataggtgtgaaccactacacccagctttatcttattttagatctgctgtaaaaactgaggtaacaaccagcaacaaaataaaatcccagtctgctttgtcgtcttttatatttgacttctgtttaggtcaggaaaacaacagtgcaagacattgtgtgtattatgtgaagctggaaccacatttcataggaccataaaatctcatctcagatctaagcactcatattcattcactcagttaacacatttgctcagtacctttcatgtgccaggcactgtgatgggatacagcagtgagcaaaacaaaaatctctgtcctcatggatcttttatgctgatggggaaaaggagacaaaataaattaccagaatatatgtttcaattactgaggaaagaactattgaaaataaatctgtgaaggtgtgtggggaatttctaattttaaataggcttactgcaaaggtggatttaaaatcttaaaaaagccttaccgagaaggtgacatttgagcagaagacctgaagcaagtaagggagtgagccatgtgaatatgtgggggaggtgttctagctgaagagaggccccaaggtgtgtaacttgagcaggtgagcaagatagagcatagtaggcagtgggcacagagaagtaacaggaccacattatagaatgactcagaggccactgtgaggattggcctttacatctgagcaagatggttagttaacactggagggttttgagtaggcttcgattttaccagggtcaccctggctgctgtactgagaatggaccgtgggggtgcgaggggagaagccaggagaccagtaggaggccttctccctcatctaaatatgatctgacttgggaagggtgagggggtggtgaagaggtcagaatctgtgaatctggctgtgttttgaaggtggccgacagaatttgccaagggatgggatgtggagtgtggagtttctattttctaagatggggcagtctgtgggaagagccaggttgggggatggggaagagttagttttggatgtggtaagtgagaggtgtttattaggtgtccaagcagagatgctgaataaacagccaaatatatgcttttggagtttggagaagggcttcatcctggatatacacagtatatatttgagaatcatcagtgtatagatggtatttacagccacagaattgaagagatccccaagggagtgggtatagatgaagaagacaagattcgaagaggcacaggactctccccatcctcctgacctataaaatcaggtgccccaagggctcctggtattgtatttttagtagaaacagggttttaccatgttggtcaggctggtctcgaactcctgaccttaagagatccgccccctctcagcctcccaaagtgctggaattacaggcgtgaggctcagacccttggggcacctggttttataggtcgggaggatggggagagtctagcaaaggacactgagaaggagccactgatgagaaagaagggtaacggagaatgtggtccccagaggccgaggcaagaaagtgtttctaggaggagggattggttgatttgtcactgatgggtcaggtgagataaggacagaggattgaccttgggtttagccttcaatgttgaggtcattgatgtgaaagcagccgtgatagaatagccaggtggagagagaatggaaagagcatttgcaggtggacacatctacaactgtcttgaggacttttattttactggcagtgagaaaaagagtggaaactggaggatggcgtggttcaaagaggactgtttgtttgtttgtttgtttgtttagagacagtcttactctgttgtccaggcttgagtgcagtgttgtgatctcagctcactgcaacctccacctccgaggctccagtgcttctcttgccttagcctcccgagcagctgggattacaggtgcctgccaccacacctagttaatttttgtatttttagtagggacagggctttgccatgttggccaggctggtctcaaactcccgaccttaggtgatctgcccaccttggcctcccaaagtgctgggaataagccaaggcacccgccccaaagaggacttatgatagattttttttttttttttttttgagacagagtcttgctctgtagcccaggctggagtgcagtggcgtgatctcggcttactgcaagctccacctgccgagttcacaccattctcctgcctcagcctcccaagtagctgggactataggcgcccgccactacgcccagcttattttttgtatttttagtagagatggggtttcactgtgttagccaggatgatctcgatctccggacctcgtgatctgcctgcctcggcctcccaaagtgctgggattacaggcgtgagccaccgcgcccggccaggaggacttgtgatagatctttaagcaaggtgtgtatgtggatgagtgtgatcagtagatacgggaaaagtgatgatttaggagagggaaggattgccgtgggtgtccttgctctggcaagaagggatgggacctagtgtactgttggagaggttggcctcagtgagctcgttcatccgtggtaactggagggaaggcagagacatggggcatgatgctgggaggtaaatgtggcaattgctcctgattcctcagtgaagtaggcagcatggccaccccacctgtgagtgaggagggaggcagcagccaagtaggatccaggagagctaatagagcaggagtgtggagcggctgctaggctgcatcagggaccctctggccagctggtggtttgaagtaacagcagccagcgtgcttaattgtgtatctccagctatttccagctgtgctgctgagttggatttaaccaggtttgtggttttaacaagtgaataccaaaaaagtgagagaagaacacaggatgtgaggacatctttggatgttatgaaagatggagatactgttgagcttggagtttgagcttgcacagggggcatgtgaggccacaaaaggagtaagagacagtgaaaagactgtaggatctgtcgatttaagtggagtccagggcttgttggaggtgatgaacatttgagccagtgagttggaacaacgggaggaggtggtttgacactgggaagcttgaaatggagataatggctgggactgctgtcattgataaaggcagggtggaatgcgaccagaggagggagtgctttgaaattggatgaagaccagagtcgctggaggagagggcagaggatcaaaaggtcattgttttggaaggatcgttgatatagatgtaatcaccaagaatcaggagcgaggaggagtgttgcagtgacagtgagccaggagctgagggccagtgacctggggttggtagatgacaagaacaggaaggagtaggggcggtgtggtctgatcacatgggagtcaaagctagaggtttctggaggagggagaatggtctggcccagcgctggggcctatgagagaaaacaggcaccaccagcaagactccagtgaggcagcatccgtcagggacagccaggttttcatcagaacaggctccagaaaacattctgagaagaggttgaggaactagagggtgttctgctggtgacacatgagtttcagggcatagtggaagggattaagcagttgaggggggatacattttgggattcatatgtgggaatggaaggatgacatggaaatcctggacttctggtggtgactaatattcagagggtagagggcataatgggattagtcctgcccattagtcctagtgggtagtagtccgttctgacgctgctgtgaagaaataccagaggctgggtaacttataaagaaaagtggtttaattgactcacagttccatatggctggggaggcctcaggaaaacaatcatggcagaaggggaggcaaccatgtccttcttcatgtggcggcagaaaagagaagtgcagagtgaatcggagaaagccccttataaaaccatcagatcttgtgagagctcactcactatcacaagaacagcgtggggtaccgccccccatgatctaatcacctcccacgaggtccctcccccaacacgtggggattacaattcagatcacaattggagataagatttgggtggggacactgagccaaaccacatcaatcctgatggtctcaggctgcatggaggagaagtcttgccagaagtgtgcagccttatatgatttccctcagatatggactttgatataatttttctgctatttgctaaaagctggtggtgagatacataacaataactgttatttagtgaatacctattttcatcagtcagcatgctaggtgttttgcacacacgtttctgtatttaatccaacaaccctgcaaggcagttactgcgcccattttacacataagttaactgaagctgaggcagggttacgcagctttccctggtctcctaacaagatggagttgactcgtacccaggtctgactctagattgatattttgattttcagaattattccaaggagaaggttaaatcctcactgaaataatttaggaaaaattataatcccacgttttcccgaatagaaacagaacagtgctgtgcttgcgtgttataaggaggatttgtttcccttgggagctaagaatatttaaaaatccttagcaaaacataaataaaatacaattccatccataaccaaacatgatttaaaatattataaaattcccaactaaacacatgacagggagaggctgcagggtgttgtgctgaagagcatgttctccggagctcaactcacttggctcagatcctggctatgccgatgctcagttgtgtgacttggtgctccagttttctcatctgtaaaagatgaataagggttgtttggaggattacatgaggcttgatatatacaaagtacatggaacataggaagcactaaacagatgttacctattactacattaatgtcaccttagtcttgctatttccttcacaattgaacacacaggttgactcacctaatgaagtgagcactggattgaggtgtcagatttgccattttggtgtaatattgtctctctgcttaacttattttaagtttggtgtctgtgcttctgatttcttagtgtgtatacttttttgtttttccattttccactttttaagaatgaatctttaaggttcatataaggtttaaaatatcaactagtggtacagatatggctgtattggaaatagcaatgcagacagaatgaaaacattggctgacaggtggcagcagtggactatgcttaaacattcacttagctgcttcactgcacctgctttagggatgttaataaatacatacatacaaaagagtgggctgcttagaagtgaaccatgccatttttttaatcaccttatgtaataaagtttgaatttattaaaagatggaattatggctggttgtatagctggtaaatttcagccttctggagtcatgtttagcctgattttagacatctgaatgtcacatgctctcttgttcactgctgaatctctatcacctgacacttaaggagggcacttaacatctgttgattatttgaacataaaaatttgtctgcttgttactagaaagccattaactccagaattcctaagacatgaccatgggatattactaggagagactaaagttccatttttgttctacatgggatttttttttctcttctagaacttatttacatttaaaaggtaagtcgattgaaattaccaaaaagaacgtatcaaaggaaaacttgatgacgagtctttagagaaacacagtaggattaaaatttaaatctgattgagctatgaggaatttaaaaatttatttattaccaatattaatgcacttaagtaatttaatgggaccagcacttttactctatttgtgatattggtatgaaaaacctggatattttttctgaatttgctttccacttccttttaatacagtttacgtttaataagaaggagacctgtaagcttgtttgtacaaaaacataccatacagagaaagctgaagacaaacaaaagttagaattcttgaaaaaaagcatgttattgaattatcaacatcactggtaaggcatgaatattttcgattttggggtttatcctttccatatgaaatctttgttgctttgactatataaattacttgattgtgtaaaatatagcaaattaattgatttccttttttttgttactagtggtcgtagcttgaagtagtgactcttagttaaagatgacaacatcatttaaagtatcatcttttaactgtgtttagattactgtaatatctggtacttcttttgatacatagatctggtacatagagtagttatttttattcacatacaggcataccttggggatactgaggttcagttccatgccactgcaataaagcaaataacacaataaagtgagtcacataaagtttttcttggtttcccagtgcatataaaagttatgtttatactacatatagtctattaagtgtgcaataacattatgtctaaaacaactctgtaagtaccttaattaaaaaatacattattgcttacaaaaaaaaaaaaggctgacacaaagacagaaagtgaacacatgctgttgaaaaaatggcactgatataggcatggtggctcacgcctgtaatcccagcacttgggaggctgaggcggttggatcacgaggtcaggagatcgagaccatcctggctaacacgatgaaaccccatctctactaaaaatacaaaaaattagccaggtgtggtgatgggctcctgtagtcccaactacttgggaggctgaggcaggagaatggcgtgaaccccagaggcggagcttgcagtgagctgagatcgtgccactgcactcccgcctgggcgacagagcaagactctgtctcaaaaataaaaaaaaaagaaagaatggcactgatagatttgcttaacgcaaggatgccacaaaccttcaatttctaaaaaacaccatatctgcaaagcacaataaagtgaagtgcaataaaacgaagtatgcctgaatagttaacagtagcatattatgctttggggaaaaggacctgggtcagtcttctagtgaaaacattgttttatacttgtgggctatgaaaaaaatcacaggaaaacaaaacttaacttttgtttgataaatagcatcaacttcaaataaaacgcttacattttgcttagcctttcattttgtaaacatgacataacattaacaaattctgtaccagtttgtatcagaatcaaaaagtatttaaaactgtcctgtttttccttccaaagtagtatatacttattatacaatattcaaacatagaattttttttttttttctgagatggagtctctcactgttccccagactggagtgctgtggcgtgatctcggctcactgcaacctccgtctcctggggtcaagtgattcttgcattttagccgcctgagtagctgggattacatgtgcccgccaccacacctggctaatttttatagttttagtagacacggggttttaccatgttggccaggctggtctcgaactcctgaccttaagagatccgcccctctcagcctcccaaagtgctggaattataggtgtgagccactgcgcccggtcaaacatagaatatttttaaagactttcaaaatccaacatttgaagtataaccattgctattcttctgagtaattttgcttggaaatgcctatattctgtggggatcatagtttacatatgttttgccttttctagaaagtgtaagatgctttcagtggcgaacaggaggactgtgttcatgcacttccttttggatatttgtcctgtcagtatattagatcacattgtttgctcacgccaataaggttaggaaccgtggatctcagctgagacctgaccagatcctgtggcctcgcattccctcctaccccttagttttcctcctcctccaccccacccaacccccatatgcatagaaccctgggttgctgagtcctgtgcacagccatgagctagtttgtgatgggaaggattcattctgactgaccagacctgggtaacatctacctgaaccccataagaatgggttctgtgtaggctagtggggctctgttggaaggagggagatggtgctgttagaaacctgcctgttatgcttgtgtcagcttctttgtcatctgaccctcagtgcaaataggaactttaaagactcctttgtctccccatttctttcatttctggtaaacgaagagcttgtttcccctaaactaccatagaaatactgcttatttgctagatcaatgcatatcaattgcatatcaacctgggatatgtttacttattgttaagtaattgaaatttccttgttgtttttctttgtaatcttcaaaataatatttaagcctcagttcttatcttctcatattagccctatccacctgcgtttactgcaatagctatcagtttgttgactaactgaaagaatgactgttaaggtctgtggatgattttttttttttctttttttttgagacggaatctcgttctgtcacccaggctggagtgcagtggcgcaatctcggctcactgcaagctccgcctcccgggtccacgccattctcctgcctcagcctcccgagtagctgggactacaggcgcccgccaccatgccggctaattttttgtatttttagtagagacggggtttcactgtgttagccaggatggtctcgatctcctgacctcgtgatccgcccgcctctgcctcccaaagtgctgggattacaagtgtgagccaccgcgcccggccttgtgggtgattttttagctctttcttctaccctctgtgcttagaatactgtttagtcagcccggcaccgtggctcatgcctataatcccagcattttgggaggccaaggcaggcagatcacctgaggccaggagttcgagaccagcctggccaacatggcgaaaccccatctctactaaaaatacaaaaattagccaggtgtggtggcaggcgcctgtaatcccagctactcgggaggctgaggcaggagaattgcttgaaccaaagaatactgtttagtcttgctcctgaaggtagtagaagcagttcttcagtagcctcctgacaggaaagtacttagagatatttttaactaatttatgatgcagttaacaaagatttcattataatgccaagatgcttaataacaagaaagaataaatacagtagtgtacaaactaagcaagcatcagacagtaaaatttactgaatgatttgtaatcagcatatcaattgcaaacttcaactattctgctttaaaaaaattacctgagaaagtgctggtaaataatgattttgcagttgaatcagaaaagttgatgattttaagtgtaacccttaaatcagttcagtatacatttggaaaatgttgattcacattgatgaatttattgaaaccattatttgagtatattctgtccatgacctatttcagagagattttactgtataacttgattttaagcatagacagtagagttgacacataaaataccatgtacccatgggaatttacagtattctgttagggagtttgtgaatatagcacattttattttatactttgcactaagacatactagggagagcataatcattttctaaatcataaagcaatacatgccgatgagaaaacacaagcagtacaagaaaatattaagtaaaagtaagtcttctgtcagtctcagcctcatttctattctacagaactaacactattatttctcatgtgtgtttctatatttactatgcatatggaggtatagaaaagggtgtgtccctttttaaaataatgcaactaaaatattgtacacgttattctgcaacttgctcattttatttaagaaaatattatggacttttttcaggtcaagtaacattgtaaatctataacctcctccgtcttttccataatttcataattcactgcatgaatcaatcataatttctcacccatgacattggaaccgtgctgtagtttattattctcactataaagaacagttaataatagtttcttatataaattgacgaatactttttatttttttatttgttgttgttgttgagacagagtctcgctctgtctcccaggctggagtgcagtggcacagtctcgactcactgcaacctcagcctcctgggttcaagtgattctcctgcctctgcctccacctccgcctcctgagtagctgggactgcaggtgcccgccaccacgcctggctaatttttgtatttttagtagagacgggatttcactatgttggccaggctgctctcgaactcctgacctcttgatctacccaccttggcctcccaaagtgctgggattacaggcgcgagccaccgctcctggccatactttttattcttatttggggctttagcacataatttgaggatctttttggcttactctgtcagtagctgctaagctattttgtgattcctgaaactattgctttgataccagcactggacacttaaaactctcttcagctgtgct

SEQ ID NO: 135 - DNA, 14773 bp, Homo sapiens
  source 1..14773: mol_type = other DNA
gttactgagcctggcccgacgcacgggccaatcccctcgccctacaccttggctggaacctgagacggattcgctcccaaatgatgctccagtggcaggagcaactcaagttcatcattgtcctgagagagaggagcagcgcggttctcggccgggacagcagaacgccaggggaccctcacctgggcgcgccggggcacgggctttgattgtcctggggtcgcggagacccgcgcgcctgccctgcacgccgggcggcaacctttgcagtcgcgttggctgctgcgatcggccggcgggtccctgccgaaggctcggctgcttctgtccacctcttacacttcttcatttatcggtggatcatttcgagagtccgtcttgtaaatgtttggcactttgctactttattgcttctttctggcgacagttccagcactcgccgagaccggcggagaaaggcagctgagcccggagaagagcgaaatatggggacccgggctaaaagcagacgtcgtccttcccgcccgctatttctatattcaggcagtggatacatcagggaataagtaagtcgagaaacggctccttacctattttggatggcggttaaatctgtttctccctttaagatttttctttccaagaactcgtttctccacagcagtttatattccaggatatttggttacccatttttctctgtagctgtagaaattgttccgaattataatatatgcaatataatgtattgtatataacatataaaataatctcctagcaattttgattcagattcccacattatcagggcaagacaaagtccctccactttgctggaaatactgtttctaactacttttcgcataagctattataagggatttaaacctagttgttagagacttgatgggcttcatctttctctggtgcggccctcaattttcaaggagacatctgcaggtaagcatgttttgaaactgaaaaagaaaaatgaagtactatttgaaacttcagagttcggaaggaaagtatcgaagtattaatctcctatatgattgtaacaaatattttgttccaatgaatttaatactttaacatcatacttaaaacttatttttataattcctatacttctgaaatgattgtctctattattggtggatgctgactgtgtgtatttcatacagaaaaaaatactggaataaaaggttgtcaagtaaaaggcaggttgtaaattttgttatttggcaaaagatgatacactacctactactttgcttttgcccatggctgagcgtgagttttttttttttaagacagggtttcacttcctagcctagtctggagtgcagtggtgcaatcacagctcactgtaccctcaacctcccaggctgaagctatcctcccacctcagcctccctagtagttgggactacaggcgtgtgccacctcgcctggctatttgttttttattattattattattatttgtagagacaggatctcaccttgttgcccaggctgatctcgaactcctggcctcaagcagtcttccctccttggcctcccaagatgttgagatagtaggcatgggccacagtgccaggcctgagcgtgatttataatactgatattgtaaagattcattggcagagatttttcaaaataagatcattatctttgggagcatcatttgatcacaaatatccagatgtgatagcatgaaataagttagtaagaatatttttccatatggaatgcatgagtatgttctgtgcttatatagattaatagtcttaacatactccattgtgactgtttaatgaaactgtttcatgttatcttggccattgtcatcctcatttttttaaatctctgatccatcatattcattctggtactaaaagcataagagaagaagaagcaatcatatgttagaggaagaatgtggaggagaataatcaagtttccagactgaagagcataacctttgtgtgtttgttcgttaaaatctgtttatctcccccattgccttttcatcacagattcacatcttctccaggcgaaaaggtcttccaggtgaaagtctcagcaccagaggagcaattcactagagttggagtccaggttttagaccgaaaagatgggtccttcatagtaagatacagaatgtatgcaagctacaaaaatctgaaggtggaaattaaattccaagggcaacatgtggccaaatccccatatattttaaaaggtaatttggaatataattttataacagcagtatttgaataaaataatatatgttattccatcaacaaaaacaacttggcatgatatatatatatatatatatatttttttttttttttttactgaaagaagaaaaataaaggctttctacttgaaagctaagttatgagtcctggtaaaaagacattcaagatttgaacggaaattctgatttgctaaagagcaaggaacatattagtagagaatttactccgcgaagacatacattagcaagaataatcaagctgtgttcatgctcatatatgatactttcttaattggaaatatatgacttaagtaactgataagtgttattgaaattaggtagatcacttcaggaagggagatagctcgaaagacaaggagcgcactggtggttgtttttttgtctttgttccaatgccattttcccagagaaattctctgacatttatttatttatttatttatttatttttttttttttttttttgaggcagagtctcgctctgtcacaaggctggagtgcaatggcgcagtcttggctcactgcaagctccgccttccgggttcaagcgattatcctgccttagcctcccatgtagctgggattacaggcacgcaccaccatgccaggctaatttttgtatttttagtagagacaggatttcaccatgttgaccaggatggtttcgatctcttgacctcatgatctgcctgcctcagtctcccaaagtgctgggattacaggtgtgagccaccatgctcggccattctgatgtttcttatataggatgagagtacagttttattacctagagccatctccttccctcttacaggcgacagtaccacaagacagtagggaagcagtgtatatacaaaggcagaaatcttgtcccccccttaacaaccccaagaaaagtaaacttttttttttttatttttgtgaactctgcagagaagtaagaaaaggtaaacacttttcaagagtgtctaggttcctttcctacattctgccagtacagcctggtacagtatcacccactaaaccttaaaaagatattccattgtcagccactgcctgggttaggtgggatctgagaattataaaaaggaataacagtaaaaacctcagtgcagactgtaattaatttgttataaaattagtgaagtggactgttttgagaattacttttgcttctttttgttgccgttgttgttgagacagggtctcgctctgttgcccaggctggagtgcagtggtgcaatcactgcttactgcagcctcgacctcctgggttcaagcaatcctcccacctcagctgcatgagtagctgggactacaggcactcaccaccatgccccactaatttttgtattttttgtagaaacagggttttgccatgttgctcagactggtcccgaaccctggagctcaagtgatctgcccacctcagtctcccaaagtgctaggattacaggcgtgagccactgtacccagctacttttgcttttttttttttttttttttttgagacgatgtctcgctctgtcactagcctagagtgcagtggtgcaatctcggctcactgcaagctctgcctcccgggttcaagcgattctgctgcctcagccacccaaatagctgagactacagggacgcgccacaacacctggctaatttttgtatttttagtagagacggggtttcaccatgttgaccaggatggtctcgatctcctgacctcgtgatccgcccgcctcagcctcccaaagtgctgggattacaggcatgagccaagaacccagcctacttttcctccttaataattcttaaaaaaaaaaaaaaaaagaatagcagttccttgtttatttttgctgttattgatgatttacttattgagaaaagtaccttagacactttaagaacctgtttgtataacagaccatcaaaatagtaaatcatatcacttttgtctttcattaaaataggtatgctcctctgatacccttttaccagtatttggttattcttcagtctgcaaaacataaggaataatgagctgtaatattaccatagacataaaccaagtatctgttgtctttcttttattttttgaaacaagagtctcactctgtcccccaagctggagcacagtggcacaatctccgctcactgcaaccttcacctcccagattcaagctattgtcatgcctcagcctcctgagtagctgagatttcaggcacacaccaccatacccagctaaacttttttgtatttttagtagagatggggtttcaacatgttggccaggctggtctcaaactcctgacctcaagttatccacccacctcagcctcccaaagtgctggtattacagacgtgagccactgcacccagcctctatttcctttcttttgaactcatgcaaagtagaccttattattatgaaaatatcacaaaacttcactgtgaagagctgtcagagtagaaggctgacttacttgcaatgccccagtatagtaaaaatgtattactttttttttctttgaaacgggctctcactgtcttgcccaggatggagtggcgcaaacatggctcactgcagcttcaacctcctgggctcaagtgatcctcccacgtcagcctcccaagtagctgaaaccacaggtgcatgccaacgcacccagctaattttttattttttgtagagacatggtctccctgtgttgcccaggctgctcccgaactcctgggctcaggctgtcttcctgcctcagcctcccaaagtgctgggattaccgacatgagccaaccttgctggcctgtaattctcttaaaatgtgttttcaatgaaaatgctcttcctatgtaactaagcaaaattcatgaagccacattatagatgtttattacaagtttcgaatgctgagtgaaatgatcactgttgtactttgttattcttatgtaaatagggccggtttaccatgagaactgtgactgtcctctgcaagatagtgcagcctggctacgggagatgaactgccctgaaaccattgctcagattcagagagatctggcacatttccctgctgtggatccagaaaagattgcagtagaaatcccaaaaagatttggacagaggcagagcctatgtcactacaccttaaaggataacaaggtacaacacatgattttttgcttgtttgttttagtgattttttttcttgttttgaacatttggctacaattagctaaatcattttataaacatcattcgaatgagcactgtgacaagcttttcctcagtgaagtctgccagcgtctttagactaacataataaatggtaaattctcttttaggtttatatcaagactcatggtgaacatgtaggttttagaattttcatggatgccatactactttctttgactagaaaggtaagtatatattttctcttagctgtaatagataatttaagcccagattttacaggataatttttcaaaatacaaattatacactatcagggtattctcttctggagccttatgataatactattctgaagctttctgttatttcaggtacctgcgtttgtttcctagggctgccgtaacaaagtgctacaaactggaagccttaaaataacagaaatgtattctctggcagttatggaggccagatgtccaaaatcaaagtgtcagctaggtgccatggctcacgcctgtaatcctagcactttaggaggtcaaagcgggtggatcacttgagcccaggagcttgagaccaggctgggcaacatggtgaagacctgtctctacaaaaaatacaaaaattagcctgtagtagtttcagctaatggggagctgaggcaggaagatcgcttgaacctaggaggtcgaggctgcatgagccgagatcacgccactgcactcccaaggcctgggtgacaagagtgagatcctgtccccccccaaaaaaaattaaagtgtcaggaggccagctccctctgagatgatcctttcctttcctttcctgcctcttcctggctgctgtcagtggccctccatctttggtgttccttggtttgcagctgcatcctcccatctctgcctctgtcatcacgtgggcttctcccctcatgtctctgggtctcttcttataaggacacagcatagtggattaatggcccagcctactccagtatgacctcatgctaactaatatctgcaacaaccctatttccaaataaggtcattctgagacactgggatttaagacttcagcatatcttttgcagggacacaatattttatagaggaaagaaaaatgccttatcataaaattattttggtactaaactaactctgagtccaaagatgacttgccttgtactgaatcccattccttgggataatgggcttttgttgggttctagtggaatggtttgaaagtaatgttaaaatggtggatgtgaaagactctaccaacatttttaccaaatgtatatttatttgtaatctattatatttatttgttgaataatttgcatgtatatcttgattaaactactcatggaaaatcataatgcctttttttcaagatttcaaagcacttacagtctgttaattctgaatgtaggtagttatatagcatcaatattaagcctcctttaaactaagacatcagagtaccgtcatacttctcttgctcctctttgtcaatccatgggaaaatgagaatgttcttcaggacttcggtttctcaagatgcttctcagactggtcagtgcttttctggccttaaaaatgtatatctgttgttttgtaaatactctaaacattttctgtgactagataaaacatatcctctttacatattcatgccatttgccagtagaggaaggaagcatagcttgaaacttactacgttgctgttggtgttgggcttcctgagttcaaatcctggtcccaccacctacctggtgtatgttttttaaaatggaaccatctggctcactagcaggaaactagggttagagtcccaagtgctattttttaaattattttccaataattctccttctctttgatcatcttagaggctgttcgcagtattagaacagagattacttttgcagtttcatccctttcatagggagcatagaatacttatacatgtgaccatattctgaaacattgcccactattcaaaccaaggtaattattattacctgaaacatgtaacattggcctttcattaatgcaatttcaaatttaaattgataaatacaatgtattatccaatgcaggaaatgtgaataagctcctcgttttgttttttctaggtgaagatgccagatgtggagctctttgttaatttgggagactggcctttggaaaaaaagaaatccaattcaaacatccatccgatcttttcctggtgtggctccacagattccaaggatatcgtgatgcctacgtacgatttgactgattctgttctggaaaccatgggccggtgagagataagtcagggttggcccagagccttggttttctttctttggtgagttcttttgcaacaacctttgtgatatgatgatttgggaggaaaatctgttgcactttgtcttctagggtaagtctggatatgatgtccgtgcaagctaacacgggtcctccctgggaaagcaaaaattccactgccgtctggagagggcgagacagccgcaaagagagactcgagctggttaaactcagtagaaaacacccagaactcatagacgctgctttcaccaactttttcttctttaaacacgatgaaaacctgtatggtcccattgtgaaacatatttcattttttgatttcttcaaggtatgacttaatcagtagctaatcttttttgtttttctaatgtatttgtacatagtgctttgggaagggaaattaaggcctgcaaatttcaagaggtgggagaagttagcacaaaattgagcgaatattgagacatgggggtgctggggactgttttggcaaccagggtctgccctcactgcccagtcttgatattaaatgcgcatcaagggagtttggagcctggatagagctataatttttttccagctaacccttgagataagcacatgtcacctccaaatatgtttttattaatacttacatgtaagtcattttacaaatactttttcccagagccatgttatcacaacagaataaggaagatataaactacttgtttcttaccaggccttctggtggggaatgacgtgaaactcatccaaatgttctgtctgggaattagggtttgctttctctgtctagaatgtggattccgcatggttcctggggagtagtcctttttctaacaactccttttataaggcagtgggcaccaccctgctctttagaccatggagttgtttctgaagtcccccatggtagagagagaggtgggaaaaaggtcatcatctgtcctctgtatgtgggaagacaagtgattaacgagttctgtctgccctgtagatgaccaaattttcttttgatgggttttgttgaggcaggttgacctaaatgttaaccttgttcaatgttaaagttgaattgtcagtatttttctatatgcatatcccaaagatttttgaaagaaatgattataaccaaagtgaaaggatactagccaaccttcctcagtggaggggtgctccatcctgccttggctttattcctgcctgttgaattttctgcaactaaagatgatagattaccacagttctatgaatatttttattcataggtgttcttgctccagagcttgctaatttctttaagacatatgtctgggtgtttaaaaaatacggttagccaggcgtgatggctcacgcctgtaatcctagcactttgggaggctgaggcaggcagatcacctgagttccagggttcgagaccagcctggccaacatggtgaaaccgcatctctactaaaaatacaaaaattagctgggcgtggtggtgcgtgcctctaatgccagcgactggggatgctgaggcacaagaatcacttgatcccaggaggtggaagttgcagtgagctgagatcacgccactacactccagcctgagtgacagagcaagactctgtctcaaaataaatacataaataatacggttaacatggctcagaatatgccatcattaggggcacatttgcaatcaataaagtagcaggagaattacaaaaagtcacaaatgaatccatccttccttatgttgcagccttaggacagcagtatgattgtattcgctgcttcaacactagatttgtatcctttgtaaaattgagaagcacatcaaaatgagcatttagctctagatcaacctgttgtttaataacacttactaaacggcaaaggcagagcgtggaagctgaccaaattgtgtctgaggattgcaaaggtttatgtgtgggatgggaaggagaatagagtggagaaaaggagatttaatagaggttcttagactttaccattgttttgcagcataagtatcaaataaatatcgatggcactgtagcagcttatcgcctgccatatttgctagttggtgacagtgttgtgctgaagcaggattccatctactatgaacatttttacaatgagctgcagccctggaaacactacattccagttaagagcaacctgagcgatctgctagaaaaacttaaatgggcgaaagatcacgatgaagaggtaaggttagtccccttgaaggcttatttccacttgtttcccaatatcatgggtccttttgaaatgtattgtacctggagagcatccaggatgttcacgtaatagactttggcctgtaaatgggaagctgcctgcccatagatggcacggcagttcccctaggctgaacacagcgggcactgcatcttacattaactctccactctgcatgtgaaacaaaaagctaggctgggtgcggtggctcgtgcctgtaatcccagcactttggaaggctgaggcaggcagatcacctgaggtcaggagttcaagaccagcctggctaacatggtcaaaccccatctctactaaaaatacaaaaataagctggcgtggtgatgggtgcctgtaatcccagctactggggaggctgaggcaggagaatcacttgaacctgggaggcggaggttgcagtgagccgagaccacaccattgcactccagcctgggcaacaagagcaaaactccgtctcaaacaacaacaacaaacaacaacaacaacaacaaaaagctaaactgtggccttgattacactttctctttcaagtagcgttgctctgagccacaagcattgcctccgctagcaatgtgaaaattgtaagatggccagtctggcagaagtcactaacaggctccaggttaaaatgagggattgattcagaagtagatgcagccataaatacagaaataaagagggatggaatgcaataaactttaagctaattgtctcctgaaatttgtgaaggcagctggctaagcttcatcttgcgtttacaaagtcatcagtttgcttggtgtacaaccttgtctctccaggagaggcttagttctagaaggtccaatatgacttttcaaacttttaagtcttagaaacctccctctgatttaaacaaacatactctgttaaatgttctgttttaccatgagactacccccaaagatattatttcccacagttgccccaatgtatacatactctgaagagcagtttgcagatgcctgcatgggaaaaatggattctattacaggattttgtcgttgttcttcctgtaggccaaaaagatagcaaaagcaggacaagaatttgcaagaaataatctcatgggcgatgacatattctgttattatttcaaacttttccaggtcagtattttccaagaaaatcatcacgtaacttataagtagacatgttaagaacaaataatattttacttaacaatttctaaacatatgttactatagggagatatatatacttctgtggatgaaaatcagagacaaatattaagtaatcataaaaaaatagttgaaaaccaaagattagctaatggaaaatgttacaatattaagcgaaaactattaatattagaactatgtgatgtctgactaagaaattggcctctgatcctacaaagttacagtgcatggatttgtatgttctctttgtgttacattgctgctgccttaccatttctttgtctaaacagtgccaggtgtgtttgggcctcttgtcttgactctgtatgagccatgacttcccttggaaattatttccatggacctaagcatttagagattgtaatcaagcatatccgacgatttaaaggactcttttaaaaatgtggtagtaggccgggtgcggtggctcacacctgtaatcccagcactttgggaggctgaggcagacagatcacctgaggtgaggagtttgataccagcctggccaacatggtgaaaccccgtctctactaaaaatacaaaaattagccgggtgtggtggtgcacacctataatcccagctattcgggaggctgaggcaggagaatcacttgaacccgggaggtggaagttacagtgagccgagatcgtacccctgcactccagcctgggtgacaagagtgagattctgtctcaaaaaaataaacaaacaaaaaaaaaaaaacaaaatcaggtagtaaacaagttcttggctaataacagtactagatctagagtaagagttttatctcacagttgcagatactgagccccatatctgaggctctgctacagatcaaagttggtgtatttctggcctgtactggctcctcccgattttgtaaccttcccttgatagagggaagcagaggacaaaccgtgtaaaatgaataaactggggggatttaccatgtgaatttctaaggatccatggggcagtgttcattcatttagcataggtacttagcacagtgcttcactcagagtaagcacatgataaatgaagatgatgatggaggcttgtgcaagccatgataaggaaagcagaatagtctctgtcttcacattctcagtctagggaagattgtgtgcaaaattatttttactgtgaggcagaagacggttaaaaaaaaaagtcatggaaatttaggatagcataaagaggtgtctgttaggaataggcagccagtgttcaaaggatggcctcctctcagatgctctactgttgatgttcagaactggtatatatgacggactatgcagatcacagtttgacacacatgagttaaatgaatcatagtcttcatatattctagcctctctcattgggtggatataaagtgttttataaggaatgcttttatattgttgcttaaacaggaatatgccaatttacaagtgagtgagccccaaatccgagagggcatgaaaagggtagaaccacagactgaggacgacctcttcccttgtacttgccataggaaaaaggtaaccagaactgagcttatggccggtgtcagagtaaaaactaacattgatccaaacttgcttttattcctatagtcattcaatcaggcagcaaatatttgagttcctctcgaggtctccaagcaattcagtctgccagagagataggtataaaagatagcagtgctcaagaaaggatgctacaatgcagttaattgagaagacatggtagctccctggcaaagtggggggaagtcttttataatgtgagaatccagctcacaccctatttgaatggatgcttacagtctgaaaaatattttcatgtgtatcatctgatgccctcatctcctcatgagataagtttggcaaagttcatcatcccagtttagagaaggaaaaatatgtaaccacgattattaatgttttccaattcttcatttgaaagtcatctcagttgataccactacataaggatctcattgataaaaatgaaagtcagattcacatctggacttttaaggtagaaaggaccttagaagtcatccagtaaatgccttcattttatggttaacaaaactgagcccaaaaaggaattgtgctcaaaatcatctagctggattatagcaaagcaaaaaccaatctctcatcatcagattgtgattgtgtgtgcttgtatataaagctatagtgtggcaggggactgttgctttgattatgatttttgtttgtttgaaggaatgtaaattgcataaactagagtgtgtgtgtgtgtgtgtgtgtgtgtgtgtgtgtgtgtgtaacatatgctgacttaacattttaggcaacataattaggtttctgaatggacaagttcaaaattgtggtattataaccaaagacaagaaggcagatttggcaattattatgtctacctctcaaggaggtgtaaaaggaattaaggtgaggctggccccagtgatgtgacagaaccagcttatatgagctcactgataaatattcaggaattttgcatactagttaaatttttggtagcttggaatcatcctgataggagtatttacaccatgacaatcagcacatgctacaaatcagaattttggctgttttatttttgtctttgttttttatagaactcattaaccactaaccaactggccctcagaggtggttcgtcatcattgtgaactctgtcagtgctccaaggccataaaaatcagttaaaaccaatgataaaacaagaattgccaaatcgaaaggttccccctcaccaatccgtgatttggtatcagaacacttctcactttggctctaagtgagactggcagcttccttgctccactcctgctcagttatttatcttcatctacgtgattgagaggaggtacccagccagtttcttccactgagtagtagaagttaggggccagaatgatagcttcgtttattttttgctcattgtctatcctagtctttcaccactactgttcataacatgaggcctttacagtagtacagcccatggatgtttgggttccttatcagtaggctatgaaacacaatgtgattttacccttagctgactctgggcctctggaaatagtcccaagccctaaaagcctctagcagcagcttggctccctctcatctttacaggaaaataattaacgaatgtaagtcttcttcacttgtgtaagacttcttgatagctctaaatattttgcttcttaattgcagaccaaagatgaactctgatatgcaaaataacttctattagaataatggtgctctgaagactcttcttaactaaaaagaagaatttttttaagtattaattccatggacaatataaaatctgtgtgattgtttgcagtatgaagacacatttctacttatgcagtattctcatgactgtactttaaagtacatttttagaattttataataaaaccacctttattttaaagg

SEQ ID NO: 136 - DNA, 14290 bp, Homo sapiens
  source 1..14290: mol_type = other DNA
ggttgatgacgtcagcgttcgaattccatggcggcgcggcggcgacggagcaccggcggcggcagggcgagaggttcggagctcaatatcgcgggacggcatgcggggggcgggcagtcagaaaggaacgatgccacctactgtgacccccttccccttccagctccctataacctgcacttggctaccaaaccagttggggtgctaaattttgtaaatttcggttttcagagctttggggattacataattgtgcataaagccttgcggagctgtaacaactaatgtgccagtactgttgttaatacctaatgtcatccaatttacaaaaagtaattgtaaggcacaccattattttatacacaacaaaggataagcactgaaaatggtgaactgtgattcactgcttatgtcatccattgtaagatgcatcccagttccagagagtaaaatgcgagtcttagacctattgagatacggtattatgtgtataatgttcttaaatgcataggtgcaccctataaattaggttctattgtacttctctagaagtacagtattgtacaatattctaatattggagtaagtgaagtaggaagagatcaaatacttctccaagtttccacagagaaaagcagcagagctaggctctaaattaggcacagacccttgagcacttaactaacctttatcccatacggcctcatgtatgaggtgggtatttgggggacattgggacacaagtaaaacagataagcaggcctcaatctatgagcttacaagactcctgggactcccttttattttgttttatttcatttggctagaatagcaatttaggaagaattacacagactgttacacaaaagtagtgtgggacagttgttattgcctctgtaaacttagaaaattatcttaaaccggcggggtgaggtggctcacgcctgtaatcccttgggaggccgaggagggcagatcacttgaggtcacgagttcgagaccagcctggccaacatggtgaaaccctgtctctactaaaaatacaaaaattaactgggcatggtggtgcacgcctgtaatcccagctactcaggaggctgaggcacgagaatcacttgaacccaggaggcggaggttgcagtgagccaagatcgcaccactgcagtccagcctgggcgagagagtgagactccacctcaaaacaaaaaaagagagaaaattatcttaaaccatttctttaaaagatttttttcaatctttaaaatctacacgtattcgggtgtgtactcattctttgctaatttccaaattctgtagcattaaatgaaagcaaaagagttaataatggcaacacggctccagaagactcttcccctgccaagaaaactcgtagatgccagagacaggagtcgaaaaagatgcctgtggctggaggaaaagctaataaggacaggacagaagacaagcaagatggtatgccaggaaggtcatgggccagcaaaagggtctctggtaggagtggatctggggatgatatcttgttatttcaactcctatttcgtccttctttcagggaataattaatttctctatcctttgggcataccacagcactaatctactgccttgaatcttcattttcatgtatttgagatggattggggtctaaggaaagaccaggattggttgggcgggcaaagttaatcctgacaagtttctgttttaccacaacagctgtttttgattcccataaagtagtacctatctgtctttcctcagaatctgtgaaggccttgctgttaaagggcaaagctcctgtggacccagagtgtacagccaaggtggggaaggtaagagactctggaaccgatcttcagtccatggatatctcagagagcatcctttgttataaggactcctgtctgggatgctgttagtactcattttaggaatcctctccaaaatatgatgagtgagtagttttctctaatggcaagagataggagtggtagggcttggggttaataatcagggtgttttttaacatggtgtgttagaccattcttgcattgctgtaaagaaatacctgagactaggtattttataagaaaagaggttcctagaggctgtacaggaagcatagcagtatctgctcctcaggagaccttaggaaacttttactcatggcagaaggtgaagcgggaataggcacgtcacatggcaaaagcaggggagagagagagagacagagagaaagggagagagagagattggagaaggtgtcacagagagagaaagagagaatggggaggtgtcacacgcttttaaactaccaaatcttgtgtgaattcactcactatcaagaggacagcagcaagacagtggtgctaaaccattcatgagaaatccacttccatgattgaatcacttcccaccaggccccacctccagtactgaggattacaattcagcatgagatttggaaggagacaaatatacaaactatatcacatgcgtaccttttgtggttgccatcagccttctacacctcattctctttttaaaccagaaaatggtatcattgttaagggaaaactgttttcttgttctaatgagaaactgtaccctggaatggcatgagttactgatgaatggggaaaaaagaaggctacctctggaataagttttctttaactcagttagaatcttttttttttttttttttttttttgagatagagtctcactcggtcacccaggctggagtgcagtggtgtgatctcagctcactgcatcctccacttcctaggttcaagtaattctcttgcctcagcctcccaagtagctgtgattacaggtgcccaccaccacgcccagcctgggctaatttttatatttttagtagagacggggcttcaccatgttggccaagctggtctcgaatgcctgacctcaagtgatctgcccaccttagcctcccgaaatgctgggattgcaggcatgagccaccatgcgcagcctaactcagaatcttttgtatagttaaaaaaaaggaagcatgttttcatttatagtaaggttacacccaggttactggtagaacataggtttgcaattctttccttgggagatgaatgttgatgttgctgtagaatgatgacttgagccataagaaaatttagagcctcatttaggatgtcagggctgaacctatactaatgttgattttttctctctctccctttctaggctcatgtgtattgtgaaggaaatgatgtctatgatgtcatgctaaatcaggtaagaggcaagaagaggtggcaccattatatttatgagaccatcttcttgataattattgatgatagcatcacagtgttcagatctttaaagtcccttttttttttttttttaaattttgttttttctttttgaaatggagtctcacttcatctctcaggctggaatacagtggcacaatctcggcttactgtaacctctgcctcccaggttcaagcaattctcctgcctcagcctcccaagtagctggggttacaggcgtgcaccaccactcccagctaattttttgtatttttagtagagacaaggtttcgccacgttagccagggtctggtctcgaactcgtgacttcaagtgatccacccacctcagcctcccaaaatgctgggattaccaggtgtaagccaccacgccttgcctaaagtccttcatatgtgtgtgtgtatatatatatatatatatatatatatatatatatatatatatttttttttttttttttttttttttttttttttttgagacagagtcttgctctgtcacccaggctggaatgcagtggtgcaatctcggctcactgcaatctctgcctcctgggttcaagcaattctccagcctcagcctcccaagtagctgggactacaggtgcagtgtctggctaattttttggtatttttagtagagatggggtttcaccatgttggccaggctggtcttgaacccctgacctcaggtgatccacccacctcaccctcccaaagtgttggtattacaggcatgagccactgcgcccggcaagtcctttatattaatattagccattagtggttaaacacctgagtactcagccctagcacactcttatcagatagcagagtcctctgtgagaagatttttttttgcaaatttcatatcatttattgaaattgttaactctctgttcatatccttttgcacattttttttttttttttaaacagacaggatcttgttctgtcacccaggctggagtgcagtttgtacagtcatagcccactgcaaccttgaacttctgggctccagcaatcctcccacctaagcttcctgagtagctcggacttcaggcgcatgccacaaagcctgactaatttttaaattttttatggagatgagaatctcgctatgttggataggtggtcttgaattcttggcctcaaatgatcctcctgccttgtcctcatgaggcactgggattacagggatgagccactgggacaagctgttttgcacattttctaaagttattggtccttttcttactggtttcgaggaactttatataatatggagaatagccttttgtctgtaatacaaaccacttgtgttttccagatttgtcatttaccttttggttttccttatagtacactttttgcccatattgaagttttaaattttttctgtagttaaatttattaatttttcctttttaaaaaattttgggtttttttttttttaattttagagacagtgtcttgctatgttgctcaggctggccttgaacttgtgacctcgtgtgatcctccaacctcagcctcccaagtagctgggactacaggcatctgcccccaagctcagctttctttttaatcaacctttttctcttgtttacctttgtggttttgagtagataatacatttgcctcattaatatatttcctggatatgacttcatgtttgaatttattgatccaacatatataattttaacaaccaattagtatttatttcttactatttcttctacttaaaataccacgagcagatagaaaataccttaaggttagccaggtgcagtggctcacgcctgtaatcccagcactttgggaggctgaggcgggcggatcacctgaggtcgggagttcaagaccagcctgaccaatgtggagaaatcccatctctactaaaaatacaaaattagccaggtgtggtggcatatgactgtaatcccagctactcgggaggttgaggcacgagaattgcttgaacctgggagacggagtttgtggtgagccgagatcgtaccattgtactccagccctgggcaacaagagcaaaactccttctcaaaaaaaaaaagaaaagaaggaaaataccttaaggcagccaggtgtggtggctcatgcctgtcatcctagcactttcggaggccaaggctggagaatcacttcaggtgtgagttcaagatcagcctgggcaacatggtgaaaccttgtctctacaaaaaaatacaaaaacaccgggcatgggccagctactttggaggctgaggtgggaggattgcttgagcctgggaggttgaggctacagtgagctgtgattgagccattgcactccagcctgggtgacagagggagaccctatctcaaaaaaataaaaaataaaaaccataaaaacatttacaaaaaaattttttaaaggaaaagaaaatatcaagctgggcatggtggcttatgcctaaaatcccagcactttgggaggccaaggcgggcagatcacttgagttaggggttcaagaccagccttgccaacatgttgaaactccatgtctactaaaaatacaaaaaaaaattagtctggcatggtggcgtgtgcctgtaatcccagctactagggaggctgaggcacaagaaattgcttgaacctaggacacagaggtggcaatgagcggaggttgcaccactgcactccagcctgggcgacagagcaagactctgtctcaaaaaaagaaaatatcttaggctcctttttgttctaacatctaatgaccttttttttttcaccagtgggctaaggtcgtacaatggctttagaatgtgagcaagcaggagatagaggtaggaaggggcagcatgcttaacaaaaaagaatgcctccatatccagggctcggccatacaacaccagctgctatgccttatcatggacttctctctcttcactctgagtgatttacttacagatacctctttttagatactggccatattctctctcagtatctccaagtcaggtcaggttaggtatgggacggatgtggcagtggttttgcgtatcccttgtcccctcccattattgccctgctctcagctcattgtcaaatttctgcagctgacaaacaaaagctgtgagtagaactgtcaaggagtaagtcatttaacagttgagcataacaggtttagacctttggagcatccaaattgttttcatttgggaaataattattgggagtggattgggagctggaaaacacatatagcttagaaaatatctaaatagggagctgaggcaggaaaaaactggaggagccattcaatgtaggatatttgaggttggatagagggttttaggaagcttctaggctcccactttaattcctaagaatccaaagtttaatgtataagccctatttcttctttatatctttaatcttacaggaatctaattttcttgcctgatgctatccttttccttatggaaataactggcacctgtgacgaaggatgagtcattggtttatgtgatttccatttgcaaaactccttttttttgtttttgttttcactcaacatagaccaatctccagttcaacaacaacaagtactatctgattcagctattagaagatgatgcccagaggaacttcagtgtttggatgagatggggccgaggtaatgatttttattgagattttatgagttggcattcagaaagtcagaagcagcttagtgggtggccaaaggattctctgggtttaaattgggtcagtagaggctctgaagtctgggagagccttaggaatcaagttgagcatcttgaaattggggaatggcaggcatcctccttagagttcccactggaaaaactaagagcagcccattgagtctgaaaactcttctatagttgaactgctagtagtgctcatagactatggcagttagcaagtaacttgtatcaacatgattagttccctaaatcctttcacctttcccttctccctttcctgcctgtttgtcagatgttaagcagagagatcttggagagctggcctgttactcttagggaactatcttatgtgtggcatttcctttgcagttgggaaaatgggacagcacagcctggtggcttgttcaggcaatctcaacaaggccaaggaaatctttcagaagaagtgagtgctgaaaagtgactacaaaaaaatataccctcctcttcttagatgtatattctctaaaaaatttttttttagacagtttcactcttgttgcccaggctggagtgcaatggcatgatctgagctcactgcaacctccacctcctgggtttaagtgattctcctgcctcagcctccctagtagctgggattacaggcgcccaccaccacgcccagctaatttttgtatttttaatagagatggggtttcgccatgttggccaggctggtctcgaacccctgacctcaggtgatccgcctgcctcagcctcccaaagtgcgggattacaggcgtgagccaccgtgccctgccttctctaagaattttataagtgtgtggcttataaaaaacttttcgttttataggtgtgatttggcctaaatgttaatgtcttttcaccctgacattctgtggttgaaacaccaaactgcatccttagtgattaaatcaaactaataccttgaaagtcactaaaaacagaagaatctaatatatttaacacatgactgacaaatttaggaaatttgggataagtggagactatcctgggatagataatattcaactaggggctgagcacggtgatgcctgtaatcccagcactttgggaggttgaggcaggaggattgcttgaagctaggagtttgagaccagcctgggcaacaaagcgagacccctgactctcccccaaaaaaaaggaaagaaaaaaagagaatattcagttagaatttttaaaactttatgatatagatgaagaactttctggagaattggagaacatgtttctttcagggaaagagattagatggatatcttttgtttgaaatctcaatggcttttgtggtgtttgggaaggacaagcattgtttttcccattttttaaattccatttgtctccagagcttttttgtccatttagtgtcctcatttagaattagactaattttgatttatggaaagttgatgtgtaaaggagctcagtgctggaaaataaattctttggagattttctgtcttgtaagtccatcttcatagtagacctttatttgtaaagttttcttacaccttggactctacagattccttgacaaaacgaaaaacaattgggaagatcgagaaaagtttgagaaggtgcctggaaaatatgatatgctacagatggactatgccaccaatactcaggtaactctcactatacttttcgaaagaaacacatcttctttttttattttattttttagaggcaaaactgtgctctgttgcccaggctgggtggcacaatcatggctcactgcagcctcaagatcctcaggctcaagtgatcctcccacctcagcctcctcagtatcaggaactacaggcacgtgccactctgcccagctgattttttttcttttttttttgtaaagatgaggtttcactatgttgcccaggctggtctcgaattcctgggctcaagcagtcctcttgtcttggcctcccaaagtcctgagattacaagcatgaggcaccacacctactcctgtttcttcttactcagggtaaagcagaatagcttagatcattcctggactgggacaggccaggatatcttgaatcctttctacttctcacctcaggggtgctctcactgatctttgtaatcccaaagggacagtaagaatgaggatagaatgtgcctttctagtcttggctctgttatttactaaggttcttttttttttttttgagctggagtttgattcttgttgcccaggttggagtgcaatggctcagtctcagctcgctgcaacctccagctcccgggttcaagcgattcttctgcctcagcctctcaggtagctgggattacaggtgcccgccactatgcccagctaattttttttgtatttttagtagagacagggtttcatcatgttggccagtctggtcttgaactcgtgaccttgggtgatctacccgcctcagcttcccaaagtgctgggattacaggcgtgagccatcacgcccggcctactaagtttcttataaaatcttaggccctatttccagacgtttattgtttttttcgtttttttgtttttgtttttttttgatacggagtctcgctctgtcgcccaggctggagtgcagtggcgcgatctcggctcactgcacgctccgcctctgggttcacgccattctcctgcctcagcctccggagtagctgggactacaggcgcccgccaccacgcccggctaatttttttttgtatttttagtagagacggggtttcaccatgttagccaggatggtctcgatctcctgacatcatgatccgcccgtcttggcctcccaaagtgctgggattacaagcgtgagccactgcggctggcaccagaagtttattgttatggaccaagagaggagtgataaaaaatcaaactgattaaacaattaacatttaaatttgttttcacttctggatatataccaccataaaaaatttaatttagataaactgaggtataccaggatgctgaaactgtccggaaacagtcacatatccaaaaaaatggagaagttttagtcttttttaagatgggaagatctgagacataatagctgtctttacacactgacgtcatgaggaaagccttttttttctagacttattctgagttgtaaaatgtgggaggcagaacttggatggtcaaccctctatatccatggattcaatgaactgagaatcaaaaatgtttgaaaaattgcttctgtactgaacctgtacagcctttttttccttgcttctcattattccctagacagtgcaatataaaaactttacaaagcatttacattgtataatattgggtgttataaggaatctagagatgatttcttagattgtcttgtgttttgtttgttttttgctataggatgaagaggaaacaaagaaagaggaatctcttaaatctcccttgaagccagagtcacagctagatcttcgggtacaggagttaataaagttgatctgtaatgttcaggccatggaagaaatgatgatggaaatgaagtataataccaagaaagccccacttggtaggacttcacattttcttctgcattctctccttataattcctagctcctttaatggatactttattatcattatgatttaaagcttgctcatagtactgaatgaagaaaatgggatttggggtgacaggttgtatggagggaagaggaactattttgaaagttgaggctgggtgtgatgggtcatgcctataatcccaacactttgggaggccaaggcaggtggattgcttgagcccaggagtttgaaaccagcctgggcaacatggtgagaccccatctctactaaaaatagaaaaattagccaggcatggtggtgtgtgcctgtgatctagctacttgcgaagctgaagtgggaggatcaccggagcccaggaggttgaactgcatttagctgtgtttgtgccacggcactcagcctgggcaacaggagtgagaccccatcttaaaaacaggaaaaaaaaaagttgaaagatgaaagtcttttttagggaaggatgttaagtacagttcactagatgggatcctagtttggagtctgatctctgggtgggcctgcagggaagctgacagtggcacaaatcaaggcaggttaccagtctcttaagaagattgaggattgtattcgggctggccagcatggacgagctctcatggaagcatgcaatgaattctacaccaggattccgcatgactttgggtaaggcctgtgctgttacttcactttgttcttctacctatacatatcccctgtatccatcagcagcagctataatcttttaaatcttttattcctaagaaaatgatcgtcttgaataggtacagaaacaaaatgatatataggtagcctatttaatcagcttacaaatatgggatgcaatctcccggcttgaccacagccatattctctgacaaagtggaagttaccaacccaagagagaatgggtctagctatccaaccacccaagtaaaacaccttcaggcatatcacccccttttcctatttgagtaactaaaaccacacaaacaccatttctgtgaactcaagtgatattagatagacaaaataacattttacatttgttgattctgttttctggtttacatccgatttctatttcttttatagctttatagagccccgtgacctagaaataaccctgagtggtcaacaggtctacctgtgcttctagatagaactgtatccaactgttccctgttgatatcaatataacttatttttaaatgattttataaaaaataattttaactctagtctcaaaagtcaaaatccacatagttcatcttataccgagtatatatttaatattattttatatatttggaagttaagatctctttacagatctctttctctctcaaatggaaaacctgtttctcatacctgttttctaaaggacctatctgtcattttctatttttagtcatgcgccttttagccacatgtcagaaagctcattatgggttatatctctgttcttagactccgtactcctccactaatccggacacagaaggaactgtcagaaaaaatacaattactagaggtgagatatgtatgatttgagaagtattatatcccttataccagtgtcctcccacattgattctatatctcatcttctcaggctttgggagacattgaaattgctattaagctggtgaaaacagagctacaaagcccagaacacccattggaccaacactatagaaacctacattgtgccttgcgcccccttgaccatgaaagttatgagttcaaagtaagaaaaatgatcatttattttcatattcttgcacccttaaccacctcccccatcccactgttctctaactacttcttgtcaagagcaaattgtcaattagggcagactttttatgtactagggatttgggaaggccaagcttttcctagctgccttgtaagactgtttgggagcagaaaggtctgccaagttatatcagaatccccaaattcttcagttcagctcagtctcttgtagagtctacatcagcctttttgtcttatttttcacaggtgatttcccagtacctacaatctacccatgctcccacacacagcgactataccatgaccttgctggatttgtttgaagtggagaaggatggtgagaaagaagccttcagagaggaccttcataacaggtctgagtctagctttgcgtttggaaagacactccttgcccgaaagtacagctgtagaacttataagagggagtcagaggaaggtgttggcttttttatgcttatggcctatctgtgcagaacaacagagtacaataatattggcttttccttaggatgcttctatggcatggttccaggatgagtaactgggtgggaatcttgagccatgggcttcgaattgccccacctgaagctcccatcacaggttacatggtgagtgaaattgaactctgggaggagcacaggggaaagggatacagtaatgttctcagtgctttttttcctagattaggattagatggttcccctccccaagagttaagccagctcactgataaccttgtcatctcttactgtgtccctctttctttaaattcctaaagatacctcacctttccctcagaaggcggaaattcacaggggcttctaccctctctagaacagaattgtgaggggaaatggagaagggtctatattgtgtttaagggaatggaaaaacagggtcagtggtatgcaccttctctctaacacagtgggttagaagctgaccttggtattcatgtatatatttcagtttgggaaaggaatctactttgctgacatgtcttccaagagtgccaattactgctttgcctctcgcctaaagaatacaggactgctgctcttatcagaggtgagacaggagtatgtctgtgatctctagtttattaattccagtttttttccgatgagaaaagtttgaccccagaaccaagaggtttacctgggatagcttgagagaggaccaagtacaatttctagtacattggattcctctgctggagtaggggaaaaaagtactgatgggattttctgtttggctttggagccatctaattcttagtaggatatgggaattcaaaggttttttgctttgcaggtagctctaggtcagtgtaatgaactactagaggccaatcctaaggccgaaggattgcttcaaggtaaacatagcaccaaggggctgggcaagatggctcccagttctgcccacttcgtcaccctgtaagtactcagaaccaggaggactagaagactccttttggccagataagactacgttctctattgcagcttctgaaccagagactgatgttgacacactttttttccatttggcaggaatgggagtacagtgccattaggaccagcaagtgacacaggaattctgaatccagatggttataccctcaactacaatgaatatattgtatataaccccaaccaggtccgtatgcggtaccttttaaaggttcagtttaatttccttcagctgtggtgaatgttgatattaaataaaccagagatctgatcttcaagcaagaaaataagcagtgttgtacttgtgaattttgtgatattttatgtaataaaaactgtacaggtcta

SEQ ID NO: 137 - DNA, 19423 bp, Homo sapiens
  source 1..19423: mol_type = other DNA
tcacccggcgccgggccctccctctgcccccccctttctcctccctccttccttccctcccttcctccctctctccctccctcccagctcctgcaccaggaaacggcccggatcccggcagcggcctgacccgtgagatccctaacctggcaggcgggcggggttggagactggctgaggtgggggtaagggaggagctgggcctttgggctgcactagggggaaccgggaatagagatggtgtcggcaggaagcccttggccttgggtttcccgggaggacagtcattaaacatggattcggccacacagctggtagagcgttgggggcaggggcctaggcccagagctgcaaccctagcccttcccaggccagaacctgatccctggccttcccctcctggttctgatctccccctcccctttccagggctccacgctggccaggaggatgaaaggccccagctgggggctccttgccaccagtgctgtgtcttaagagctgccatcccggctgggtgagtgtctccttcctttctctgtctggagtaacccattgcgtctcccacctttctcttcagcccatctgctccccctcatcttgtgtctctgccaacatctttacatcttgcatttggggaggtcctaagacccttcctctagccaagaaggtgtggactaaggagacccgggggtgggggtgttgtaggggtgtcattgagctgacgttgtcttattgtgaaaagaatctaaagtatcctaaacagaaaatttacttgttttacatttaatttggcatattaggaatgtaatggccagccactcacagcctagtctcatatcatgacttaattcccttgttcttgcctctccctgtccagtgagtcctgagcatttcctctctcctcctcatctcactgggttggtcaaaccagaagtgctccttctgattctctcttcatatattcatgccagtctttcatccttgcctcttatagccgcccggatggcgaccccagcctcggccccagacacacgggctctggtggcagactttgtaggttataagctgaggcagaagggttatgtctgtggagctggccccggggagggcccagcagctgacccgctgcaccaagccatgcgggcagctggagatgagttcgagacccgcttccggcgcaccttctctgatctggcggctcagctgcatgtgaccccaggctcagcccaacaacgcttcacccaggtctccgatgaactttttcaagggggccccaactggggccgccttgtagccttctttgtctttggggctgcactgtgtgctgagagtgtcaacaaggagatggaaccactggtgggacaagtgcaggagtggatggtggcctacctggagacgcagctggctgactggatccacagcagtgggggctgggtaagaagcttctcaattgccgctctgcacatccttctgcaaagctggtctccagggggaagatgggggctctgattggaggctgaggcagctatgttgggaatgaggtacggggctgagtctccccgtctggatggaattagattgagagatgcctggactctgcactccagggctgccatgcagtcaacactggatgggctcatggtcccaagcagaggacagaatacacacccaaggagtgcctgcaggggaatgttgtcagggactttttacatctgagtcatggcgtgggaggtggggaggaccagggatgggtggtggtcaggcaagccttggcaaaggatgctagttctgagcagaatttttcgccaaggaaaggatggaattcactggaggcagagtgggcagatgaaccagtctctcagggtgggggtgcacctggggggatcagaggggcttgcagggagaagagctttggccagagaggagctgggtatggggtagtgctcgcagtggatggaactggaactcttcctctcctcttctctccactctttcctctcctgatatccctttctccttctttctctcctgcttcccttctctcccacaggcggagttcacagctctatacggggacggggccctggaggaggcgcggcgtctgcgggaggggaactgggcatcagtgaggacagtgctgacgggggccgtggcactgggggccctggtaactgtaggggccttttttgctagcaagtgaaagtccagggccaggtggggctaggtgtggctgggggccaggagagcaggaacagaacagagaaatgcccttggaagaagtggagttggtggatgggtgggcatggaacaggatgggcagagaaagggtagtgtgtgagggagctgagtaggccaggtaggcgattggaagagtgagcaggacacagaggggaggggaatgttttggcaagtttaggggcacaggagatgtagtcgttccagggctgggggaggtgggagggatcacgcctataggtgtgggcacatgaaacgacctggaacttgcttcacagccctgaggaaggtggacttacataagcagctgtattccattagatgagtgggatttagggaacgcagaaggcacatccctttggaatggaagcttaggggttctcaggtgatagggagaggtggctgttaacagtgggctgcttggacacgcgtgtgcatgtgcacgcatgctggtgtgcatgctgggctgcctggcaaatctggtggtgatgggattcctcaaggagaaaacattccctcttgcaatggcaagaactaggggcagttctctgtccctcctcccaacccctcctttcccctgcccttgtcctgatgcctcaaggcttagagagaaacattgtatccagaccgagggctctgctgcttctttccagaaagtgattggcaaggctttggagagaagagcagttctgcagctggccttgttccttcatcatcccccttccttgtgcattatgcacttgctgctgcctcctgggctctgatagaagggcagggctgttgagcctggatgggtggaggcttaggtagccggacctgcctgccaccctcctctcccactcaggcacaatggtgcctaaagtgtttccaatctctgggacctctgtacccaaactgaaactctaaattggggccctaactaattttccttttgaggttgtgggcataagtgctgatctagaatacagtctgggtcccacactgtgtctcagtgagactgttgatgccttgagatgaccatttcagatctgaatcccatgggtgtgagggtgatgggtactccaggactggcctatgctgtgttgtgggctttggttcggctttatcaggggccaggcatatgggttctagagtacctaccatgacctagaagcatttatgatttatttgaagccacactgtttgcatgggtgttacttgtctgtacctcagagtctgaggatgttaactttggaactcgcagtcctctagaacagcttcagattatggctttttcttttgaggaagaaattattcactccagatgcatgccctgagccagacctcactgctgcactttccaaggtgctaagattgctgctctccaatgctaactttctgacacagtgctctagaaccctgcctgtggtcctgagcactgatcaccttagctagaccatggttgactcttcttggagattttcacttggtcctagaatgtggcaacgtagttgtgctcgccagaacgtgggaccaaattggcctcaggtgttgagtccagacttctgcttttgagagagggctgcactttttcatggtatttctaggggaggtggtaggctgcatgtgccacttggtcttgttgtgagtatgctgacaccagaaactcagagccagcttgtggcaagcagttggggtggggggtctctgacttgctcaggacaaactaggccagtggttttcaaactgcttggcagagccctgaagtttcctaggggttgcctcaggagtccttggggagatgaagggggtggggagctgagcaggctgggcaatttgccctcaaacagaacagctccccttgtagctgtcttacatattggggttcagggtaagattttatttgcattaaggggtttgctgctgaaaaaaagttggaaaaccactgactagaccatcggctccaaattggagtctgtgcttccttccccaggtatggagcacactcttcaccctaccctctaccacaggacacatatccctgttagcattccccgggacctttagccaagaggagctgcagggaccatggccaggttaccaaaatgccctgctctgaagccttgacacctgggtggaaagagaggctgttttctgaaagggtaaagggcttggtctggattcccagaagcatagcttagatgggaccacagtgggcaattttgacctgtcctgcccttcttagcttgaagggaaaccccagagactcttctgtcagggaaaactagggactctcttctagagccatatagttccttgggattagctcttggccaagaaggctgagtatggttcccaatttttaaatccatttcattttttaaaaaataagggaaataaatgtaattgccatttttcaaagattaagtaggaggagaggggtttcttgctctccagagcccaaagggacaaatagggactttgtttaggccaaggaaggagcggaagtagggcaactcggtcctgcgattattaatcccactccccacttattctagggcacacaaacactattttacttttttaaaatcataaaacggcagaacagatttggttagtttagaagaaaagaaagctctataaatataaatctatattcctgtatttttatttaataatttataaataccaagttcatttgacttttatttttgtgtaatatgtaatgatcgtattaaaaacaataaataaagcccagaagtttaatgagaaggactgaacagggtttgtgacttctacactgtatagcctggggtcaggacatttccttgatccaatcatctcttcatgaccttgttaaaggcaagaattagaataacagggatttgagaaagtgttgggatcattaagaaaaaaagagtctttcccccatcctcaccccactcctataccagccaaatggtcaaagccaagaattccttctatttcaacctgagccttgggagggtgtgtgtatatggtactctgggactgccactaacaataaccaaatgagaaacaaagaaaacctaccaaaaatctttgtgtgatagtaatcaagcccccagttgtggttcaggctctaatcagaagtgtgtgataataatgaacatttctccatggtgccttcctgcctacctcagacttaaaaataggtctgggccaggtgcggtggctcacacctctaatcccagcactttgggaggccgaggcgggcagatcacttgaggtcaggagttcgagaccagcctggccaatatggggaaaccctgtctctactaaaaatacaaaaattagccgggcatggtggtgcgtgcctgtaatcccagctactcaggaggctgaggcatgaggatcacttgaacctagaaggtggagtttgcagtgagccaagatcgagccactgtactccagcctgggtgacagagggagactctatctcaaacaacaaacaaacaaaaaataaggcaaggcggagtctggcaaaaatgggagtccctgcttcctttgctggtcctgtgagacatttggtttcagccattttaatgcaaattgataaactggatggaatttctaagaatattcagctcatccttctctacctctaatcttggaccacatcaaaatcatgttaactgaaacagtgatcctaattttaaatttcaggtgggaatttctagcctttctgtaatccagtgcaatagactggtacttgggtttatgtgttaaattgcaagaaatataattgtttagaggaatccagcattctctttctattctttatacaaaagtctacaggggaaaccatattaaaatcagagagtggcttagtgaatatggcactatgggaaaggaaattagatgttcttaatagttaatatcatcaagtatgatagctggtgtatttatctccactgttgtgtgattgatttaatgattgatttgcatttgcctagttccaaaaaatatttgcaatatcttactataatacacaaaataataggaaaacataaattttttaagttgggttgaatttcaagtcaaggttaagtaaaaaaaataagtaggggtaaagggaaaattgaaataagatggcggcaaaaggaaaattaatgcacagaaaaacattctataagtagcatttccaaatactaaagctaggctgtgaattcagctgtgagcttcttggtggctaaagcaaattaaaatacagaatgaaattcacattcctcttaggatttataaaagcctatcagttactcaagaggggcaaaaaaaattttgtggcttttctaagaagacaatgatatagtggacaccaccttctgtgacatctaaaagcaaatatgatgttgagttttgaccactgtttcttctaaaaacaccaaatggagattcagaaggtcctaagcgagaaataacactggtggagaactgtatgaaggaaatataatccatctatcgctttagatagcccaaaatttaatcctgtattaaaccaaatcatcatagagcagcatatttgggctaaattgtgatgaacctagtagaacacacttaggaccttctgaatctattagaaggtcctaagtgtgttaggacaaatgacaccttcaataaagttgggcaacacttagttacaattattagtaaatggatagattgtagatattctgtgttgttacttttttaaatttttatttatttatttattttgagatggaatctcgctgtgttgcccaggctggagtgcagtggcgcgatctcggttcactgcaacctccacctcccgggttcactccattctcttgcctcagcctcccgagtagctgggactacaggcgcccgccaccacgcccggctaattttttgtatttttagtagagacggggtttcaccgtgttagccaggatggttaccatctcctgacctcgtgatccgcccgcctcggcctcccaatgtgctgggattacaggcgtaagccaccgcgcccggccctctgtgttgtaacttaatagcaaatcctttgaagactttaaaagctgctttaaggctgggcgcggtggctcacgcctgtaatcccagcactttgtgaggccgaggcgggcggatcacgaggtcaggatcacaaggtcaggagatcgtgacggtcctggctaacacagtgaaaccccgtctctactaaaaatacaaaaattagttgggtgtggtggcgcagtccctgtagtcccagctacttgggaggctgaggcaggagaatcgattgaacccgggagacggaggttgcagggagccgagatggcgccactgcactccagactggcgacagagtgagactccgtctcaaaaaaaataaaaataaaaaataaaataaaataaaataaaatttgccttaaatgtagatacaggagaaatacagaaataaatcgactattttgaaactcagcagaaaatacaccataatgaaatgctgtgtagtttattcagtcagtcatttatgcagcaaatattcaagcatcatctgtgtgctaagcacagttacaggctctgaggtagagtgaacagacagatgcaaatctctgttctcatgttgcttatattatagtaaaagaaacagaaaacttaacaattatgtaatatgtgagaaggcgatgaataccataaagaaaaataattcattgaggggaatgtgtgtgtatatatacacacgtaagagttcaattttaaattgagtggtcagagaaggcctcatttctagggtgacttttgggtaaaactatgacaaacaaaattggaaaaatatatttattgacatgggaagatgtttgtcttttttttttaattgggtaaaaaaagaaaatagattagaaaataatatatacagtatgatcccattttgctaaaatatttatatctgtgtgccttgatatatatttgcatattgaaactttcaggaagtatatatgccaaaatatcattagtgattgtctctggatagtgggctttatgagtgcttttattttgttctttttgctgtcagtattttctgattctttgacaatgaacatatatttccagatatttccagtacagtatatgaaaacaagttctttaggtacaaaatttttaaaaagttaacgaagcaggatggaaattaagcagcccaacagagggtccttcacatttaaatggctaccccacttccatgcaaaggcaaacttagggagccaaggtaagcaggaccagaccacattagaagattattgaggtctgctccaagacagaggtcagtaaaggagaaagactccatggttctacatcagcactgtccaatagaaatataatgcaagccacatgtagttttacattttctagtaacctcatttaaaatgcaaaaagaaattattaaaccaattttaatattttatttagcccagtatataaaaatattatcatttcaacatggaattaatattaaacagttattaatgaattatgtcacattctgtttttcatactaagtcttcaaaattcagtgtgtattcaacacttagcacatctcaagttggactactcatgtttcaagtggtcagtagccatgtgtgactagtggctatcatattaaagtgtagctctagatcataggtcattattatagtctgtaaaaatttcaaagtagttccagatcatagagcattattgtagtctgtaaaaatttcaagaaaggagataaaaatagggatgaaactaccaagacgtcaaatatttatgtcgtttggggagaaaacttttctgggaagaactatgaatgccctcacccatttttactacttaattctccttttcttaactccactgagccattcccttcttcttcttcttttttttttttttttttgagatcgcccaggctggagtgcagtggcgcgatctcggctcactgcaacctctgcatcccgggttcaattgattctcctgcctcagcctcccgagtagctgggactacaggcgcaggtcaccacgcccagctaatttttgtatttttagttgagacggggtttcaccatgttggccaggatggtcttgatctcctgacctcgtgatccacccacctcggtctcccaaagtgctggaattacaggcgtgagccactgcgcccggccgattcccttttattaatacattttcccgtcttctggggcacagtatcattggagtttcactttttccaaaactccatggtcctttgtttataggttattacttagagagaattataatgggtgaatctcacaccattacataccaaatttcaaaaaattcattctcagaggaaaacttatctctttgatattctctatgcatcaacaacaggcaggataataaatacgagtattcattcatttatttttttacttttttaaaaaaataagattattcattactgaagatgactcattcagttatcatttactgagcacagagtgataggcaaagggaacacaaatataagatggttccctgtcttttacagtttatagactaatagggaaggatcttacaagtcaccattcaaaaagcttttttttttttttgagacagtctcactctgctgcccagactggagtgcagtggcacgatctcggctcactgcaacctccgcctcacgggttcaagtcattctcgtgcctcagcctgctgagtagctgggattacaggcgcacgccaccatgcccagctaatttttgtatttttagtagagacggggtttcgccatgttggccaggctggtctcgaactcctgacctcaggtgatttaccctcctcggcctcccaaagtgctgggattacaggcatgagtcatcgcacctgtccctcaaatagccttttaaatatgtttgcttttttctttttttgagacagggtcctactctgttgctgaggctggagtattgtggcatgatcatagctcactgcagcctggaacccctgggttcaagtgatccttctgtctcagcgtctggattagctgggactatgccaccacactcagctaatgtgtttgtttctttcataaggtaattatgcctagtagaagaagtttgaaagttggagtgattttttaaaaataaatatgtaatgggctggacatggtgtctcatgcctgtaatcccaacactttgggaggctgagttgggcagatggcttgagccccaggagtttgagacaagcctaagcaacatagtgagaccttgtctccacaaaaatagaaaaaattagctgggcatagtggtgcacacctgtagtcccagccacttcggaagctgaggagggaggattgcttgagccaggagtttgagggtgtggtcggctgtgatcatgccactgtattccagcctgggcgacaacgaccctgtctcaaacaacaaaggcagcaaaataaacaagtaaataaataaataatgattgtggaaaatttgtagaacatagaaaattataaagaaaatgaatcataatgctgtcacccagagacaattactattttggtatacttctttctagtatttgtttgtctgcttttatgatcatgcaattttgtatacgcaattctgcttaccattatattgcaagcattttttcttgatgttaaaatgtttcaaagtcataatgactatatacaattacttctacttgtgtacagtaattttaatgcccacttggtcctttatctgtattttttcactttgataaaaatacttattctggctgggcattgtggctcacgcctgtaattccagcactttgggaggctgaggcgggctgatcacctgagttcaggagttcgagaccaccgtgggcaatatggtaaaaccccatctctactaaaatacaaaaaattagctgggcttggtggtggtgcgcctgtagtaccagatacttaggaggctgaggcacaagaatcgcttgagccctggaggtggaggttgcagtgagctgagattacgccactgcactccagcttggttgggctatggagtgagactctgtctcaaaaaaaacaaaacaaaaacaaacaaacaaaaaatatttattcacaaattggattacatttttagaagagataagaaataggattactgggttaagaatctcaactttttttttttttttttggagagagtctccctctgtcacccaggctggaatatagtgtcgcgatcttggctcactgcaacctccacctcccaggttcaagcctttctcctgcctcagcctcctgactagctgggattacaggcgcccaccaccacacccagttaatttttgtacttttagtagagacagggtttcaccattttggccaggctggtctcgaactcctgaccttaggtgatccacctgccttggcctcccaaagtgctgggattacaggccgtgagccacctcacctggctctttttttttttttttttttgagacagggtctcactctgttgccagtctgaagtgcacgtagcaccaattatggttcactgtagcctcagcctcccaagtagctgggcagggactacaggcacacgccactttgcccagctaatttttgtatttttagtggagaatgggttttgccatattgcccaggctggttttgaactcctggactcaagcaatctggctcccaaagtgttgtgagccactccgcctggccttaagaatctcaccattttaaaagcttttgatatatactgccaaagaatagaaagattgtactggttcttgctccttttttcctcccatgcctaagtttttaaaaaaaatcagatatagttgtaattatatattatgtacaattttacattcttctttggcttaacaaaattattttcgcatgtttgtcatactatgtaacccttttaagagatgcataataattttttttggatataattatagtttgcttaaacttttgtttattgttggaatttagtcttgccatttttcacacataatttttatgtattaaagcaggccttatagtagtagtgatctgagctttgaaagctggctttgaattccctgcacattattatatatattacataatatatattatgtataatatatatataatttttattttttcctttgagacagagtcttgctgttgcccaggcgattctcctgcctcagcctcccgagcagctgggtttacaggcatgtaccaccatgcccagctaatttttgtatttttagtagagatggggtttcgccatgttggccaggctggtctgaaactcctgggctcaggtgatcctcccgccacagcctcccaaagagctgggataacaggtgtgagccaccacgcccagccagccctgcacacttctaattagtccaatgacttaggcaagtttcttcatttcattaagcctttttctttttccctaaaaaaggttatggttttggaaatactttccccgtggggttgttgtgagagtccagtgaaataataaggagtggtgcttattacaaaatcaaacgctcaacaaaaataggattcaaagccatttttaaaaatcacatttccttttgttggcttgattaaattgggtaccaataagattaacaaatcttgattaggttaagattagtataaaagacctttcttccagggtattcaatcatttagagcttgtcttcggtgctcaactttagttatcccagatcactgaagctgagatggctgatgaagtaatttgcagtgaaattttaagcgactgtgactctgctgcaagttccccagatcttgaggtaaggaattgtgagaaaaagtgggggtgaggggaatagtggggtataatgagtcacttgattttttggtttgctaatgaggatcttctcttgtccaaatccctcggccaaccatgtttgtttaactttttggttgggctatatgtatctttcgaactgtaggttagtgtgcccacaaaaatttctcttgcaaacgtacactgccattcctttctttttaataaatgtgtaggactgctaccaaaatatggcagtcctgccttccagggctaggtctcattggtacttggggtgcaggggtgtagtgggaacctgccaggagaaattcctctgggatcttgggggcttgagggcttaaatgaagggtggcacccaaatccccaatcaatgcctgttcaatcaacaaacatctaacaggacattatgtggtaggcatattgccaggccgtggagatgcgaatataaataggaaccggcccctcatctgcaggcgctcacaacctagttaggaaacagtaaaacaattaagcgcgccgtggagataggcccacttgtcctgggaaatgaggggaagctggggtttgcagtggtttgattgaagggggactacatgttagaggcacagactgggtgcaggtacacccaaaggaacgagaagagtggaaggaaacaacatccacaaagtaaccacatgctggcgtatcgaaggccgtgatttacggttttgagactttacctcgccagcaaaggggggccagtctgttagcggtgcagattggaggggtgacattggaagctgtccaggaaaaagaaaatggaactggggagcagaaggcctacgcaagagggcgggacagacaggacttgtgactagtagctctggactgaggaatcctccctgctttctggtgcgggagagctagtggatgatggtgccaataacctggatggggaaagtaagctccctcctggaatgcttcattcacaacctccattttcagcaacatcccatctactggtgcttcctggtcgagatacaagtttcctgaaactgctgctctgttttgggcctcacccggccaacagctcactagctggcaagcagtagtatcaagatggcggccccctaggactggctagtcatgtgacctcgggtttcccaagtttgaagcccggcagtcctttcgggggcaaggttcacctgtcacgaaacgagtgtcaccccttcgactctcgcaagccaatcggcatctgagactgggccactgcggtgaggcgatcggaagattggtcctttccagtcgcctagctagggccaatcacggagcgtcccatacttcgcgggcccgcccgtaggccggggagaagcaggaatatcgtcacagcgtggcggtattattacctaaggactcgataggaggtgggacgcgtgttgattgacaggcagatttcccctaccgggatttgagaatttggcgcagtgccccgccttagaggtggggccttatttgattgccaagtaatattccccaatggagtactagctcatggtgacgggcaggcagcttgactaatgagtcctcggcgtggccggcgcagctctccaatcgccgggcggcgggccccagtctgagcggcgatggcggcggcggcggcggcggcagcagcagcgggggctgcgggcggtcggggctccgggccggggcggcggcgccatcttgtgcccggggccggtggggaggccggggagggggccccggggggcgcaggggactacgggaacggcctggagtctgaggaactggagcctgaggagctgctgctggagcccgagccggagcccgagcccgaagaggagccgccccggccccgcgcccccccgggagctccgggccctgggcctggttcgggagcccccggcagccaagaggaggaggaggagccgggactggtcgagggtgacccgggggacggcgccattgaggacccggtgagggaaggagggcgagcgagcaggccggcggctggccggccgggtcactggaggcccagagctcgggcgagcgggtggcaggcggggggtggggttgggcggggaataacgtggctggggccgggtcgggccggggatgggtcagcgatcactacaaggggcccgactggcttgattcgggcgtcacggttgcctagtgttgttctagagagggtagcttttcttttatcacgaccctcgcatggggcgagggaaatggccgagcatggctgaggccgcgctctggccgagagcagggcacagcccctgcgttggttcctcttaagctgtcctccataccctccccacttatattaggagctggaagctatcaaagctcgagtcagggagatggaggaagaagctgagaagctaaaggagctacagaacgaggtagagaagcagatgaatatgagtccacctccaggcaatggtgagtaactggcggttgcacgcggagcccgggttctcgggttggaagggttgtggggaggatggggaatgtggggttagatactcggcaccctggagctgcttgtctgagctattatgactgtgccgcggtcatagtccgttgtgtgttcctctgacctttgtgaggcagaacgtatattttggtggtggtagccttgtgcctccctttgtgcctgttataattgtgttgctctttgttcttagtctacgtctatctttctttgtagaggttgcgtgctcgcatttgaccttcaaatctaatagtttttcctccaattggagacgctttaggattctaagagaaagcaagctgcaaggggtttcccctttaatctagaaatgtggagtctcagcccacttaattttgctcactcttaaaagcatttcaaccaaagccattcattagggatttgatttggaggcaggagggattcctatactgttttaagtgtgtattaattctttcaatttattgaatatttagtgagtacctgctatgcactaggcactattctcggttgtgggtacagcagggaacagcacagaccaaaatctttgccttcactgagcttatgggatagtgctggtggtggaagtgcaacatattggtcaagtagaaaacaagtgtgtggtttttgtaaaaaattattttttcctgatagctggcccggtgatcatgtccattgaggagaagatggaggctgatgcccgttccatctatgttggcaatgtacgtactggggctctgactggggttgggggcaagttcttcttttggggaattatttaatagtcctgaaaggaacatctccgggatagatgtggttttgggtgtggagggagtgtgggaaggaggttaaaggtaatggaatgatcagtaatcagcaaaggctctgggtttggaaggaaaagagattaattcctcaaattaccagatttcatgtgctttggtgtatgatggcccagaccaaaggctcgggagggttccttttgagacaggaatttgcctggtgcctgtgaaatttttctcctctcatcaggtggactatggtgcaacagcagaagagctggaagctcactttcatggctgtggttcagtcaaccgtgttaccatactgtgtgacaaatttagtggccatcccaaagggtaagtaaaggggagtaagttgagataatttaaattacagtgtacaaatagataaattatgttttatattgagcagtaagttatttggtgttaacacaggtgatctgtgtcatttaagatcatggcattaatgttgatatatcaggagttgcacctaaatgtcttcagaggccagataacaaaaatgaaggctagatgtgggtgggattacgaactagaaggggaggggcagcttctacttggcctattatggccatatggaaattcaggccctgtgtgtcttatttttacaaatttcaaagagtagctggaaattttaaaatttaaatgatttcgaatgattgaaattttccatttagaagaattttgacaaataaaaaatataactgcattgtagcccaaaacgaagcatgcctgcaggttgaatttgacctgtgaggtatttgtaacctcagagagatacaatgacaattcttttcaggtttgcgtatatagagttctcagacaaagagtcagtgaggacttccttggccttagatgagtccctatttagaggaaggcaaatcaaggtaagcctatgtccattgctgttctagttgtgtataaactctccaggttgcctttaaggctatcatttgttcatctctgactcaggtgatcccaaaacgaaccaacagaccaggcatcagcacaacagaccggggttttccacgagcccgctaccgcgcccggaccaccaactacaacagctcccgctctcgattctacagtggttttaacagcaggccccggggtcgcgtctacaggtcaggatagatgggctgctcctctttcccccgcctcccgtgagccccgtatgcttcctcctctctggtctgaggaacctccctccccccacccctccccgtggtcttcaggaactttgtctcctgcctgtgcaggttgaggaaggtagttgcaggccaggccagaaggccagcctcatcatcttttctgcagtagaaattggtgataagggctgcatccctcccttggttcaaagaggcttccacccccagccttttttttcttgggagttggtggcatttgaaggtgtttgcggacaaaactgggaggaacagggcctccaggcagtgaaagcactgcttggacatttgttacttttttcggagttagggagggattgaagactgaacctcccttggaagaataccagaggctagctagttgatcctccccaacagccttgtgggaggattttgagatacttattctttatttgagccagtcttgcaaggttaacttctcactgggcctagtgtggtgcccaggtttttgccttgcttcacttctgtctctacatttaaatagacgggttaggcatataaaccttggcttttcataagctctacctgcctatccccaggagttagggaggatctatttgtgatggcctagggtttaagagctgtggaggactgaaaactggataaaaagggggtccttttccttgcccctgtctctcactcagatgcgcttctttttcgccactgtttggcagttttctgttaagcccccctccccctgccccagttctccaggtgcgttactatttctgggatcatggggtcagttttaggacacttgaacacttcttttccccccttcccttcacagtaactggggcaggggcctacggggaggggcttgtactgaactatctagtgatcacgttaacacctaactctccttctttcttccaggggccgggctagagcgacatcatggtattccccttactaaaaaaagtgtgtattaggaggagagagaggaaaaaaagaggaaagaaggaaaaaaaaaagaattaaaaaaaaaaaaaagaaaaacagaagatgaccttgatggaaaaaaaatattttttaaaaaaaagatatactgtggaaggggggagaatcccataactaactgctgaggagggacctgctttggggagtaggggaaggcccagggagtggggcagggggctgcttattcactctggggattcgccatggacacgtctcaactgcgcaagctgctgcccatgtttccctgccccacttcacccccttgggggctgctcaagggtaggtgggcgtgggtggtaggaggtttttttttttacccagggctctggaaggacaccaaactgttctgcttgttaccttccctccgtcttctcctcgcctttcacagtcccctcctgcctgctcctgtccagccaggtctaccacccaccccacccctcttctccggctccctgcccctccagattgcctggtgatctattttgtttccttttgtgtttctttttctgttttgagtgtctttctttgcaggtttctgtagccggaagatctccgttccgctcccagcggctccagtgtaaattccccttccccctggggaaatgcactaccttgttttggggggtttaggggtgtttttgtttttcagttgttttgtttttttgttttttttttttttcctttgccttttttcccttttatttggagggaatgggaggaagtgggaacagggaggtgggaggtggattttgtttatttttttagctcatttccaggggtgggaatttttttttaatatgtgtcatgaataaagttgtttttgaaaataaaaattgtttggccttttgggtgtaa

SEQ ID NO: 138 - DNA, 16081 bp, Homo sapiens
  source 1..16081: mol_type = other DNA
cggccgcgggggccttgccttccgcactcgggcgcagccgggtggatctcgagcaggtgcggagccccgggcggcgggcgcgggtgcgagggatccctgacgcctctgtccctgtttctttgtcgctcccagcctgtctgtcgtcgttttggcgcccccgcctccccgcggtgcggggttgcacaccgatcctgggcttcgctcgatttgccgccgaggcgcctcccagacctagaggggcgctggcctggagcagcgggtcgtctgtgtcctctctcctctgcgccgcgcccggggatccgaagggtgcggggctctgaggaggtgacgcgcggggcctcccgcaccctggccttgcccgcattctccctctctcccaggtgtgagcagcctatcagtcaccatgtccgcagcctggatcccggctctcggcctcggtgggtgcgcgcccctcacgaccccggccccttgctccgctgggtggaggctggagccagccctcacgcttctctcttcgcaggtgtgtgtctgctgctgctgccggggcccgcgggcagcgagggagccggtgagtgggggagctggggtgcgtccaggcggtcgcaggggctgagcaccagcgggtacaagcgggactcagatccagccccttgggcttcagccctaccgcctgaggaggaaggcgcgaaggttgagccgccgcgtggcgcgcccgcgttaacccctgcagccgatctgctcctgctcacctgtttctcccatggtagggggcccctggggtccagtggggggacgttctccaagagcactaggaagaaggcctcctccaggcccacccacagccccagaccccgggcccgctgagcgccggcagcaggaggtcgaggaaggaggactccttgagcctcaccgaggagcgcaccagtcctgggctctgctgcgtttgggggtggaggagaagccgcccagacccgacttcaggttgccgtagccgagagagagggaggcgaacgtcgctgtcccaccttgtttgactcgctagctatgtttctaggtgtaacccctataatcagaagcactcgcggtctcactctacacgctagagagtttaaaaagtttgtaccacgtgtagaggtccgggtatgggtgtgtggtttggtgtattttccagtgtaaaaggcaacgctttcctaagagctaccgtttgttttccttgaaagtaggaatgagggttaagtatccctcatggctgtatttctcccgctctacttaacaaaagtcagtgttcgcaactaaaggcggtcggtcttggcaccggattccgatgccgcccccatctcagcggaaaatgggaggaaggattaaggctgtttgatgataggtatgaggctgtttaggggtaaggattttaacctctcagctctctagactgcttcagagctaagaaatgggcattgcgcctgcatccttccttctcttccatggaatgtaaggtacctgtcaccacaaagggcacagaggagggtgcttgtcacaggcaaggtactcagttggacagtatggccagaaagtattcctctgccttggaaaaaaaaggtttttaaaattaatatatgttttaaaaaggtttggataactacaacttcccatgtttgaaaaatagcatttaataacattaatctcaatttagtatcgacagtaaattcacaaattaacatgttgtattatgttatcttgttacttgttgccaagagcttgtctcttcctagcatcatttatagtaaaaactgattctttgttaggttgacagtgtaaaacttgagaatattaacagtgctttctaaaaatgcatccgctgcttgataaatctcactggacagatctggagcagaaataatcaggttcaattaagataaaaatgctgtattctgaagggattcacttttctgttttctgtccttcgggagttgtagaatgttgtttgggcaaattaaccccacggctttaattttctcatctataaaatgaacaatcaagttagataactttctgtgaatctaagcatctttttgttggcttccttaatgtgtgagtttaaggatctgcatttgtaggctaactaggataaatggtcctatgaaggaaaggatggctttgatttgtgcacatgtctatgaaaatgttccacaaaggctcaatccagatttactatctttacctcaagcaactgtgtacatagcgtcatcaaagttgagatttaaaaatttttttttttcttctggagacaagatcttattctgtaacccaggatggagtgcagtgatgcaatcatagctcattgcaagcttgaactcccgggctcaagcaatcctcccacctcagcctctccagtggcggagagtacaggcatgcaccaccacgtgtggccatttaaaaaaaattttttttttttagaagagatgaggtcttgctatgttgtccagactggtcttgacctcctggactcaagcaaatcctcttgtcttggcctgctaaagtgctgggattataggcatgagtcaccacgcccagccaagattttttatatttctataattaatattaaatgacttttattttctagttcagatatagttccaattatgtatttccaacctggttaagaactgagaagccaggcacagtggcacacctgtaatcccagctactagggagttggaggtggatcacttgagctcgggaatttgagcctagcttgggcaacttggcgagtccccatttcaaaaacaaaaacgaaataaaaacccagaactttcacattagagttttatagtggctggggactatattaaattggaaaacaaccttgtggcttgccaaaatctggaatggtatggaagggtatataagtcaatagtcataactagaagtgtagaaattagggaagtaaaacttaaatctcacactgtagtctccccaccactatgccccaagaagtcctaagaatgcttacaatattatctcctttttcttcagctcccattgctatcacatgttttaccagaggcttggacatcaggaaagagaaagcagatgtcctctgcccagggggctgccctcttgaggaattctctgtgtatgggaacatagtatatgcttctgtatcgagcatatgtggggctgctgtccacaggtaagcccaaacacaccagggtgggagagaaatgcagacgtgattatttcctttcctgctttacccatctggatccctttcctccctgcattctttcttttgttgccattgtggccacagaaaatggatatattttcacggttctcctggatatacttgaaacaccaaatacacatggaaagctttctgacaaaaggcaaatagcattacctcttgatggctagattgctatgattccaaaacattcctaatcatgtgatatattactgagttattactatgtgccacctattgttttaacttccaccacaactctacaaggtaggtagaattttactccagttacagatgaagaaactgaactcagagagttgtcaagtatcttgcccaaggtgactattgttagcaagtgccatgctatcctgtagtagaatagccagtataatacttctaaaaaaattcagtccaaaggcatgtagctaaagtgagtatcttaggaaaattgtttggtgctctgaatttctaagttgtgggtaatgggatattacaaatgtgttcttatcaacacttaagaagttcaacagcacaaaaccatttttttccaggcaaattttgttcttgtgtaagcaagtttttaaaaggctagcagcagctgggagtggtggctcacacctgtaatcccaccactttgggaggctgaggcggatggaccacttgaggtcaggagttcgagacctagccaacatggtgaaaccctgtctctactaaaaatacaaaaattagccaggtatggtggtgcatgcctgtaatcccagctacttgggaggctgaggcaggagaatcacttgaatcctggaggtggaggttgcagtgagccgagatcgcgccactgcactccatcctgggctacagagcgagacgccatcaaataaataaataaataaagcagaatctttagatgacttccctgatgagctattttcttgattaatcaaagcaatagatacaacatggcactataagtcagtgggatgccctgaaaaagtgtggatagcatctcagctgctattcttgtgttacaggggagtaatcagcaactcagggggacctgtacgagtctatagcctacctggtcgagaaaactattcctcagtagatgccaatggcatccagtctcaaatgctttctagatggtctgcttctttcacagtaactagtaggtataattattgttctcattctgtaatattctcccaccccccaaacgttttctgctttttttagctcagcctctttaaccttgatggaaaaacctgtgatcaagactaaagctgacctatagaggtaaactgtaggttagactgaggggtcaagtacccactgaagccaaatttgggtgaatagaagacaatcttactgacagatgatggcaatagaaacttgaattatttgcagtcagaatgcccggacacttaccaaggaactgaaaaactactaaatacatttttgatgatcctttgaagatataatggataagcattttggttctctgaaactagcatgcagcaggatgtttgtaactacaatcaccattaccctattacatttgtcattgtagagagctctaaattagattcataatactttggtaaagaaggaaaaggaaaaaaataagcttatttttattttaacagaaggcaaaagtagtacacaggaggccacaggacaagcagtgtccacagcacatccaccaacaggtatgaactatgaaacctatctcctagttgcccggcacagcatttggaagttatgaataaacgtgttgttggtagaagcttttcttaaagaaatttgatattaaagagaaacaaagcaaataccttaagtttactggtatattacatatggaaacattcattatgtgtatattttaaagacagggtctcactctgttgctcaggctggagtacagtggtgcaatcatagctcactgcagccttaacctcctaggctcaagcaatcttctcaccttggcctcctgagtaggtggtactacaggcacatgccaccacacccagccaatttttttgatttttaattttttttatttttatttttttagacaggtctagctatgatgcccaggctggttttgaactcctgacctcaggcagtcctcccacttcagcctcccaaagttcagggattacaggcatgagccactgcacccagcctaataattctctaaaagtcctattttctcccagatttgataaaccacgcctaagaactggtcaaagtaccatgaacttctagttccatttgcttcattaaattcctttaattactgcactgtcatgtgactaaaaggaatgtgtgtctattgtaagaaatagccagggatccccttttgtatgacgatggcagttttaaagtcaaagatattaagaacattaggatttaatgttgagttcctgcctcacctgtgggtttggggtattaaagtcctggattagggcatatcaaatatgtaggcctacatactgatttgtttatttgttgggtcattgctttccctagtccagaaaatcctgaggaaattaatttttttaaaaaagtcctttcaagaatggcactctgttgttatgagcttctccccatgtgggtttcttgctatgtaactgtcttccttttgttaatgccaagtgcatcttttatttcaggtaaacgactaaagaaaacacccgagaagaaaactggcaataaaggtaagaatcaagatctccatttgggaaggtagcattttccctccctcctcttgagactgctaatgaggggactggtttggttgttcgcagattgtaaagcagacattgcatttctgattgatggaagctttaatattgggcagcgccgatttaatttacagaagaattttgttggaaaagtggctctaatgttgggaattggaacagaaggaccacatgtgggccttgttcaagccaggtaccaaccttgttaaaatgggagatttaaaaaaaaaattattttgtaattgacacataataattatatatacttatggggtacatagtgatgttttcatacatacaatgtatagtggtcaaatcagagtaattagcatatccatcacctcaaacattgatcatttctttgtgttggatacattcaaaatcaaatgaggccgggtgcagtggctcacgcctgtaattccagcactttggaggccaagtgggtgtgtggatcacctgaggtcaggagttcaaaaccagtctggccaacatgtgaaacaccgtctctactaaaaatacaaaaattagccagatgtggtggcatgcacctgtaatcctagctacttgggaggctgaggcaggagaatcacttggactcgggaggcagaggttacaatgagccgagattgcaccactgcactccagcctgggcaacagtgagactatgtctcaaaaaaaaaaaaaaaaaagaaaaaaatcaaatgagaggagatttgaatgagtcttgaatgatgacaaatgatcagttcttttagtgggtacatgtcagttcagtataaacatttgagttatggacacactgggttcccaaactgtaagttcaggatctaagactgcctgggcagactgagtagatctgagtgcctcctttttggaataaaagaatttagaaaactgtgtgctatctatataagaaccagaaggtagactggagagtcctgttgcttacacaagtcacctctgcttatctactctgctcaattcctaatttctctcttctgaaggaagaagcagtgatatgtctattccacctccctattctgttattctttttagctctttccatattctcttggttggtgatctgaagcacgacctttctattttattcatttaaaaatatttattaattgctggccaggtgcggtggctcacgcctgtaatcccagcactttgggaggccgaggcggatggatcacggggtcaggagattgagaccatcctggctaacacggggaaaccccgtctctactaaaaatacaaaaaaaaaaaattagccgggcgtggtggcaggcgcctgtagtcccagctactcgggaggctgaggcaggagaatggcgtgaacccaggaggtggagcttgcagtgagccaagatcgtgccactgcactccagcctgggcaacagagcaagactctgtttcaaaaaataaaaataaaaataaataaataaataaatatttatttattaattgcttttagaaatagaatatgctcattatagaaagcttgaaaatacatagagcacaaaaaaagaaatgctctaaatcatatgccctagagataatcactataaaatggtttttttttttttttttttttttttttgagacggagttttgctctgtcaccgaggctggaatgcaatggcacgatctttgttcactacaacctctgcctcctggatttaagtgattctcctgcctcagcctcctgagtagctgggatcacaggtgtgcactactacgcctggctaatttttgtatttttagtagagacaaggtttcaccatgttggccagcctggtctcgagctcctgacctcaggtgatccacctgcctcggactcccaaagtgctaggattacaggtgtgagctaccacgcctggccccttcagtattttaaggaaatatttgactgtattattttttaaaaactcagactattaaaaatgccctgcatcctgtttttttcatcctttagtatttttagcattttctcatatcacaaatattcatcaaaaatatttcataatattccgctgcatgattagtcattcttattatttcttcactacattacacactacactgtgatgaacatccttatatcatctttgtgcccatctctgattatttcatcaggttagatttctaaaagtgaggttctgacttaaagcctctgatataaatagtgaaattgagccatgcacagtggctcatgcctgtagtgccagctgctcaggaggctgaggtgtgaggatctctcaagcccaggagttcaaagctgcagtgagctatgatggcaccactctactccagcctggacaacagagaaagaccccatctctaaaaaaacaaataaatagcgaaattgcttcctagaaaggtgaagtagtttaaactactatcagcagtgtgtaaggttgtataaacagtgctattacaaatattaatttccatttcatttctgttattttttacaagtggctctgctcttagattagatagaatttttttggcatgagaagaaaatttaactgttttaacataatttaaccatttgtctctcacccttaaaaaaaatgtgttccttgtttcattgacttatggtatcacatttatacctgagtttgagcaagtctatttctttgattcatatgctaatccttacatatttttttctacgctgctttgattatcacagttttattgcacattttaacatcccatgaggcaaattcccctgcagtactttttgtcttgtacttttttctgactactttgacccaattctttttgaagatgaattcttcattaccttgtagactcatacaaagttttgtagtttttctgttttagaaagaccattagaataggtaaaccatgtcaagtttatatgtatgtaagtcaaagaacagaatatatcaaggatacaaaaatgagactaatttcataagtcataatctggatagttgaaaagtgaccacaagtgaaaaggttttcaacccatgaaatctgattttatgacccaatattccatcaggtatgtatgcagaaatacagtcagtgttctacttctccctcaaaaaatcttgaataaaatggctactgataatgctaagatcttaaattttgcactaggaaatactgactcatctagaaactaaacacaacagattgtgctgtggttgtttatactcaaaacggtctctgctgaacacagagtagttatataaaagtgagctgaaattcctttaatattaaatataggaaatgagatctcaaaactcttacaatacacataattttaaggtgcacaaatgtcattgtcattataagaaaaactcaatattgtaactttataattcatttcacctttgtccctttaaaaaaatgttgacggtcacatcaatgaaattgtttctcctgaacagagagctctgagttaatagatccacactacttagagcctctggggtcccacactggaacagaccctagtctcatacccagccacttcctcatttagtttagctacctggtgcccaactctgcggacttctgttaaacccgaggctctgagccaagcccgatttcaagttctccgtatagtttaggcatggactttgcagccagacaacttgaacttaaaatgcagctgtgtttcatcaggcaaactccctaaatgctctgagactcagtttcttcatttacataattgggataattccaaccttatagagctatgatgaaatgaggttttacatgtgttatgcttttggcttattacccagaatataataaatcctcaatatggcaattatttgttacacctctgaaatatctccaataattcaagtaaggatgcaatgcctcagttgactatgtactatggaattaagaaagaaacttgtgtgttgtctggttttaaaactgttttttaaggcatgtaatgttgcttattttacctttttaattctccctgaataacattttctttcttccactcagtgaacatcccaaaatagaattttacttgaaaaactttacatcagccaaagatgttttgtttgccataaaggaagtaggtttcagagggggtaattccaatacaggtaagtagactttgatacctgggatgtaacataggagagggttatcagtgatcagacatgtaaaacagtattatgctattttatatgagcagatgtgaaatcctcctggaactgaaatcttggctaggtctgcatttgatcatctgagataaattttcaatttataatggaagtataccaaagtgttgatatttcttattttaaaaaatataaagcatggtgatttagaattctcatacattggattgactagatataacattggagaagtatctctttgtaatgctaaaaagaagtgaaaatcaacagacttatctaatgaatgcagatgtggcagaaagaatgagtagcactaccgttgactctgaagagagacttcttagaggtactaatcagtcaccaaagggctacatagagagcacatgcatggaagtgggaatcagttttgtgtttctaactggcgattgatgtggggtaaacaaatgtgaggcttctaggaggtggagggggaactaatatggcttgtgaagataaataggcctggtagataattaaactttcccagctgatgcatctgttacagaactgggttctatataattcttttttgtgtgccccgccccactgccagttctatatataattcttaaactttgcagcatcaaatgctacagggaaacagaaatgtggtttgagcagtggtaaaggctatttgtttgcttctttttcaaatttaggaaaagccttgaagcatactgctcagaaattcttcacggtagatgctggagtaagaaaagggatccccaaagtggtggtggtatttattgatggttggccttctgatgacatcgaggaagcaggcattgtggccagagagtttggtgtcaatgtatttatagtttctgtggccaagcctatccctgaagaactggggatggttcaggatgtcacatttgttgacaaggtaaagtggtgagggttatcttctgttacagtgatgggtattccattttggacctctaagtgcagtgctgactgcctcttatctagattaacttgaaacattcaggattttccagtttttaagaagaaacaacttttgatccttttggatatcttttatgtgtctcccccattaggctgtctgtcggaataatggcttcttctcttaccacatgcccaactggtttggcaccacaaaatacgtaaagcctctggtacagaagctgtgcactcatgaacaaatgatgtgcagcaagacctgttataactcagtgaacattgcctttctaattgatggctccagcagtgttggagatagcaatttccgcctcatgcttgaatttgtttccaacatagccaagacttttgaaatctcggacattggtgccaagatagctgctgtacagtttacttatgatcagcgcacggagttcagtttcactgactatagcaccaaagagaatgtcctagctgtcatcagaaacatccgctatatgagtggtggaacagctactggtgatgccatttccttcactgttagaaatgtgtttggccctataagggagagccccaacaagaacttcctagtaattgtcacagatgggcagtcctatgatgatgtccaaggccctgcagctgctgcacatgatgcaggtaaggtccttgttctttataggagaagggaacagaaaaaacggttcagtgaatttaggagtaaataaaaatttaagcatttatttcattaaacaaacacctgtggctttacccaatattaactgttaaagcagccctactcatctcattctacagataaggaagcaaacttcctggaaatgacatttctagtaagtggcaaggccaagatccaaacccaggcattctggctccagagtgcacattcctaaccactgtattgttgggagaattgccatgagaaccatgtcacattaaggaaatatgcttatacatatacaattaaggtgctcatatttagctcaaacttggactatatctccaaatagccagcttataacctaccatgaatctgccattcagtaatttatcctaactttcttgtgtatgaaacaggtaattgctctgtcaccaggctggagtgcagtggcatgtagtgagctacaacctccaactattgggctcaagcaatcctcctgtgtcagccttccaaatagctaggacgacaggcacatgccactgcccctggctaatttttaaatttttttggggagagacgggggtctcactttgttgcccaggctgatctcaaactcctgggctcaagcaatcctcacaccttggcctcccaaagtgctgggattacaggcataagccaccacacccaaccctaacttttattttagtcaagttttgtctggcatgagtttcctaagataaggtctcccatagactttacctatcccatcaaaatttccttggccaggtgcagtggctcacatctgtaattcagcactttgggaggctgaggtgggcgggatcacctgaggtcaggagttcaagaccagccgggccaacatggtaaaacccagtctctattaaaaatacaaaaattagctgggtgtggtaacatacacctgtaatcccagctactcaggaggctgaggcacgagaatcacttgaacccaggaggcagaggttgcaatgaactgagatcgtgccattgtactccagcctgggcgacagagtgagactctgtctcaaaaagaaaaaaaaaaaaaaaaaaaaactttttcccccccgcttaagataataaaaacacactctggtgttataaaagggtataagaagggtttctttcttcctcaccccagccttaatattacttttggcacaggcctcgttcctgaagacattaacgtaatgtgttagagatcaaataggccaacaaaaagctaagattccctttctgaggatataactgagtgacaggagggaagaatcaatggacttgttttttttaacactcttctgtacctcattttccctacttaattcctaatgacataacctttttcctttctacacattagtacctctgccaatgtactcacatatttttacagatactgatgaaagattattcttaaaacagagaacacatgcaatttaagttccacatctagcttgtaaaaagtattttttatacatcagcaactagcctgtgaagtaaagacctgtttactatcatattccttaatacttagcttactgaacttatagttaacaggattgtattcaggctataaagtgattaggttgattaaagttcaggaggctggactacaccaatattgattcgtgaaaattatcccttagtgatattgaaagttgcaaaagccagaaaatagggtaggattttaggggtagatcacaacagtttttatttattttcagggtcttgctctgtcacccaggctggagtacagtggtgtgattatttttttttttaactgtaattatatgctgggcttgagctaaacaatctgaactagaatgtagaactgaaaagaagtgaggaaaactgagggggaggaaaaaaatattttgactttttttttttttaaccagggagtgagagtcaggaaaaggagactggaacaattggacattgttccaagtagcttttacatcatctaaacctgctgcatatcttaggtatttaccactctgagcactgtataccactagaaggggaatgaaaccttagatctgtagaggaaaactattacagaaactccaaaagttatagaaaattgcacccagcattagatagatggtactctacactaagaatctgctaaatgaggccaggtgtggtggcttatgcctgtaatcccagcactttgggaggccgaggcagatggatcgcttgagccctggagttcgagatgagaccagcctgaacaacatggtgaaaccccatctctacaaagaaatttaaaaattagctgggcttagtggcatgcgcttgtagtcccagctatttgaggatgggggtgctgaggaggatagtttgagcccaggaagttgaggctgcagtgagccttgattgtaccactgcactccagcatgggcaaaagagccagaccctgtctgagaaaaaaaaaaaaaaaagattaaatgaaaacttctacaattgggattggggtgaatccaactaatgtattattaccctaaatgtacagttgtactaaaagccttctagtaactaaagtgaatggaaatagaatacctcaatgaaactggaagaaattactccagtttcataagatccctcttgggcagtactttttagtcactagttttgctttgggattataggctgacattttctgattattagacagtttgccaatataaagattgaaatggaagaggatttttcattatcagaggactagtcaccattcctcaaacaatgcaacctttgaacacttttgctatttacttatcccatctcttgtgccattcttccttgctttaatggattgtgactctgactccagtatactgtttgatgcaggccaacctcatacggaaaattttcaccatccgcatttactgtaggattttaaaaaagatactgtggatcaggttaaaagtcttcttctattcctagtttataggtgtgttctgtcattaatggatattgaactttatcaaattatttcttatcagtgatgacttacctgttaatgtggcgaattacagatatagcagagtttctggtttggaccactcttttgccactctcgtcacaatgactgtgaaaacttaatttgttcaggggatttaattgtccagaaattagtaagcagttttcgctgcaactatgtaacagtgtatggaaaacatatagacataattccatatattagctagacctgattttcaattcactttaaaatgttttcattgtaggaatcactatcttctctgttggtgtggcttgggcacctctggatgacctgaaagatatggcttctaaaccgaaggagtctcatgctttcttcacaagagagttcacaggattagaaccaattgtttctgatgtcatcagaggcatttgtagagatttcttagaatcccagcaataatggtaacattttgacaactgaaagaaaaagtacaaggggatccagtgtgtaaattgtattctcataatactgaaatgctttagcatactagaatcagatacaaaactattaagtatgtcaacagccatttaggcaaataagcactcctttaaagccgctgccttctggttacaatttacagtgtactttgttaaaaacactgctgaggcttcataatcatggctcttagaaactcaggaaagaggagataatgtggattaaaaccttaagagttctaaccatgcctactaaatgtacagatatgcaaattccatagctcaataaaagaatctgatacttagaccaaaagcaacattcgttctctaaccattctgtattgattatataagcaaaatgaaaagagaaacttaaatgaacacagctctttaacatggttcaggtacacatattttgacccaagtggatattttcttaaaaccaatcaataatagctagctattactgcagactataaaatctggatatagaaaggagacctgtatcaaactgcttttgtagtgtgttttcataacaacttatgactaaaaatatcacactgaataagagagcaggattgccaggtatttttctatttctctccttaattttatatgtatatagatatatttggcttatattctaagtcacctaagtacttaaaagttaagttggtaaagtatttactgactgcttataaacatttaaagacaaagacatttcaaataactgcagaaaaaatattgtagtttgaatatttaagcaataaaactgctagtgagttattgt

SEQ ID NO: 139 - DNA, 32744 bp, Homo sapiens
  source 1..32744: mol_type = other DNA
gggctttgcttccggggcggtaagggcagccacgtcatccccccgctccgctccccagccgggcagtggctcgtgggagccaagatggcggcggcggcggcagcgacagcagcagcagcagccagtattcgggaaaggcagacaggtactgacttattctcttctccttgaagcttcgtgactgccccgacgacatccttctcctctggtgcgtgcagctcagagaccgatctccaggagtttaatccagtccctagaacatcaagagcccctcccctttgagtttttggggagaagttgccattagcttgaggactcggttcctcctgtggtgcaggagaaggagcttcagcggtgggcggattgctacggccctgctcttgtctccttcctagtgggcatcagaaggccatcacaacaagatctagcagctgatagcttcttatctatgttgccacctatgaggtctccgagtttctgtgcgtggttcagttctcctggttttgatttttaagagaactcccattttctgacactcagagaatttaggtattttcacagcggcttgctttgcgccacttctctacttcggaccagtcttttgggggtacctgcagaaaaatgcctggtgataaacattttctccttcagcttgctggaaggcattgaagaatggcaaaacaaatgaattaatagctttctcattttaattgtttgacacattgttttaaaataatattttatcttcaatagagcatgtttatatagcttctatttatgcagagaaatgtaaaaaggcacatattcttctcttgagttttgggtttttttccgtcttagaaattagttttgccttacttgaaaacttctcatgacaacttggtttatacctgttagctacaaactaaaggtttatacttgttaactagttgtcttaaaagttttcaagcaatttattctgaggagctaatagaaataaggcatcaagaatgtgcatacttggaattctgtttcctgaaattatgctctgttggatataaatatgaataggaaaataaatttataattcatatgacctacagaagggatttgggctgtacttgattccttcctttggcatttaaagaaaaagtgatagacttcaatttagtaatgacacacaaaagatactgagttgcgttctgcttttcccagtaaataatttagtataacctatcaggtgaagtcaggcataactaaatatagggaagttcaaataagatttggggcatacctgccattcgttgtatatgtttaaacaaatggaagctccatttgttttaatactgtgtttctgatgactatactacatattaaaataacgtgtcagtaaaactgtaccaatacaagagagctttttgaaaaataaatttgcgtggccgtaaacttgtatgcagaaattttgtagatcattaaaatctaatcgtttgtatttctgcagaaataaacatagtaagattttacagaattactaggtagtgctagatctattttttatcaaatttttactgtcattgaattctgccttattttcagaggaaggtaaatccttgtatatatattataatgcagaattagctatttccctcatgcctatggagaatgttttgggagataactcacagtccttaaatattctagatactagaatatttgggtggatgagataatagttggcatttattgagcatttactattgttaggcattgcattaggtgattatgtattatctccattttacaggtgaggaaagtaagatagaggtaaactaacgtgcctgtttcttgctttgcctgcctgaaaaatctttattggtctcctgaaaaatctttattgatcttttgaaggtcatcccacaagccatctcctttcttcctggttcactgtcccctctatccataccttcagttcaataggtagaatcagttgcctcctgctccgtgttactgttgttcttcattgaatgcgtcttcgttacaggttcttgcacatcttcccagcttctcaacattgcagggtcccattagtgttctcatctagcgccttagctttcagtattatctgtatgttgatgattcccaggtttatatccctagtctggccgtcccatctgaactcagtctactccatatcagttaatggcagttccgtccttttagttgttcaggtcaaaaaccttgaagttttcttgacttgtctctttcatgtctcatgtaagatctttcagtaaatcttgtcagttctactctgaaaatacatccaggatctgactgttgtcattgctattccgaggtcctgtccaccatgaatttctgcagtaacctatttggtctctttgcttttacaatcctgttctccttcattatttttcacacagtacccaaactgatcatgccatatgtttgctcaaaatcttccagcatcttcccatttcaaccatgataaaagccaaagtgatcttacagtgttctacaaggctttatacgatctggtttccatgtagcttttggacctcactccctatttctcttccctctccttgaacccaccaggaatgctcccaccttcgagcctttgtatttgtttcttctttgtggagtactgtttcagagataatctccatggctcactccctcacttcctttaggtctttactcaaatgttaccttctcaggaggctttccccaattattctgtttaaaattacacctcaactccatcttcccctttcccaatcttacctttcttcaaagcacttaccatgatctacataccatatgttttactttttttttattttattttttttatcccccaattagaatgaaagctacttgaggacaggcgattttattcactgttttgttcagttgctagatccccaataactacagtgcctgtggtgagcactcatcaaacgtgttgaatgaatgaatagtgtgtatgtaagtaatgacattaaccaagtctaggaatatggatacaggttgagtatcccttatccaaaatgcttgcgaccaggagtgtttttgattttggaatatttgcattattactggttgagcatcccaaatttcaaaatccgagcaccagcttaaaaaattttgattttggagcatttcaggtttcagatattaagacttgggatgctcaacctgtagtatatttagagccaataagaaaaatggtttgtcatttcagataaagtcatggtttaagccttgggtaaactctgataaaagtaaaattacgttcttgtaaactctgaacacaggccgtgtactccattaacaaatcctttttgttataggtataggtatacctatataggtataggtatataggcatataggtatacctatataggtataggtatataggcatataggtatacctatataggtataggtatataggtatataggtatataggtatatcaataggtatattgatataggtaaaaggtatatcaaaataccttttaataagttagccaaggctcaaagttggagaaaatctcagactgggctgagaaggcgaatgtaggattatcttatttgctgctgctggcctctttcagttagctaaggcctaactgtgcagcatactaaacacctgaggctcacatggcagctcaggctttcgttcttccaagttgtcaggcttcaagagtgtgaacagctgttcccagaaacagggtttcctccctcttgggcgtgagtgccagggtggtggtgtctttattgcctggaggtggaggaagagctctgcaaatgcacagtgggagagttaatcctgaaaccccctccgtgcttcctgtgttatttcagttttaagtgttaaactgtttttttgtttatattaaatatatttaatattataaatacattaaataaaatacatttttatttaatgtaaaacctgtgggcctctgaagtaggtaatattggtaatgtgtatttttggctggacattaggtaataacattttaccaaaaattatgtctgtaggtgtatggtaaatacacctgatagcaataacttaagcgtgccctgagaatgaccctgtattgcagacacacctggatatgtgtttcaagctagggaatcaaaatggcccacctggagattcattccttgtctgtgaggaacatctgagcccccagcccatccagtgaaacataggccatgcagtggatcaaggccccgagttttgggttgaatgaaggttgccaggtggaggttgttagggaaatgttaagtgaaaatgctgtataaaccacatttttgctatataaaccactttttgcatgcagttatggttctcctgcccagcgcattgccactgagtatacagttctcctgtccagcccactgtcactggactctcctatgtgtgttgcccccattaaaaccctgtgtctcatttcctggctccgggtctcttcttaggcctctcaaacatgggtatcttccccactggaggcaataagggttcggcacaacagtatgtacacacacataagtatgcaaatgtatcactgaagtacaatctgttcagtaatagcagttttaacagcattatacctacctcagcaagcaagcatttaatagaagtttttcttgtgagtgaatgaatatgctgtaagttgatattcaggtgattttagtattacatagttctctcgtaggactttggagtataggttattctgtattacttaaagcctgatgcaaatgtttttaacaatcaaccaagtggattttaaggctgtcaattttataaaaattaaatcaagaaattacaactagtatactctcttgaatatttggccatctcagtttcacgaagaagtatattaagggattttcattttctgtaacactgttacagatgagtgataaataacacaaaatactgtaacagacccgtaactgtgatttttgatgttgtatatttgcttagctggaattatcagttatctactatatgggaaagtctgttttcccaagggacatagaattttaagcaacttttcggtgaatctgacaggataaattgtttgtaaaatatactcttacataactatagacagatctgtatgaaggttttgtatatgaaccaattgaatatgccatggataattttgtttttagaaagactgatccaggccgggcgtggtggctcacgcctgtaatcccagcactttgggaggccaaggcgggtggatcacctgaggtcgggagttctagaccagcctgaccaacacggagaaacctcatctctactagaaatacaaaattagccgggcatggcagcgcatgcctgtaatcccagctactcgggaggctgaagcagaactgcttgaacctgggaggcagaggttgtggtgagccgagatcacgccattgcactccagcctgggcaacaagagcgaaactctgtctcagaaaaaaaaaaaaaaaaaaaaaagaaagactgatctttctcactaggccactcacacttaaaaaaaaaaacagacagacagactgatccttctcactagaccactcagacttaaaaaaaaaaaaaaaaaagacttaccttaatctatgctttcagccagacagtacacaggcaacagcatcagtatattgaggccattgcaagttcttcctgaacatttcccgcgatttcatctgtggacagatgcttattgtgttttgggaaatctcccaaatacatgtcaattagctgtcgatggaatagtcttacaagatctgacccctagttctacacatatagtcatttggttaatcagttttactagagttgattagtttattttgctttggggtagtgaatgatgatggaggaaaaataaaatcctaaaaaacaatgacaatatttgataaaactttttattttcagtggctttgaagcgtatgttgaatttcaatgtgcctcatattaaaaacagcacaggagaaccagtatggaaggtaagagtttatcttaatgggaactgatttctgtttttctcagcccttattggtggtaattggagggaatttattgtaatatggaagaagtaacacatattagttatcatgaatgttttatccttatttaacatgatctcttaatatgaattgttttgacagacattctatggagtgagacaagtgataaaatagtaattttcatctagggagtccagttgatctctttggtaggatgtcactgataggtctttttcctggttgatattttgttccttagcttttcaagtccagactttggattttataagcttgctcggagttagtcacattcagagggcctggattattttaacaaactcatgagaaaatgatctgtaaactgtaataccactttaataatttatgagatataaaacttaattgaaccagaaagcaatctacaatcttttcctttgagaaatactggagagcctttaaaaattccaattctttaggcttcttcattttaaacttcatgcagactctctttcttcagatgttataatacagttgattgggtttaaacttactggttaacagtctctttatatttctctcttgctaaaaattaagaacaaatcaacatgtttagaatttagggtgttttgaaaactctcttgagtctttataagtcctttgggttaactctaaaagtagttaaagttgtctgtattgatttcatagtttaagctccagagtattccctaattttctccttcttgttcctttgtgggcatcttcctattgcctcttgcataaactatacttgcttgtttctaagaccaatattgagcttttggttgaaatagtttgagaatttcttgggtacaaatttttgtcagatacttttcctacccatcactttttatatcattaaaattaataatacacatgtattgagattaaaagagggaagatttttgaaagatgcaacgtgaaccttttataactagagcagaaagatttttagcctctttaaaggaaatcctggcatttaagaaaatgtgttttcataacaacatgtttcattctctcattaacaatttcttactccataaataattattgaggtagttgtgaaaaatgcttaccagttgaggatctcttttatttgtcttaaccgtgaaactaattttgagttaaaaagcccatttggagttcttaccacacctcaaagctgtctgttttaatactttgagaatgtgaggaagtgtatttgatagactaagtctatcaaatactctttagggacttaatttttttttttttttttttgagatggaatctcgctttgtcgccaggctggaatgtagtggcgcaatctcagctcactgcagcctccgcctcccaagttcaagtgattctccttcctcagccttcagagtagctgggattacaggcacgtgccaccacacccagctaatttttgtatttttagtagagaaagggtttcaccatgttggccaggatggtctctatctcttgacctagtgatccgcccacctcggcctccaaaagtgctgagattacaggcgtgagccactgtgccacagccagggacttaattttttttaatgagtatctttttaacctgagatgcttaaaatactaaattttttattgtggtcctggaacttgttatatattagttttgaaaatggctaatttttacatctctgtttttagaaaagatatatgtgaactggaaaaaaaataagggtatgaacgtgaattggctttaagttcaaagtttatgatagcttaaggattttatagtctctatttttttaaaacctagaaaaaagaattttataagaagaaattgatataattatttattttagcctgagtagtaatgctttaagaacgtattactgcctggatggacatttgggtaaataatgatggaaaatattaaattgaggcaaggataacaattcagtatatatgatgtattaaaatttacttcaacattgtcttaatataggttcactattggttgttcactgataatgatggaaaatgttaaattgaggcaaggataacaattcagtatatatgatgtattaaaataaaatttacttcaacattgtcttaatataggttcactattggttgttcactgataatgatgacacatggttttttttaataggtactcatttatgacagatttggccaagatataatctctcctctgctatctgtgaaggagctaagagacatgggaatcactctgcatctgtgagtttttacatatttctaatagtggtattcatttaaagaacatttatagagaaaaatagtgttaggttacagtatttatgtagtattgaacattttttccctgtatcttctttattcaaccccttatttctgggatttaaaaaaatcctcagtctgaggctttataatttcagaatttaaattttctgccttgtggcttttccttagatttggtttaccctctatgtaaaggaaaagaactagtaatcttaaggtctcttccagctctaaaagtgttttgttcctttaatttaaatacacagattctccttgacctacaatggggttacatacttataaacccatcataagttgaaattttgtaagtcaaaaaaatgcatttaatacacctaacctaccaaacatcatagcttagcctctcctaccctcagcatgctcagaatacttacattggcctacagttgggcagagtcagatctaacacatagcctcctttataataaaaccgggcacggtggctcacgcctgtaatcccagtactttgggaggccaaggcgggcaaatcacaaggtcaggagttcgagaccagcctggtcacgtggtgaaacgccatcttcactaaaaaaaatacagaaaattagccaggcatggtggcaggcacctgtaatcccagctacttgaggctgaggcaggagaatcacttgaacccgggaggcagaggttgcagtgagccgagactgtgccactgcactccagcctgggcaaaagagcaagactctgtctcaaaatttaaaaaaaattaattaattaaaataaaaataaactgttgaatatctcacgtaatttattgactgcagtgctgaaagttgaaaacagaatgtttttataggtgcttaaaatatgatttctattgaatatgcactgcttttgcaccatcataaagtcaaaaaatcctaagttgaaccattgtaagtcagggagtgtctatatttttttaaaaaaaaggaatatctaattaatcattaatatgaaaaatttaagtgactatgaagtaatgactgttaatcaccatagtgggctatctgtgttgtcttaactgttaagtttgtgtgattatattgcttctgatatgtttaataaaaataaaacaaatgcagtactttatgggcttgcctagtagaacatttggagaaggggccaggcacagtggctcatgccagtaatcctagcacttctggaggcccgggtgggcggatcacttgaggtcaggagttcgagaccagcctggccaacatggtgaaaccccgtctctactaaaagtacaaaaattagctgggcatggtggcgtacccacctgtaatcctagctacttgggaggctgaggaaggacaattgcttgaacccaggaggcagaggttgtagtgaaccgagatcgtgacactacactctggcctgggcagcagagcaagattctgttgaaaaaaaaaaaaaaaaaaaaaaaaagaacgtttggagaaggactgtgttcatggatagatactaatacttctgtatactaaaagagtccaattttatggtgttctaagctatttgcattttgttctatttatgatgttataaccaatttttatgatatcatatattgaattgaaatgtactcttactgggaatatagttttagattttcgataagtaacttgacagaatctggtttaatcagctcaaattcttcagttgtataatgagcatttgttaatagactgttatagtttgtcaattccaaatgtccttttttacatttctgaaattaggatctatcttatcactgatgatatgtcataactggcagcatttttatttctcagtagtatataaaatatattttaaaaattatgttttaaaattgttaccaccttgggtttcatgaaatacggtatttgatgagttttcctttcatttttatgtcagactgaaataagcaggtttgctttgataatgtgttaatttttatggactgaagtaaagtttaacttcatgctatccttggaaattgtggtttattaataaacattgagtgccattgtctctgtactaagtgtttaactcctttatttactaatggaaggactgaagtttagaaggcttaagtgattgtctcacatttgtacaaccagttaataacagagccatggccacattgcttgaccactaattctgtgctgtttatctactgaactgtaatggctcagtaacagtaactaacagaagtgaggccttactcagtacttcattcaggggtaataggatagtctaccagtttgagagtctcgtaatctctgcctaacttgctacttgccaccagagcatggaaatattacacagctaccatggtgaactcttgtgtactttgcctccaaccattctcctctatttgctggagaatactgtatcagttactttataccctgcaagctggtttaggctaatttgtaggaaacagtaattacaagtttccacagtatgaaatggtggttgtagcccattagacagttggacaagcagtgtgaaaaagaccacaacctatggcagccatcacattatcattcttgatatcagtggcaacagttattaaacacagactcactggcagcatgtgcctctttcctctctctccttgattatagaaggatgactagagagaggtgaatattcctcatataagcatggtttgatgttgggatatttgtatggaaattgttcctaaattgtaaaaggagaaaactgtaaaatgacttaatctataagatgcttacattctcttatgaaacaataaatagacaaaaatagattgtctttaatttttaaggaaacatttatatacctttcatttaaaaaatatatttgatttcatgtttggttaaatttttttatagcttctaaagaattgcttctaaaatttttttcattgcgtcccctagctttctgattttcccctcagagagccacactttcctcacattcacccttcccctctgaccaccacatttctatgaaaagtgggaataagattgattctgaatatgttttagttctcattcaaggagagtgttggtagaaaagaatgtctgaccataagcagtgctaaaagtgtgagcagaatagaacaaatgaagactaacaagaaattagggtcttactaatgctaataaataataacaacactgacatgggagaaagataggttaactcactgattaattgcaacaagagcttttagagcactggttactgtccttgagctagtgaactcccattttgaggaatattgttttaaataagtgaataaaaaaataagttttagttccttatgtcttctaggcttttacactctgatcgagatcctattccagatgttcctgcagtatactttgtaatgccaactgaagaaaatattgacagaatgtgccaggtaatatgggttcttattttctggactcctgaatttggaaatggatttttttttcaagaaaaattcctagatgtccagggtgaaaaatcagaaattcctatgcctactttctcactctgatttttgagactatctttgaattccaaatagcctgaaagacttaaaacttttggctgaagaagtattatacagtagtcctctcatgtccacagtttcactttccacagtttcagttatccacagttaaccaggtactgaatatattacagtattttgagagaccacattcatataactttcattacagaatatattttctgtaatatatttcattacagaatatattttataattgctctattttatttctagctattgttgctaatcatttaccgtgcccaatttataaattataaattaagttttatcataaatatgtatgtataggaaaaaacatatacggttcagtactacctggtttcaggcatccactggagtcttggaaaataacccctgcaaataagggcaaccactgtactggtaaagtctgagtctggctttaacaaacagaaagcctaggtatattgcctttctaacttatatagggttttccttttctaaaataagggtgagattaggaagtccacactggtgcagaagtactataaggtaatcaaagacccaggctccttctgtcgctgatcattcgtctttagtttgttggttttccttgtcttgcttgtcgctgcgcctgtaggcatcaaatctatgttcacatcaacaagaagagggacatggactgtgccagccctgactgttgattttgatcaggaatttaagcctttccagaaactcccagaagacctttatttatttctcactaggtagaatcagttacaagggtggctgcaaaagtcaatatttagatgagtcaccccaaagaaaatctagcaagattcttttagcaaggaaaaggagaaaagtagatattggataggtaagtaacagtgtcttccacaagtcacaacatctttgttattgactgttgaatcaaattgctatttaaattgttagtgacgtttgcaaattttgtgtcctgtgtagctttatgatgcccagctttctcttttaccctgcgtaaactcaagtatgctattcatgaaagaggtaccacttgcaatctcttcttctttcattatttaaataacacctttattgaaattataatttacataccatacaattcacacatttaaggagcacaagtgtatggttcattggtttttaatatagtcacagagttttgcaaccatcaccacagtcaattttagaacattgtcattacctcaaaaagaaacctggtaccatttatcacatcctcaaccctcccccatcctcttccatccctaagctaccttctgtttctgtatatttgcctactctgaccattacatatgaatgaaatcctataatatgtggtcttttgtatatggctgatttctcttagcataatgtttccaaggttcatccatattgtagcatgaattggtaccttattccttttcgtggctgaatatattccattgtatggatgtacgaaattttattcatccttttaccacttgatggacatttggattgtttctaccttttggctattaataatgttgccataaatattcatgtgcaggtttctctgtggacatgttttcaattctcttgtggccgtaaacacataggaataaaattgcatggtcaaatgataactctatgtttacctttttagtaatagactgttttgcgaagtgtggttgcaccattttatattcccaccagtagtgtgtgagggttctgatttctccagatccttgctgaacacttactatccgatatttttattgtagccatcctaataggtttgaagtggcatctcattatagttttgatttgcatttctgtaattaatgatattaagcatcttttaacatgcttattggccatttgtatgtctttctagaaatatctattcagatcattcacccagtttttaattgggttgtctttttattgttgagttgatagaattctttttctgttttggatactagacactcacaagtttatgatttgtaaatattttctcccagtctatgggttatcttttcattctctggataatgtcctttgaagcacaaacatttttgattttgatgaagcccagtttatcggtttttttttttcttgagttgcttatgcttttggtgtcatatttaggaaaccattccagattcttgtgttttcttctaagaattttatagttttggctcttacctgtaggtcttgattcccctttgcattatttttatatatggtgggatgtaggtgtccaactttattcttttgcatgtggctatccagttgtcccagcgtaatttattaaagagactattctttccctagtgaatggtcttggcagccttgtcaaaaatcagctgaccacagatatcttgtttgatttctgaactctcagttctattgcattgatatctatgtctttccttatgcctgtaccacacagtgttgatatctcttgcttgatagcaagttttgaaattgagaaattgtgtcctccaactttgtactttttttcagactgttttggcttttcttgaatttccaaattacgattagcttgtcataagttttgtgcttcttttgttaaatttattctttcatgtgtttaatgcttattatgaatggaattcttaattccatttttaggattcttcattgcaattgtataaaaattcaattgatttttatgtatttatcttgtatcctgcaaccttgctgaacttatatgtccttttgaaatgtatgcatcattctttgaccacttccttactttctggcacaataagatgttccaatatagcctaggattttactttctctgtctcagcccaggattcagacatttttctgaggagctctggttgctttctgtaaagaatggtatttaggaatcaggatctaggcattaggtatattcattgtgactagagtgtcactgttcttaggtcctctcaatggaaaaagttaggaaattatgtatttatacatacacttttatatctgtatttatttctacaattctccctctcttcccctcacctatccagataaacagataacctccaaaactgtttcagctcagcaacacaggattcactctagcgtttcccttttctctttacaaatttgtaactcctttctcagagtgaaaaacatggttcccagtatcgtgaacatattacttatttctcaatcctcatacataaataatttcttgaccttgattgaaccactaccctgatcaccttcctcacaaaggctccaacccctcaatgtttcacattttaacatcgctaaaatcaggtgcatcttaaaattgatcatgccacaaaattttattggcatcattaattcttagtgttacataaaatgatggttcttgttacagtcaatgacatcttagatttaaggaagtatggttatttcgatatctatttgctaaaagtataagaagataagtaaatttgacttaagaatttgcataacttaaattgcactacttttgagcagttgaaaagaaatacctctagaattggtaattggatttataacttgtctgtgtgcaatgaaggatttgttgtgtcatcacatgtccagaacagttgaagatcgtgtctgccaaatataacaagcattttactatattagtggaccatatctggatattttaagaagaatgcagataggctgtatgaaagcagtttgtactgtattgtaattaatgagattttgttgataatataattttattactttattaagaaacattttagttacatctgataaccagataaccagtactacttcaaaggttttttctcttgggatactttttttgattgtcatttaaatatcctgtcttttaaatataactttgccttatagtagttgaaacatatgtattcatggtcttctttatcctataagaataaagttttcattgtattgataggatcttcgaaatcaactatatgaatcatattatttaaattttatttctgctatttcaagaagtaaactggaagatattgcaaatgcagcgttagcagctagtgcagtaacacaagtagccaaggtaagagagtttggtgggttgatgacattttgtcaatgtaaaatttaacactgttctgaaacccgtagttggcatagatatctatttgacagatgaccagaacaacagaattgtttaggctcaatacttttataaagagttctgataatataaattatattcaagttgaactaggcaaaataagccaaactaaaggaacctattatttaatgaatttgaaagacagaaataaaaagcagaatgagttttgctttagtctgtgatttgtataatatttttaggtcaactcagaaatcatttgacagttgtattgtcataaactgtattgaaagtatgttgacattgttttatctgtaatcattataatcatcatactatttccagatattttttttacttaggaaagaggatccaaagtgcccgtgttgcatattgagatccaaagtgcctctgttgcatattaagagaaaaagaacccatgacaggcctgcaattctacatcatagtgactttttagtcaggttcagcttcagttataaatcaatttgtaaaatatatttcaggttataatcctgtaatgctctgtgtttcttgaatttggacaagatatgcattaaagttccagacaactatctaggacaaataaaagactaaacaaccatgcatatactttctattctttttctactgatagatttttcattgttagagttaaatagaccactaatatttctgattagtttttgaggcttatgcctttaatctttgtgctcaaaatttattaacttcacataaaataatgggaacaacttttgttttccttcttgttttgttttgagacagtgtctcgctcgcccaggctggaatgcagtggtgcaatcactgcttgctgcaatcttcagctcctgggctcgtaccaccccacccagctaatttttttaatatgttgcccaggtctcaaacttctggcctcaaacagtcctcccacctcagcctcccaaagctctgggattacaggtgcaagccacctcactcagccttaatttggttaactaaattcagtgtatttcaaatagttctcttaatttttctcctactctgcacttccaaagaactggcataactttttcccactttattagaaaagttcttggtgtaaaacaattactgtgacttttttaggaaaatgtgatgaaaatgattgttaaaattgtatgttttcttcaaaattgatatccattcccatcacaaccacaatttaagttcttgtatctgcttaaattttgttttctgaaaatgttattctcctccttcatatttattgcccaaagacttgtttttattgccttaacttactctttactcctcattcttgttcaattaggctgttacacagtacaatttttagttattgaatgtaattaggattttttttcatttctaccattggtaggttagagcaaactaaatttactttcaatatggctatattgtaagattgatttgtaaaccttttcttttgtttctaggtttttgaccaatatctcaattttattactttggaagatgatatgtttgtattatgtaatcaaaataaggagcttgtttcatatcgtggtatgtaaaaatagaaatgttgcaattctttgttaacaaaatgaatggtatactgtaagaaaaaaagtgaatatgtttaatggacttcaaaaccagcttgtttacagcagtagagctatagaagctttttaaaagcacacagagaaaacaaggctcagactgaattttattacatttaaacgtttaataaacctgttttgtaaattcaaagaagtaccaattctctgaccttttctatacccccacagcaacttgcatgaatggttcactcatggcaagtaagacaatattttagtagcagatttcaaatttatcatctagtactttgatcttggacaagaacaagttagcttgcttctctgtgcttataaaacactggaaccagatgataagctccctgagagaagagaatgaatcttttggtttcattgagctctagagcatctgttcttgtggaaattcctaagaggatataagtatttgctcaattgttcatgtgagagatttttgacaacggttattattcacagaaatctatttacagttgcattttaaatgaattagcaacttatttaagttacatattttaaaacctagttttccttaagcctttaaattgaatatgaattgtgttatattgtttataaatctggtaaagtaaaaacaagcatctttactttattcttgatggattaactcatattgaacagattaaattctcctaatcagtcccctttaacaagtttaatcagaaaaattggtgtgttgaattcccttaaacattttaaattttattaataaattcagaatattaagtggtttttttttaggtactgtacttcatataccagaccagacaagtttataattctaacaagcaaaatctgcccaagtgtttaaataattctgtaaaaataattaaatttgtaatgagtgtaaaatttgctaaatattcgtatacttataagtttaattacatttttatacctgccagcttttttgaaagatcacatgtttgagattaattacaaatttcaaagtgtaatcacatggctaatcacccagattcttaataatgataatagtaatagcttgctctatgccaatcagtgttttaagcatgttacaatatgagctaatttactcctcagaataactttatgaagtagaaattatttccattttcaagatgagaaaacagacatagctgtaagtaacttgatgaggaaatggtagagccagcttactaaacacaggcagtctcactccagagataacattctttatcattatgtaatcatatacctaattgtctcaaatggtacaatgctttaaaaattttaaacaaatattcctaaatatgattatattaatagcgtggtattgatttgcaaatatttttcattctaaactttccatggattgggagcaaggagatttattatctcagtcaaactaaggctgctatcttagacaaagcaactgttatctcaagttgaggttattgattagcagtttatgactgttaggtcataaacataaaagttagggttacttttcattgagagatgtggaactaggatataggactcaagggctggatgcttccatgtagatttttctagtgccagtaattaacaaaaatgtacaagtgatttaactaaaaggtttgaagtgtctacagatcacttgtgccactgattaatgaaatgaattgggtatgtttccttgaattgatatcccctgaattcacataatgcaaattgtattctttatgatattgatttcttctgattgaaatagatggtatttgcaacacctgagtaatggcccatttccttcttttagattctgtgttgcctgattgaattattttattatgtgttgtctgggtgggccacgctttctgtagatacttggagatatccagttgaattctgctttcctcttatagtaaccacaagtggtattaaattttatatgtgttttcactttcaggatattgggacattaaaaatactttgtagataatagtttagacactaatctttcaacatatagttattgatgtacttcatcagacactgggccttgatattgtgagaggaagataagtaagtcaaggtctttgtcaaagacagtctactcaacaatgtttcttaaagtgtagccccaaggcctatttgcattagaattgcctgaggtgcttgtcaaaattataggttgttcccccgccaccccgagacagagtctctctctgtcgcccaggctggagtgcagtggtatgatctcagctcactgcaacctctgtctcccagtttcaagcaatcctcctgcctcagcctcccaagtagctgggattacaggtgtgtgccaccacacctggctaatttttgtatttttagtagagacggggtttcaccgtgttagccaggctagtagtctcaaactcctaaccttaggtgatctgccccctcagcctcccagagtgctgggattacaggtgtgagctaccacacccagcctcaaaattataggttttttagaattattcatatccatacagaatccctaaaggaaagggataagaatctttaatttttaaaaacgtccagagaatttttccccatattccctgggtgattcttatactcagtaaagtttgggaactacttatatacactcttgtagattagaagagaaatttatataacttaatataaagaaaatgatatgcaatgttggttgtgctgtaatttatttgcatttccttttctggctgtagttgggtaacagaatcagtagtttcttgaggccatctagtgtttatgaataaaactatggaatatgatatttattttcctttttgtcaaaaattttgtaagtttacatcgtggggttgtttttcttagtagtagtctcctaatgtctgatattaaggtagtttgttgtggttatttatttttctctttgaggtggtataatttttaacagatatttattcatttaaaagaagtttaaagcaggcagggtgtggtggctcatgcctataattccagccctttgggaggccaaggtaggaggatcgcttgagcccaggagttcaagaccagcctgggcaacatagggagacccatctctacaaaaaaaattgtttaattagccgggcgtggtggcatgtgcctgtggtcccagctattctgaaggctgagatgggaggatcacttgagcccaggaggttgaggctgcagtaagccgtgatcatgtctctgcactccctcctgggtgacagagcaagatcctgtctgaaaaaaaaaaatttaaaccaaaaaatttcacttgctgagttttattatatgtcaattaagaatttagtaataattttaggagttttagaaagatgaggcataagtttgggtcaactttttctccttttcctatgtcattttagccattaacaggccagatatcacagacacggaaatggaaactgttatggacactatagttgacagcctcttctgcttttttgttactctgggtaagttttccagtctttctggttattcttcaaagtaaattatttaacaagtaattttaatgtattacactgtaatgtgattcgttctcacttacctggatctctagaggttctcgagtggagtaaaatatatattcaatagtatataaaaacaattcttccaataacttgatgtggttctcttaacatttaacagatctattgagttgtcattttagatgtctttggtagttataattttctaccatattatttgaatggcttggtggtgacttcacctatgtgcctgttaattttcttttaatatttcattatgaaaaatttcaaacacatttctaaatagagaaataaatgtttggtaactattaagttcagatgcccaaggctccagaaaacattatgtatgtaatactaatctacctataccttcaaattttatttttaatttttttttattttcaacttttattttaggtttgggggatacatgtgcaagtttgttacatgggtaaattgcgtgtcactggggtttggtgtacaaatgaattcgtcacccaggccatgggcatggtacctgatagggagttttttgaccctcatcctctatgctcaggtagaccccaatatctattattctcatctttgtgtcttttctttttgtttagctcccacttacaagtgagaacatagggtgttttgttttctgtttctgttaattcccttagaataatgacctccagctatatctatgttgctgcaaagcatatgatttcactctttttttatggctctataagtattccatgatgtatgtgtatcacaaattgtttatccagtccacccttgataggcatctaggttgattccatgtctttgctattgtgaatattacagcaatgaacatatgggtagatgtgtctttttcgtagaatgagttatattcttttggctgtatacccagtaatgggattgctgagtcggatggtagttctgttttaagttctttgagaagcctccaaattgctttccacagtggctgaactaatttacattcctaccaacagcgtataagtgttccctttcctctgcaacctcgccaacatctgttattttttgactttttaataatagacattctgactggtgtgagatggtatctcattgtggttttgatttgcatttctctaatgattagtgatgttgagcattttttcatatgcttgctggccacgtatgtccttttgtttttcttgagaagtgtctgttcatgtcctttgcccatttttaatggggttgtttttgcttgtcgatttgtttaagttccttataaattctgttggatgcatagtttgcgaatattttttcccattctgtaggttgtccattcactttgctgatagtttgttttgctgtgcagaagctctttagtttaattaggtccaatttgtctgtttttgtttttctggtggttgtttttggagacttcagcatgaaatctttgccaaggcctgtgttcagaatgttgtctaggttttcttctaggatttttatagtttgaggtcttacatttaagtctttaatccattttgagtttatttttgtatatggtgaaaggaaggggttcagttttaatctcctgcgtatagctagccagttatcccagcaccacttactgaatagggagttctttccctattgcttgttattatcaacattgtcgaagatcagatggttgtaggtatgtggctttatttctgggttctctaacctgttccattggtccatgtgtctgtttttgtaccatgctgttttggttactaccgtaaaagccgtgtagtagtatacttcgaagtcaggttgtgtaatgctcccagctttgttatttttgcttagatttgctttggctattcaggctcttttttggttctgtatgacttttagaaaagttttttctaattctgtgaaaactggcattggtagtttggtaggaatagcactgaatttgtaaattgctttggcagtgtggccattttaatattgagtcttcttatccatgaacatggaacgtttttccatttgtttgtgtcatctctgatttcttttcgtttcgtaattcttgttgtagagctctctcacctccctaattagctgtattcctaggtattttcttctttttgtggctattgtgaatgggattgcatttttgatttggctctcagcttggatattattggtgtatagaaatgctgctggtttttgtacattgacttttgcatcctgaaactttactgaagctgcttattagttctgggagcctttgggcagagagtatggaatttgtgaggtataagatcatataacctgcaaagagatagtatgacttcctctcttcctattaggatgccttttatttctttctcttgcctgattgctttggctacgacttccagtactatgttaaatgggaatgggtgtccttgtcttattcaagttctcagggggaatgcgtacagcttttgcccatttattatgacattggctgtgtgtttgtcatagattactcttattattttgaggtatgtttcttcattgcctaatttgttgagggtttttttgtgtgtttttttttgtttttgttttagatgaagtcttgctctgtcactaggctggagtgcagtggcacaacctcagctcactgcaacctccacctcctggattcaagcaattctgcctcagcctcccgagtagctgggactacaggcacatgccaccacgcccagctaatttttctatttttactagagatggggtttcaccatgttggtcaggatggtctcaatctcttgacctcgtgatccacctgcctcggcctcccaaagtgctggaattacaggcgtgagccaccacgcccagctgagggttttttaaatgaagtgatggtgaattttttcaaaagccttttctgtgtctgttgagatgatcatatggtttttgtttttagttctttttatgtaatgaatcacattttctgatttgcatgtgttgaatcaaccttgcatcctgggaataaagcatacttgatcgtggtggattcatttttttggattcagtttgttaatattctgttgaagatttttgcacctgtattcatcaggggtatcagactgaagttttatttttttgttgtgtctctgctaggttttggtatgagaatgatactggcctcattgaatgagatagggaagagtccctcctcctcaattttttggaataatattagtagtattggtgccagctcttctttgtatatctgttagaatttggctgtgaatccatctggtccagggctttttctggttcatagattttttattactgattcagttttggaatttgttattccagaacttcagtttcttccttgttaaaccttggcaggttctatgtttccagaaatttactcatttctgttaggttttctagtttgtgttcataggggtgtttgtaatagtctctgacggttttttatatttctgtggggtcgatgataatgttacccttgtcatttctcattgtgtttatttggatcgtctctttttttctttgttgacctaactagtggtctacctatcttgtttattctttcaaagaaacaacttctggtttccttgattcaaaatgtaaagcactgatgtagattgtctaaaattttgtttagtatctaatatgtgactttgtgctttactatcactaatggatcagtttaaaagcctaattgcaattttaattttttagacacttaaaacctttttgttaaaatgattctcacactagattaataaaatatgtcacacaaaaaaattaagaactaccatgtatagtcttaagatttagacaaatgtttagacatgtagagaatttatatgcaaattgtatggctccctcctttcagggattttttttttcccttaatttccagccctgagctccaatttttgattcttcagctcagtaattttcctgttttctgcttgagttctttctcctgtgtgccatgtaatgtgtcaggtaccctcaggagaaaagctggttaaaaatatatattaccttatgtgattctcttctttcaagagttaacccctccagtttctgcctgctttgaactgctttcattgccctcatatggtttgttgttgttgttgttttatatataaagaaagtacacgtatacaacttttagtgttaaacagacataattttctttctattttgtcaccccacacggtctgtaaaattttgccaaatgctagggaggttgcactgcaacctctgcctcccaggttcaagcgattctcctgcctcagcctcctgagtagctgggattataggcatgctctaccacgcctggctaatttttgtatttttagcagagacggggtttcaccatgttggccaggctggtctcgaactcctgacctcaggtgatccgcccgcctcagcctcccaaagtgctgggattacaggcatgagccaccatgcccggccagtgatttatttttcaaaggagaaattgaaattattgccaatctgacatagaaggatgtcaacactaaattgttacatggggaaaaacaagttttagaacagtatatatactatcgtatttttgtttttttacatatacacacagacttagtagattatatgtagaaaacaacatggaggcatccatttctaattctaatgggggttgtgagggctggaatcaagagggttacgtttatacatttctaatgttaatttaaattttttattacaaacatttataacttttgccatcaaaagaaaacacagttttgaaaaatttgctattttgtgtttttacttttgcaattgactgagtatattcatatttcctatagaatctaaaatgtgacagtttgagcatataaatattacagtgttctcagtttgtcttatgagactttcagtgcagttggactttttttctatttaggatttcaacctatatgaataatgtgttttctattatttaaattggtatttttaaaaaactacaattttttattgtcaatttgtaaaataaacaaaaactagcagtccccaaactgctgaattagctaagctcttttcattcttttcttttaagtcaaattaatgtgaaacctgtgagtagagtaagcttatgtattgaaactgcctagaccaggtgcagaggctcacacttgttatcccagcactttaggtggttgaggtagcaggatcacttgagctcagaccagcctggacagcatagtgaaactttgtctacaacctttcgagtagctgggaacacaggcacacaccaccatgcccagcaaattttttgcaatttttgtagagacagagttttgccaaattagccaggcttggtggcctgtgcctgcggtcccagctactcaggaggctgaggtgggaggatggtttgagcccagcaggtcaaggctagccatgactgcaccactacactccagcctcctagcctgggtgacagagtgacaccccgtctcaaaaaaaaaaaaaaaaggaaagaaaaactgcccataggggatcaaaatactgatttagtcaatcctttggaaaaaatgcagtcacattgattggtcagctccatataaaaatagttttcttctgactccctgttgttttctttattaatgggaaggttcatttctgaaacttatttttacccttgaaattataaatccttttatgtgagcttgtgagggaaattataaatccttttatgtgtgcttgtcgggggagggttgaaaaattaccttttgagtacagtgttcactgttcgggtgatgggtgcactaaaagcccagacatcaccactatgcaatatatgcatgtaagaaggctgtacttgtaccccctaaatatattttttagttttttaaaaattaaaaaaatgtggaaaaataaatacataaaatcgtgtgtaacgtgaaattgtatgtatctatcacatctgttatttttgatgctgatgtattttataagtatctattttaattaagagccaagatcatttctaacatttattgttaaaataggtgctgttcctataatcagatgttcaagaggaacagcagcagaaatggtagcagtggtaagttcatgcggatatcacgtggagataaataacattgtgtgaattgttttcccacaagtaacgcaactgttttgttaatatttaaatatatgattgcttggttgtaggtaccaatagcaaatatttttattttattacattgagattgcaccgaagataaaaagtaatcatttatttccacacgagaaagtaaaattatttactccggtgtgctattccagtcctatttctttttttaaaactaaaatgtatattcctcattcaaccttgtctctccaagcagtattttacacttatttgatcccccagattacttaatatttaacttcatttagcaaatattactaatcataaccatttttaaaatgaagtgctttttgctatcccactatattgaagtaaaatattaagtataaagtaggtgttcataaatttgctttaaagattaagaaatgagtaagggattagagaaattatagaattactgaaaaagaaggaggtattttggaactttattagcccaagtgaattactgactggtggaagactgccttctttcatatattccatttctcttctgaggcttcttgtacccaccactactttgttcactcctacccacccaagtcaacgttttctccatatagacaccttccttgataaaacagtcatgcttaggaaaagagtgtgcgtcattactgcaaatcgtttcccatagccaaagtaaaattagtcaatgaaaggttcttcttagtgacatcaggcccgactcacagtggaaaaggcactgatctttgttaagtccaagttatgatgatatggaagtggtaagacggagctaaaatatttagatattagatttgctatttgtaaagaaattccaggtttcttggttatgaaactaaaaacacattttgaattaacctccataaagttatatgaaactgttaagagttaatctaaaattttatttttcagaaactagacaagaaacttcgagaaaatctaagagatgcaagaaacagtctttttacaggtgatacacttggagctggccaattcaggtattactgttattaaatacacttgtaagactttaaaatatttgtagagtttttttgttacttttcttggctgatagaatatccttgtaattgaaatttgtttctttttaatgagctaatcaggatcaaggttttgactcatattgttcttaaaatacaagtggaatattttattcaatttaccttttggtaaaaatttctaagcattttatcatctataagaaaaatttttctgtgtataaggctttgaaggtcagaagccattttctttcaattatcattaaaccgcttggttatttttcacagagtgaaaaacttgtgatacttatatctgtttctacctttattaatctgatttccattttatacttaaatactaatagcctaaacttgaaaaacattttattattgttagcatttctagcataagtaaggccaatgtttttggctgcttattattgaatagaaatactaaaaaaccctatacattatagtatatttaacttctgattgttaatagtaatggagtaaagaagtaaagaaacccactcaaatggctgagaattgtttaaagaagagattatattctggaaaattaattcttaaccccagtttagatgaattaataaataaagcccaaaataaacagatgcccagagaaataactgcccactagaagtaataatttcataataactttctgtagacttcatctcaagtcaatttggtgtctcctacagccttataaactgcttgtataattgggagttcacactaacactgtgtttcaattgtttggttaactgtctcagtttccacattattttaaatggttctatgatttcatttctggtcttaagtattcttcaaaatgtttctcattaggtagaagaaaaacatcaaattctcacctgatctttttttttttttaacagaaccaaccactgtgtcatatcttacttaatagttccctttttatagctctctgggataggccttagaaaccagtataaaggcactgttttatttggataatttttttaaatttattcacattatcataatatgggcgtcttgtttctcaacttgttggatctatttcttaatcattttccttagtggtcacaaccttgctggactattgttaaatacatttgaatccaaccataggctggtgattttcaactaagggcagtttttgcctcccatagccatttggtaatgtctggagacatgtttggttgtcataactggtaggtgttactagaatcttgtatacattgtaggatgctgctaaacatcctataatgcacaccacaaccccctataacaagaaattatccagccccaaatgtcagcagttctagggttaagaaaccctgcggtaggccatcctcccttaccttccatctagctctggtaaatcatagtagatcgcaagggtgccactctgactttttatccccgagtcaatgcagttaggaaatccactgtcctatacccagaagagtgtaatgagttaattctattgcgaaaggaaatatgtaaacagatagtgatgccttttgaaaagtggtgcgtactcctgatatgatagtgcctctaaagcagatctctaaaacttctgtagacacatgataaccaaatgactgtgcctcaatttgctttcggtggtactttatttcacatctaaattgtaataatggagcaacagtacatgaggtatcatatgccttctctgttaaggggataataatataattaggtaccattatggcattatgttttcattttgtatattatagtggtatagcgttttttgaggctcttctccagagtctgcttgagtttgtgtttataggaaaaaaattataatttatgaaactgtcaaacatttgtgtaaatttataagctcctactctttgttttccctgaagctgacaataactattccttattgcctttttttacagaaacatcaaaaacttctgagtagaagcagcttattattttgctaaccacaaaaattattctttagaaatatttatatagatttttttccttaaagtttcctggcagggcatgatagttcacacctgtaatcctagtactttgggaggccaaggtgggaggatcacttgagcctaggagttcaagaccagcctgggcaatgtggttagttgccccgtctctaaaaaaaatttaaaaattagccaagagtggtggtgcacacctggagtctcagctaattgggagactgaggtgggaggattacttgagcctgggaagtcaaggctgcagtgacctgtgattgtgccactacactccaacctgggtgacagagtctcaaaaaaaaaaataaagtttcctaagtaaaatttataatctggcatcatacacaagctgtaactagtccaaagcattactgtaattgtgtgaccacgttaaatttgttttttaaaagccagcctcccccgtctctataaaaatgtttaaaaattagccaggtgtgtgatggtgcatgcctgtagtcccagctactccagaaaccaaggcagaaggattgcttgagcccaggagttcaaggctgcagttagctatgatcgcgccactgcactccagcctgggtgacatagcaagaccctgtctcaacaaaaagcaaagtattgtggtgcttgcttcagcagcacatatactaaaaaacaaagtattaggaattgtcaatattagcatactattattcatatcaaaatggcatatactggaaagtagtagaatattttagatgtatacactggtatcaagagttatgtaatttttttatatgtatatttacagcttccagaggcccttattagtccttgttgacagaaacatagatttggcaactcctttacatcatacttggacatatcaagcattggtgcacgatgtactggtaagagactaaatgcagcacttattactgaaatatagtaacatgcagtgttccctttaatttaaaattaacatcatggctacagaaacaaaaatgagaaggatggaactgagacctatgaacaaaacaagtgatgggatttggtattactgggtgtggatgctggaaaatgtgaagcattaaagtttagtttcaaatttatgatctttatagggtaaagtagtggttttgttggccatggaaaagaaggaaaagaaaacaattgaagaaaatggattattttgttttatttttaattttctaaccgaataagtaaataaatgtgttctcccttaggagaaaagcagtaatttctcccttttctctgggagtcagttaaacctcattttacgttaaaaaaaaaatagtattttttatgttacaccatatgttttctgaagtaattccacatatctgattttatgcttatagcaaaaatttgtatttatgcatatgtaaatttagctgctaagtgttgtgtttagcatgtgacatacacaggtgataaaacacggcttcagtcttcaaagacaatggaaagaaaataggtacacaaataatttctctatgagacactatgtaatcaggccagaatagtctctatttgatagacagacgttaaagaatttgaactcaaatcatgggctttgttaaaactaacactgtagtttactaactcctagctcaggactctagggattacactatataatcatatcatgatagtaaagactgcccaacatgtcatataaacagggaatgaaagctgagtgtagtggctcatgcctataatcccagcactttgggaggccaaggcaggcggatcacatgaggccaggagctaaagaccagcctggccaacgtggcgaaatcctgtctctattgaaaatacaaaaattagccaagcgtggtggcacacgcctgtaatcctaactatttgggtggctgaggcttgagaattgcttgaacccaggaggcggaggttgcagtgggccaagattgtgccactgcactccagcctgggtgacagagcaagacctagtctcaaaaaaaaaaaaaaaaggaaatgaaagacatgcaatagatgatttggtttatttctttaaaacctggatattggctctaaagtgtttatttaaataaatcagatttagaattactgatggaaattggccattcttctatgccatgactctaggatgagtgtcgaagaaatagcagtcaactttaattcagtagacagggcaagaagaatcaaagggactcttaaattaaaccctaagtagtagaacatggaatcaggctttaggaggtcaagtaagaggtgggagaggaggaattcagttctaccaatatttgagtgcctactct

SEQ ID NO: 140 - DNA, 32744 bp, Homo sapiens
  source 1..32744: mol_type = other DNA
cacgatgcaccgcgccagccccgaccgacggacgagactgacccggacttaggcgttccgcctggcccggcggcgaggaaaaaaggcagttttgaagcatttagtggcaaaaggggtaggagacggctgctgaagtgtctactacattcaggggacctggaaggcttccagatatccgcaatgaacaatgaaaagaaattgtgaaagaaggcgcttccctcaagccggaactaatgaactcctgggtcacgtggtgcgcacgcgccaaaggcacacgataaaggaaaacgcgggcttatcgtggcctttaaaatccggcttggtgagcttgggtcgcctctgaaggagaaccattttccatctctttcatagttttttcccccagtcagcgtggtagcggtattctccgcggcagtgacagtaattgtttttgcctctttagccaagacttccgccctcgatcaagatggtggttggacggccttcctaacctttacggggcctggcggtgctgacgcctgagctggtaggggtggagcaggtaggaaacagcaaatgcagaagctgctgcgcggaagtcggccatggactggaaagaagttcttcgtcggcgcctagcgacgcccaacacctgtccaaacagtgagttttgggaggggcagcccgttgggatggcccggccctaaactcctagaggtaggggggaggtggggaggaggagcaagggggagccgccttttccgcttctgtgaaacctcccgacaaaggaggcggagtggaatgtggtttaaggatcccgataggtttgacccaaactttcctggggcagaatctagaggaacgaaaaacttagctttagtcactgacttccatggtcttaatctaaacttgtgaagaataacttggaaccccggctccaacaacgcctgaaccccaccaggacctataattgtcctcctgcctttttactgtcacgctttttgcttccctcgtaatccattttatatttcataatccatttttccttttatttttctccttcacattgcttattaactaacctcgttaaatctacctttcctattccacacccgcactaagggctgttgaaagtggctggagaaaaacagaaccttggtgagttgtctcacttttttttttgagacggagtctcttgctctgtcgcccaggctggctggagtgcagtggcagcatctccgctcactgcaacctctgcctcccgggttcaagcggttcttctgcctcagcctctggagtagctggaactataagcgcgcgcaaccacggccggttaatttttgtatttctagtagagacggggtttcgccatattggccaggctggtctcaaactcctgaccttgtgattcgcccacctcggcctcccaaagtgctggaattacagacgtgagtcaccgcgccccgccgagttatctcacttttaatacaagtccactaatctaaagaaggtgttttggtcatgtctaccgtgttttcctggacgttcattctcctacattcaattttcatctcccaaactgccaatctgtgttttcctaaatacacttttttttttccgatacaggatctccctgtgttgcccaggctggagtgcagcggcgcagtgaagtattgctgcaacctcgatttcctgggctcaagggatcttcccaccccagcctcttgagcagctagaagtacaggcacacgccaccacacccggctaattttttatttttagtggagatgaggtcttgctatgttgcctgggctggtctcgaattcctggcctcaggcagtcttcctacctccacctcccaaagtgttgctattacagacgtgagccgccgcacccaggcaacactcttttacactattcttctcatctcctacacctgcagtctgtcctacccgcttcttactttaagctgatgaacttgtattttaatatatatctcattaagaaaggagaagcagtcggccgggcgcggtcgctcagtcctgtaatcccagcactttgggaggccgaggcgggcggatcacgaggtcagcagatcgagaccatcctggctaacacggtgaaaccccgtctctactaaaaatacaaaaaaattacccggtagtggtggcgggcgcctatagtcccagctactccagaggttgaggcaggagaataccttcaacccgagaggcggagcttgcagtgagcccgagattgtgccactgcactccggcctgggcgaccgagcgacactcagtctcaaaaaaaaaggagaagcagtcagaggagaacatcacctgtcccccttaacatttctttcagccccacaaccccacagttagttgcccatacactctggcttcactgttaaaatgatgaactgatgccgggcgcggtggctcaagcctgtaatcccagcactttgggaggccgaggcgggcggatcacgaggtcaggagactgagaccgcagtgaaaccccgtctctactaaaaatacaaaaaattagacgggtgcggtggcgggcgcctgtagtcccagctactcaggaggctgaggcaggagaatggcgtgaacccgggaggcggaggttgtagtgagccggagattgtgccactgcactccagcctgggcgacagagcgagactccgtctcaaaaaaaaaaaaaaaaaaagatgaactgtccatgctcctatttaagagtccctccagtccaccactagattgcattcttttccctgtattcactgacttccttccagcctcctcctttctttcctacatcatcagattttccttctgctggatcatttacaccagcacaaacgtgctgttaatatcacccatctttttaaaaggtgggtggtcgggggtagtggtgttgggaggctcggtggctcattcatgtaaccccagcactttgggaggccgagatgggaagatcgcttgaggccaggagtttgagaccagcctgggcaacatagtgaaacaccgtttctacaaaaatagaaagtaaaaaattagcccgggtggttgtgcaccactgtagtcctagctactcgagaggctgaagcagggagggttgtttcagtctaggagtttggggctgcagtgagctatgatcatgacactatactgcagcctgggtgacaagagccagaccctgtcttaaaaaaaattcatttgggctgggcactgtggcttacacctgtaatcccaacacttcgggaggccgaggtaggcagatcacttgaggtcaggagttcaagaccagcctggccaacatggtgaaagtccgtctctactaaaaatacaaaaagtagctgggcgcagtggtgcacacctgtaatcccagctacttgggaggctgaagcgggagaatcgcttgaacccaggaggcagaagttgcggtgagctgagattacgacactgctctccagcctgggcgatagaacgagactacatctcaaaaaaaaaaaaaaaagtcatttgatcccacatccctctccagcttctgttgcatttctctgcactcttcataggaaaacttctcaaagaagttacctgtacttggctgggcgcagtggctcatgcctgtaatcccagcactttgggaggctgaagtgggtggatcacctgaggtcaggagacagaccagcctggccaacgtggtgaaacgctctctctactaaaaatacaaaatttagccgggcattgtggcaagtgtctgtaatcccagctactcaggaggctgaggcaggagaatcacttcaacccaggaggtgaagtttgcagtgagccaagatcgcgccactgccctccagcctgggtgacagtgagactcagtctcggaaaaaaaaaaaaaaaaaaggaaggtacctgtacttgtactttgtgtgctttcttgaccccttaactcttaaacccactgcattcttttagcagatatttattgcatgcctgttttgtgccaagtaccgttgtagcttatagcagaacacaaaaaaatctctgtctttgtagaacttacactttagtgtggagagaaataataaaataataagtaaattatataggttgtacagcacctgcgtaagtctggttccttcatcagtgtactagatcctatcctttgtagtagattccatttttgcctgctgaaggatgtactcttgcagttgtcccttctcctgtatcatcagtttttctttaatcattcccatcagcatataaacatgctggtatttctcccatcttaaactttcttgacttaatttccacctctagccattcctcatttttctgttccccttatagcaatatttgttaaaacagttgttggttaaatctgtactcgtctcgaattcctgcttgtcaagaatcatcagtgactgctatattgttaacttcagtggtcagttgtcagtcttgactttgcttgaaaaattttgcagttttctacaacagcactgagccatagtaaagaaattaacttataggtttggtctaaggttaaaaattaacataataggccaggcatggtggctcatgcctgtaatcccagcactttgggaggccgaggtgggcagatcacctgaggtcaggagttcaagaccagcctgaccaacatggagaagccccatctctactaaaaatacaaaattagccaggcgtggtggcacatgcccgtaatcccagccactcaggaggctgaggcaggagaatcccttgaacctgggaggcggaggttgccgtgacccgagatcgtaccattgcgccccagcctgggcaacaagagtgaagctccatctccaaaaaaaaaaaaattaacagatgcagcagaaatgcagtcataaaaggaattcaaggaaacaattacaggcttgttgggaaggaaatgagaccagaaagagtaaaataacttttgagaaaatagatcacagaattcaagagctcagtgaggctgaagtggaaatggtatggcagtgaggttttgaattaccagaaaggatgatctgagagtatatttgagcttaagatttcagaaagggatcaagtaaaatctgtgatcttgtcatagaaccaaatggcagaatgaactagaggtgaaagtctttggagttgcaggacccatggtcacccacataaatgtttattcatcctaaatgattgcaggaccttgtgaagaacactgtgtaccagtcaccatagtccacaaataagtggggaggaattggctgaatgagacagccacgtgccaatagcaggcgagttgcagggtaatagagccctgagttttgagcttcagacagaggatgagtttttttgtttgttttctctacattaggtagagaaacagtgattatgaggctgaaactccatgaggtcaggggctggggctgtcttgctcacccctcattccgtgtctactacagcgttctctgtacatagtaggtgctcagtaaattcttttcattgaatgaattaggagcactctacagagttctgtaggagaggtaatttgaggaagagactagctttagcgataaacagaagtagagggagcatgagaaatggttgaagatgtagaggaggctgcttcagtagagggtagtgattcttggtatttcagaaaagttaatatgctcagtgtctaagcacaattgtgaaggcctttttggcactgcaactattttaattaaactattaatataatatataggatgacctgagtaaaagtactgcttgattttaaaagtgctccccttaatctgttttgttaccagaaaaaaaaagtgaacaagaattaaaagatgaagaaatggatttatttacaaaatattactccgaatggaaaggaggtagaaaaaacacaaatgaattctataagaccattccccggttttattatagggtaagtagtgtctaatcaaatgtcctgcagagtttaaaaatgaaatataatttttggcaaggcagggtggctcatacctgtaatcccaacactttgggaggctgaggcgggaggatcacttgagtccaggaatttgagaccagccagggcaacatagcaagatcccatctctaaaagaaattttttaaaaaatagctggacatggtgatgcatgcctgtagtcctagcttctcaggaggctgaagcaggaggattacttgagcccaggagatcgaggcagcagtgagccgtgattgtgtcactgcactccagcctgggtaacagagttagaccctgtcctccccacccccagaaaaaaaagtagttttaaaaataggaccagaattttatgttttaaaaatagagaattatattttaaattttatatattattttattgtaattgatcttatcactattataaaacattttgagcccaataaaatcccaagtttagatttaagtgggtatgtaaacacaaagttgttaaactgtgggctttttctttctgatttttattatagatattagtagtaagtattctattggattatgttatcaggtatacactttgttataaagttttaaaattttgctcaaggctaaaccgaaaaatagattatggaaaacctaaagaatttcacttgaggccaggcatggtggctcatgcctgtaatcccaacactttgggaggccaaggtgggtggtggatcatgaggtcaggagttcgagaccagcctgaccaacatggtgaaaccctgtctctactcaaaatacaaaaattagccaggcgtggtggcgcgcgccggtaatcctagctactcaggaggctgaggcaggagaatcacttgaacccaggaggtggaggttgtagtgagcccagatcgcgccactgcactccagcctgggtgacagagcaaggctctgtctcaaacaaacaaacaaaaaaggaatttcacttgattattttttccttgtgccaaaactctgaaaatggctatgaagggacgtatagacaaaatagaccttaagaaaagctattcatggtagggtcactgcactccagcctgggtgatagagcaaagaccctgtctcaaaaaaaaaatgttggccaggtgtggtgactcacacctataatcctgtcactttgggaggccatcaaatcaggaggatcacttgaggccaggagtttgagaaccagtctgggcaacttggtgagatcgtgtctctccaaaaaaaacttagccgggcatggtggtgcgcacctgtagtccccgctactcaggaggctgaggtggaaggatcgcttgagctcaggagcttgaggctgcagtgagctgtgatcatgccactgcattccagcctgggtggcagagcaagagcctatctcaaaaaaaaaaaaagaaaaagaaaaaaaaaaaagccgtttacaacctggcaatggtagggcaattcgcctgtagtcccagctactctgagagggtgaggaagggagaatctcttaagctcagcagtttgagaccagcctgggcaacatagtgagaccaccccacaccccatctttttgttttttttttgagatggagtctcactctgttgcccaggccggagtgcaatggcacgatctcagctcactgcgacctctgcctcccaggttcaagtgattctcctgcctcagccctcctaagtagctgggattataggtgtgcgccaccacgcccagctagtttttgtatttttagtagagaccgggtttcaccatgttggccaggctggtctcgtactcctgatctcaggtgatctacctgcctcggcctcccaaagtgctgggattacaggcgtgagccaccatgctggcccatcccatctttttttttagaggtctatttttttttcttaaggtctattttgtctatttaaaaaaaataaaaataaaaagctatttatacctgaaactgaaatctactgaaaaatacctatttagtattatacaagttaactggaatcttagctggatgttccttgaacctattaccttctaactctattaattacaacgttatttgcaagtatagtaaacaatgatttagctggtgttcttacagattaaggtatttatataagtgagttatccagatactgaaatatttcttcaagtgcaaatttttttcaaccgaacattttttattggaaaccttcctataatactatatacttctcaaccttttaagaatcatatgcctgtaatcctagcctatatttattgtagaaaaggaaaaaatatggctaaacaagttgatctcttcccatgacaacatcacccaacaatgtaaacagaacattttatatgaatctttctacatatttctgtgggtatctgtgtatttttttaaatgggattacatcatacatacctttactgctttttgcatttcacactctccttaaacagaggcagctaaataactgaatatttttgatagccgaggggagagagaagggaattgacatttattgagtgtctaagcactgcagagccctttgtattctttatctcatttaacctggattcttaaataatatgttactgttatcgaacataggttcttgggttctcaatgcaaaagggagagagagcacctgactctgaaaagagctggtagggctttttaaaaaaaaatcaggaattgatattagggtggggtatgcaggctgggctgggcaaagcagatcaggtagggtatgcaggtcagcattgtctggttgctatggttatcttgagcagcgggccacctggtctggctagaggcaacaaggctgtaaatcagttgttcagcattccttccccagataggacactcacttcacaactttggttatctcctagttactggaattcttttgagtaaaaggcatggtttggacattatggtgtcagtgaggtagtggtgtgggttttgtgatcagtgggaatgcatgaaaagagtgccatagtgggagtgagctgacccaagcccccattcctactctgtctcattcctaacagctcttggataggaatggtgtgaccccgttcctgagcccaggactgaactttcttgtacttccgggaccaaacctttgccttctttttctggttcctgagggaatctcctttttttcctttcttcgtgtcacttctctctttggccacctctagatcttagatggtctcctgtctgcagctatggatttgtaaaaaagtcctttcccttctttcttcttcctctccatggtcccactgcttcagagaaaacacctattatcttgagtcaccacttctctccttggctgattagctggttaactagccactagaacacaatgtcagtcacccccaactccagccccatccccatctcctaatgtttcttctgttgacgaagagttgaactctgtaaaatatttgaagagatttattctgagccaaatatgagtggccatggcctgtgacacagccttcaagagatcctgagaacatgtaccaaaggtggtttgggtgcagcttggtttcatacattttagggaggcatgagacatcaatcaaatacatttgagaaatacattggtttgatccagaaaggtgggacaatttgaagtggggcttccaggctacaggtaaattcaaatgttttctggttgacacttggctgagtttgtctaaagacctgggatcaaacagaaaggaatgtctgggttaagataagaggctgtagcgaccaaggttttatcatgcagatgaagcttttagctagcaggcttcagagagaataggttgcaaaatgtttcttattagacttaaagtctgtgttgatgttaatgccagagaggtataacgaggcatgtttgacccccacttcccatcatgccctgaaacagtctctcaggttaaattttaagggcgctgactgaggaggaagtccattcagatggttggggggccttagaattttatttttggtttatactcctttaactctgttccttctgatgggagggatggcatcttagttcctggaaatgaaagatgaaaaccataaccccaagttttgacgtaaggtttaccgaggtaatttaatggggctaagatgtagaaaaggaagaagaactctttaaagtaaattattctggctgggtgtggtggctcatgcctgtaatcctagcactttgggaggccaaggtgggaggactgcttgagtccaggacttcaagaccaacctgggcaacatagcaagaccctgcctctattattaatttaaaaaagaagaaataaagcaaattgttctaagtcaggttggaatgaatcattctaaagctctgctcatggaaatcaccccagttggcaaaccctcttgcctgggaggccaacataataggcactgccttgactgtctccaagaagaaaggtgatccaatctcaacaggcatgctttcctaaaactggacaagaagaataaatggtttttgctggacaggaagaattacaggtaagaaccacccaacaggttcttcttgcctgctacccagatagagccaatttatcaagatgggaattgcaagagagaaataatttcatatacatggagacagctaaatgggagacaggagttttattattactcaaatcagccttcttgaaaagttggaggctagggtttttcaaggatagtttggtaggcaggggctagggaatgggtactgctgattggttggggatggaatcacagggatatagaaaaacagtcctggtccttgcgtgctgagtctgcttctgggttggggccacagaggagtggctggtctgagaggggccattgggtagtcagaagtgcaaaagcctgaaaagacatctcaaaaggccagtcctgtgtactacaatagtgatgttatttacaggagtaattgaggatgttgcaaatttttgtgccctctggaataataactgctaatcatttaactgacctgcatcttagcagaattctggtccttcgcatcctcctgacctggtgtcctttcattagttttacaaaggcagtttagttttgggatgagctattatcatttaaatcataaactaaatttctcccaaatttattaatatcttggcccatgcccaggaatgaccaagggcagattggaggttaaaaacaagatggagttggttaggtcagatctctttcactgtcatcattttgtcactgttataattttgcaaaggtggttttgaaattgtcaatctccagttaatcctcatttaattcttctatatcattcttttttttttttttttttttttggtagatggagtctcgctctgttgccaggctggagtgtagtggcgtgatctcagctcactgcaacctccgcctcctgggtttaagcaattctcctgcctcagcctcctgagtagctgggactacaggcacatgccaccatgcccagctaatttttgtatttttagtagagacggggttgcacagtgttggccaggatggtcgatctcttgacttcatgatccgcctgcctcggccacccaaagtgctgggattacgggtgtgagccactgcccccagccaattctatatcattctaaggaagccagcatgcccagccaattctgtgtcattctaaggtgacaatagaaacacagtgctttaagaaaataaaatgaaacttggtctagactagcttttagaatggctttttcagggcagagatccagcctttctgatcaccgattctctgtggatcagtttttgttaaacaaatgttaagcacaattaaggtgagatacaagaaataattcgaggcggtggcatacagttattttatgaggccacatacattttataggatccagtagtctaaaatttacatgtagaaatttaccttgtattttcagctgcctgctgaagatgaagtcttactacagaaattaagagaggaatcaagagctgtctttctacaaagaaaaagcagagaactgttagataatgaagaattacaggtaagaacaaagcaaaaagttgctttagatgttaaccatttctcatttgtgctacttaaatcatgcaggatttcttggtgcctaatggagtccgtactacagagtggtactacataggctctgaagcagcagttcccaccagaagcagccgctgagtttgcatgggtcatgtaccccaaacatagtgttgtttgttatttttgtttaaggccctaggtgattctaatgtgcagccaaggttgagaaccactgctgtagggtcagactacagaggttcaaatcccagccctgctatatgactttaggcaatggacttaacatctctgtgcttcgattatcatctctaaagtagggatagctaactatatcatagagatgtggattaaagaggcagtgtatatcaaaagcttagtaggcactcaataaatgttatttttattgttagtaatcaaaaggataatagggcatgagattcatcttaatattgactctgccaacaaactctcattttagtggaaagcacacatttaactacatattaaaatcttgttgtttttaacttacaacatcttcacttccacaattctcttaagaacttatggtttttgctggacaaacaccagacaccacctatgattggagaggaagcgatgatcaattacgaaaactttttgaaggttggtgaaaaggctggagcaaagtgcaagtaagaataatataattaacaaaagaatgtgttatgttaagcattttaaatgcctcaaatattggctgggcacagtggctcacacctgtaatcccagcagttttggaggctgaggtgagaggattgcttgagctggggtgtttgaggccagcctgggcaacttagggagatcttgtctctactaaaaaaattatctgggtgtgggggcgtacacctgtagctactccggaggctgaggtgggagaattgcttgagcccgggaggatgagctgtgattaagccactgcactccagcctgggcgatagagcaagaccttacctttaaaaaaaataaacaaatcctcaaatattaaatgaagtaaatggaatgacatttgagtccatttaagttactaattaaatttaataaaattatttacagtcaaaaaatcacattggtatgaagttattaaaataaataatatagccaggtgtggtggctcatgcctgtaatcccagcactttgggaggctgaggtgagcggatcacgaggtcaagagaacaagaccatcctgaccaacatggtgaaaccccgtctctactaaaaatacaaaaattagctgggcgtggtggcgtgtgcctgtaatcccagctactcaggaggctgaggcaggagaatcgcttgaaccctggaggcggaggttgcagtgagccgagatcgtgccactgcactccagcttggcaaaagagcaagactccatctcaaaaaaaaaaaagaaataatatagtttatgacactttcagccttaagacagacgaaagcaaacaaaaaagaatgcaaggccaggcactgtggctcacgtgcccatctctgcaaaataaaaaaaacttttaattaaaaaaaaaaagaatgcaaacatttatgacttaggctaggcatggtgcctcacgtttgtaattccagtgctttgggaggccaaggcaggtggatcacttgaggccaggagttcgagatcagtcagggcaacagagcaaatctctgtttatatatatatatttatctttttttttgagatggagtcttgctctgtcgctaggctgcaggggagtggcgcaatctcagctcactataacctccgcctcctgggttcaagtgattctcctgcctcagcctcccaagtattattgtattaacaaaagaatatgttaagcattttaaatgcctcaaatattggctgggccaatataaatacaatataatacaatataaatacccaatacaaatactttttgtatttttactagagacggggtttcaccatgttggccaaaatggtctcgatctcttgactcatgatgtgcctgcctcagcctcccaaagtgctgggattacaggcaagagccactgcgcctggccaaatctccatttcttttaaaaaaaaaaaaaagtttgacttaatattttaagtttttgaattataaggagtctctattgttctttcatttttaattgtatgaatttatgccattgtttgctaatttatgtagaagtcattttcttttatgttggcagatcatttaaatctttattttcttttcttaggcaatttttcacagcaaaagtctttgctaaactccttcatacagattcatatggaagaatttccatcatgcagttctttaattatgtcatgagaaaaggtgattcatttttactgtgcttgaactccttatctgggaatcaagtaggtttttggtctgtgcttttataagtatttcttctatgtgaaatcactctaagtttgaatagtagaatttcttatcttttgaccaagatgtgttacataaacttgggttagcataaaaaaacaaaaattttttaaaccctcatgtgtcttaaagataatagtagactagaaatattaagagctgaaccaagagttttaatgtatggtaatttgaaataattttaatttactgataattttattttaccagtatattacaagttgagttgactgatagtttcaaacccaaagctgtaatatcagtttcaaggagcatcaattaaacagcttggacttatgattcctacaagtgccataataatctgtgaaagcctattgtatacaatctttaataattggttgctgtaattaacctcagaaataaaagcagcttcactgaaggcataatattatactagctgtccctgtttggtggaacaccaagtttaattggtaaagaacagtatcttcaaggtgtcaattttattatagctttagtcatggtagaattgttgaactcttccattctatggttttttgtttcaagcaattttgtggtgagaagaaatgtttttagagttactagattagcttgtctcaaatctggctctttatctcctttttcatatctgaaggatagatcttaagaattactttcattttcttgtttattgtcagtttggcttcatcaaacaagaataggactcagtttatatgatgtcgctgggcaggggtaccttcgggaatctgtaagtgttaaccttatagatattatattaactcttatagacactaaaatgtaaactgtagttatcactgggtgttgggattacaggctgttctcataatactttgttttatttctgtctgtgtgtgtttgtgtgtacatatttagttttactgtaacaaagcaacttgtacactttcaacttttaaaattgaacatcatctttccagtgaaacaaaaaacaaatttaaaataaacaaaattacaatagagaatgtcaattccaaataagatcctacaggttctactgattctcccatggagtagcagccttcaagtcatcattaagagagaatttatgctgggtgtggtagctcacacctgtaatcccagcactttggaaggatgaggcaggcggatcacctgaggtcgggagtttgagaccagcctgaccaacatggagaaaccctatctctactaaaaatacaaaattagccaggcttggtggcacatacctgtaatcccagctacttggaaggctgaggcaggagaatcacttgaacccaggaggcagaggttgctgtgaaccgagatagcgccattgcactccagcctgggcaacaagagtgaaactccgtctcaaaaaaaaaaaaaaaaaaaaatgtattggctgggtgcagtggctcacgcctgtattcccaaggcctgtactcccagcactttgggaggctgacgtgggcgggtcacctgaggtcaggagtttgagaccagcctgaccaatatggtgaaattccatctctactaaaaatagaaaaatttgctgggctgtggtggtgcatacctgtaatcccagctattcaaggggctgaggtgggagaatcgcttgaatctgggaggcagaggttgcagtgagccgagattgcaccactgcactccagcctgggcaacagagggagaccctgtctcaaaaaaaaagagagagagaatttattttaaaggtgtcattttaaactgcaaggatgccccttaaaaatcacaattaaacatgccaaaggaaaagcaacgttgtcaaaatgctcactttaaactatcaaaacgtttcaaacctaccctttgctgacctataaccccattttgtaaaatttattttctttttttaaataagagacagtagacaaggatgccgggcgtggtggctcacgcctgtaatcccagcactttgggaggccgaggcgggcggatcacgaggtcaggagatcgagaccattctggctaacacggtgaaaccccatctctactaaaaatacaaaaaaaaattagccgggcgtggtggcaggcacctgtagttccagctacttgggaggctgaggcaggagaatggcatgaacccaggaggcggagcttgcagtgagccgagatcacgccactgcactccaacctgggcgaaagagcgagactccatctcaaaaaaaaaaagacacagtagacaaggagatgttggtaaatgctaactgtccatattcacatagagacatagtatactctgcgctcaatagaggaaagcagctagaattctatgcacgactacacaagggcctagcaccttccagcttccagcagagcaaagggaacaggtttttctttttttttccatagacctcggtggtgttgattccatatagtttttgttgagacacaggatgtttccgttttggggtttggttttttatttttattttttttaacaaatgacatgtgttactaaacaaatgtttaatgtatattgactatacaaattcctttttagattctttttcttcaaactttaaaaaaaaaaggccttttggctgggcgcggtggctcatgcctataatcccagcattttgggaggccgaggtgggcagatcttgaggtcaggagttcaagaccagcctgaccaacatggagaaaccccgtctctactaaaaatacaaaaattagccaggcatggtggtggccacctgtaatcccagctactcaggaggctgagacaagagaatcgcttgaacccaggaggtggaggttgcagtgagcctagattgtgccattgcactccagcctgggtgacaagagcggactgtctcaaaaaaaaaagccttttaaaggggaaaataaaaagaatgtagcattttaacatttaaaaatcactgaaaaacgtttgattattcatgagtgatattaatgtgtcactattttttaaagggccaagaattccacccccccgcttttttttttttaagaaaatataagagaagccagacacggtagctcacgcctgtaatcccagcactttgggaggtgaaggcgagtggatcacttgatgtcaggacttcgagaccagcctgatcaacatggtgaaaccctgtctctattaaaaatacaaaaacattagctgagcatggtagcagatgcctgtaatcccagctactagagtggctgaggcaggagaatcgcttgaacccaagaggcagttgcagtaagctgagatcatgccactgcactccagcctgggcaacagagcaagactgtctcaaaagaaaaaagaaaatatgagagagaaaatgaatgtgactgtattcccacctctgggtttaagattgctaggtcagttaccaagaggctgcttgtttcctattaggcactgctgtaattaggccaagttatcaacagagaattataacttcatggtccaaatggctatgcttcttctgagtatgggtatctaaattatatggacttacttttcacctcaggcttttttcccaaatatacagtgctttttttaagattgtaggggagaggggaagggagttgggcatgaatataaactaggttaattaatcaaataattattcagatataagggttaaagaaatgtaaatttcttgttatagttcgtatggttcctgctataatttgttgcattctgttttgtctagatttctgtagatagaatctgttagctcattctgaacatttatactgtaaaacctttccaggggcacactacagttctctttaaggttcagaccaacttgagaataaaaggctcttgcttctggcaaggaagacataattagccacctgctggtactcgtttagaggtcaggtccaaaactggagtacttctctagctctgagaattcttgttagcagttcacttgatttataaaaacagcaatattgatttataaaaacagtcccctgttactgcttgtcttgcctctttccatggatggaaacaaagattgaaagagagatgagcaaaagggagagaaaagaaacagtgtacttctatagttgtttttaaaaaggaataattttccccttctctcaatgaaagaaaacacttttctcaaagtatttcttccatccttggcccattgccttttgaaacccagactttgtgtcttactaatttgaaaggcagtggcttccagaccaacatttataatctgagtagagtatacaaagttttattcacttattaaatcttattaagcatttagtagacatttatttgggggcaggtattattctaagcttgtagggctcatgttttactttgtgacaatctgtttgcccagatttcttttttttcttttttttgttttcttgcccagatttctgtagatggaatctgttagctcattctaaatgttatactttaaaacctttccagggacacagtacaattttcattcccttgtagacctattttttctagcagagtgggaagacagacactaaattataagcagataatatcaaatagtgacaagttatatgtagaaaataaaacagtaaactaggcaggaatatgactgggattgacagacgattttaggtaggctggaaggagcatctttttgagatagtgattaagttttagccatgaagtacgagaaagaagccagccttatgaagatgtagtatagaggaaacggcaaatacagtgtctccaaggcaaaattaagcctggacctgttctaggaacagaaggaagccagtgtggctagaacaaggactatagtaacagaaaatgaagttggagaagtaggcaggggccacatgtagggccttttgggccacagtaaggactttggatttattttgaggctaacgggaaaccatcggaagttttaagctgagtctgtcaggatatgatttacattttaaaagatcattctggatgctgtatggaggatgtaaggaactcaaagtacggccaggcacggtggctcatgcccgtaatcccagcaactttgggaggccgaggcaggtggatcgcttgagctcgggagttcaagaccagcctggccaacatgacgaaaccccgtctccactaaaaatacaaaaattagctgggtatgggggtaggcacctgtaatcccagctacttggaggctgaggcaggagaatcacttgaacccaggggatggaggttgcagtgagccaagattgagccactgcactccagcttgggcgacagagcaaggctccatctctaaatagataaataaatctggagtataagcaaaatatttaggcacctaccatgatagtccaggtgagatgatgggcccataactagggtaattggtggctgtagagaaagcaagaaatagattaattcaatatatattttggactcccctccttcccagaaaaaacacaaattgctgctagattggatgttcagggtaaggagtgtgaaggcattgatgaagaaaaagagaagccaaagacaagtcttaaatttttattttgagtaactgttggaatagaggaaaagcaggtgaggaccaaggttggagatgacaagagagccccattttggatacttcaagtttgagatgccagttgtcctataaacttgaaagtatctcagatctaccagaaatttgatatttgaaatggttaaagcaaaaataacattgttaaaataagtataagaaaccatgggaaggcacagtggctcacgcctgtaattccagcactttgggaggccaaggcaggcagatcacttgaggtcaggagttcgagaccagcctggccaacatggcgaaaccccctctctactaaaaatacaaaaattagccaggcgtggtggtacgtgcctgtaatcctggctactcaggctgagacacaagaatcgcttgaacccaagaggtggaggtttcagtgagctgagattgcgccactgcactccagcctggactggactgagactccgtctcaaaaaaaaaaaaaaaaagagagagagaaaccatggaaggcttttaaatttataatcctgtaatagggaaagcctttctaagtatgacaaaacccagaagtctagaaaacaataaattcagctaaatttttaaagatctatagggcaaagcccatgttaaagtaaaaagaaaacaacaaactgggggaaatacctgaaacagtcagaaatggccaattaccctaatatataaaaagctcccagaaatcaagaagaaagccattaacccaataaaaaactggacaaagatatagataatgtataaaaagtaaaattcaaatgcttcttaatcataagaaacaactaacttcacataagagaaatgccagataaatctacactaagttgccatttttcccctatcaaattagcaaagatcagaaagtttgaattgacacctttagtgtttgagtaattttttcacagtgcttctgagccaaaagaaatccctaaaagtttcacttattaactagttaattttaaacaatttaatgagtattcattaagcttattagccatttgaataaataatacacttaagttgaaagaagatatttttatttcattcttaagtacagttattaatgggatgtgtacaactacttaaacctgggaattagactggacacttgccctcctcatttcctgttcactaatttttgtgtggtactttaccacaggaaccatcaaaacctagctttgcaaagatttatgtcattaaaaggagtatatttggctgggcatggtggctcacgcctgtaatcccagcactttgggaggccaaggcaggcagatcgcgaggtcaggagatcgagaccatcctggctaacacggtgaaaccttgtctctactaaaaatacaaaaaattagccaggcatggtggcacgcgactgtagtcccagctactcaagaggctgaggcaggagaatcgcttgaacccgggaggtggaggttgcagtaagctgagatttcgccactgcactccagtctgggtgacagagcaagagtccatctcgaaaaaaaaggaatatattcatgacattttggtgatttaaaaaattttttaaaaaggaataataaccaggcacagtggctgacacctgtaattccaacactgggaggccaaggtgggcagatagcttgagctcaagagttcgagaccagcctgggcaacatggtgaatccccatctctaccaaaatacaaaaaattaactgggtgtggtggtgcatctctgtggtcccagctattcaggaggctgaggtgggaggatcacttgagcctgggaggtagaggtttcagtgagccgagatcatgctactgcactccagcagcctgtgtgacagagtgagaccctgcctcaaaaagaaggaatacattgagatccagtattgaaaatgtgaactaccttgagcacgtaattctagcttgtagcaatatctgtcatgcagtgtctgacaaatgttgctgtttcgctcaaaattttaaaatatcctgatgcacccctgtacattaactgtggtgctcctgggacacctgtgtgcagaattcggaactgtagaaatagccttcacattgctggtgggagtataaaattcacatggcgtttgtggggaggtggaagtttcccagggtctatcaaaattctacatgtgcatatgctacaacccagcaggtccacttatagaaattgtattctatattcttccacaatatctatgaatgaataattagcttagcccttatggtattatttttcgtgcagcaaaatattaggaaaaaactaaatgtcccaatagagaggcctagttaaatatggcacatctatgcaatgatataatatatagctatttattctcaaagagtggaagctctttgagagtcagtatggaataactgtaaaatatattacggaatgacaaaagcagttttcatggtatgttgatacatcctttgtgtaaaaagagggaaaggctgggtgtggtgcctcacggctatagccccagcactgtgggaggcagaggtggctggatcacgaggtcaagagatcgagaccatcctggccaacatggtgaaaccccgtttctactaaaaatacaaaaattagctgggcatggtggtgcgcgcctgtagtcccagctactcaggaggctgaggcaggagaatcgcttgaacttgggaggcggaggttgcagtgagctgagatcaacaccactgcactccagcctgggtgacagagcaagactccatctcaaaaaaaaaaaaaaagagggaaagaaatatatatgtattggttcatatttgcatctgttacctttgggaagctgcatcagaagttgataatacaagttacttaacctttggggagaagaaataggtgagaggctttttaatcaatatctttgttccctttgaatttggaactatgtagaatttactacttttcaaaaatgctaaaacaaattagaaacaaaatttaatgtaaaatagttttaccactaaaatagtcatgcatttatttctttatcaatatagtattaatgctgaataatttttagtaatgaaattctaatatctaatgaatcaagactggacatttaacactttattttgttttattttcaggatttagaaaactacatattggaacttatccctacgttgccacaattagatggtctggaaaaatctttctactccttttatgtttgtacagcagttaggaagttcttcttctttttagatcctttaagaacaggtaaaagaaaatcttatctaacttagatattatgaggatattattatatctaaatctcaataactagagaaaactcttgaaaaatatcatttattttcctgtcactgccattaaaaatttggtgaatttcaaggagataaaaaggtagaaaaaacagtagcagtactttggttatgtttatctgaagatcttttatgatttacttgcactgaccataacctgctgtgtgacagatggggggacatcacctaacagtgaagaagtatgaactgggtagtcagtcataaatacctccttccagttctaggaagccagttatttgcatataatttgctgtctctgctgtgtgacatactgcagaattattctctttttgatgaaaaatatgtatttggaaatatgagagccatttagccagtgatgcatatttttcttattctctataaggatcggattggtaaatatggcctcattaacagtttgttttattaactgttcaaacctgcccagacttaactacatgtaactggagcagaggaaaggacagagaaggtccaaatcaaagtgcctgattgtccttctgtccttgaaaattcagctatgggcctggcacagtggttcacgcctgtaatctcagcactctggggggctgagttgggtggaccacttgaactcaggagttcaagatcagcctgggcaacatggcaaaactttttctctacaaaaaaaatacaaaaattggctggacacggtggctcacacctgtaatcccagctactcgagaggctgaggcaggagaattgcttgaacccgggaggcagaggtgagccgagatcgcgttattgcattccagcctgggcaacaagagggaaattccgtctcaaaaaaaaaaaaaaaaaaaaaaactagccaggcgtagtgacacacggctgtagtcccagctacttgggaagctgctgaagtggatcacttgaacccaggaggcagaggctgcagtgagccaagatcgggccactgcacttcagtctgggcaacagagccagaccttgtgtccaaaaaaaaaaaaaaaaaatccagttatgaatccaatcacagcatatggtagctgacagtgttttttgaactcctctactataagtacacacatatatactttttcaaattttacaaaataatatcacgttttgacttatgtagtatgctaagcattttacatggattcattcattttcatctcataaccccataaggaaggtacattattgtccacattttatgtgtaaggcaactgagactttgctaggttacatatttaaaagtggcattcaaactccaatctgggctaggtgtggtggctcacacctgtaatcccagcactttgggaggctgaggtgagaaatcactggtgcctaggagttcaagaccagccctggcaagacagacctcttctgtacaaaaaagcagcagcagccaggcgcagtggctcacacctgtaatcccagcacgttgggaggctaagatgggtgaatcatctgaggtcaggtgttcaagaccagcctggccaacatagtgaaaccccatctctactaaaaatagaaaaaattagctggatgtggtggtgggtgcctgtattcccagctacttaggaggctgaggcaggagaatcgcttgaacccaggaggcagagattgcagtgagctgaaatcacaccattgcactccagcctgggcaacaagagcgaaactctgtctcaaaaaaaaaaaaaaaaagaacaagaacaagacaaaacaaactctgctcttaaaccacacctgtttacctgcgtattgctttctagtccagaacctgccaaaaataaatggagacagtgtccctgttcgtgtaccagcagtactatatctataatcacaacttttttgaaaatctgacatcagtataattttagaatttaccacttagatttatatagttgaggtatacaagtagagatgttattaaatgttgcctgtaggtttctcttttttttttgcagggtggggatggagttttgctcttgttccctaggctgtagtacaatggcttgatctcagctcactgcaacctctgcctcccaggttcaagcgattctcctgcctcagcctccagagtagctgggattacaggcgccctccaccacacccagctaattttttgtgtttttagtagagatggggtttcaccatgttggccaggctggtctggaactcctgacctcaggtgatccacctgcctcagcttcccaaagtgctggaattacgcggtgagccaccgcgcccagccgagatttccctttttgtagcaatatgtaataaggactttggagcataagagctagaagctttaaaatatcaattgtgtgattgctcttgttaaaaaaatttttttttaattaattgagttgctcttttcttaaaatgaaattaattgtgtttctttatgttcttaaaggaaagataaaaattcaagatattttagcatgcagcttcctagatgatttattggaggtaaatgtttttaaactacttaattgtatcacttgacagttgctatcttctaattatgtctttgtgttccattagctaagggatgaggaactgtccaaggagagtcaagaaacaaattggttttctgctccttctgccctaagagtttatggtatgttcctatcataatgctaaaatttgaattatccattcttcaggaaattggtgttcagaggacagttttatacatacactgatataccttaagatcaaaatatttaattaccttaagctttagtattctacattaccaaaatttacttgtttaaataccgatgttttaactttttggactccccccaaccttttctttttgaagacagggtctcactctgtcacactggctggagtgcagtgacatgatcacggctcagtgcagccttgaagtcctaggctcaatcctctcacctcagtgcccctaccccacccaccccaccacccccagtactgggtctacaggcgccatgcctggctaatttattttatgtttttttagagatgggatctcactgtgttgcccaggctggtttcaaactcctgggctcaagcagtccacctgccctgacctcccaaagtgttgggattataggcatgaggcactgcacccagcagaaccctttttaagttatacacttccttttcaatagaacagaatgtaatttgatccttgttgactcaggagcatcattatgaacattagctattgtcatgctttgttgataaaatgctattcccagggtctactgatggagctaatctacattatcttgttgggtggtcttttgactcctttggcttttttttttttttttttttttggagatagagtcttgcactgttacctgggctggagtccagtggcatgatctcggctcactgcaacctccacctcccaggttcaagtgattctccttgcctcagcctcccaagtacctgggattacaggcgctcgccaccacacccggctaatgttttttttttttgtttttttttttagtagagacggtgtttcactatgttggccaggctggtctggaactcctgacctctgatctgccctcctcagcctcccaaagtgctgggattaccggcgtgagccaccacgcccgacctccttttggcattcttatctctactttcaagtgctagcatttcagtgctttttgttggcctctacctccatttaatttagaaacctaggaatgtttaaaaagactgcaaactgaaaacaaataatgatgtaagtgaaacagcccagagactatggccttcatgatgggtttttttggctgtttctagcccaagggtttttctgatcaagattgcaaaggtagctgatagtattacacataggccactaccctaatcataacatgaatagtttgaaaatcaaaatattaaccaagaaaaaactttttgttagtctattcttctgattaaaattttattgtggtcataagtgtctttattatttttcttcccaaggccagtacttgaatcttgataaagatcacaatggcatgctcagtaaagaagaactctcacgctatggaacagctaccatgaccaatgtcttcttagaccgtgttttccaggagtgtctcacttatgatggagaaatggtagtagtttaaatctgctgctaagttttaaaagtttaggctcccagagtttccacaaacccttttcttgatgtaatacagcccttttttttttgagacagagtcttgctctgtcgcctaggctagagtgcagtggtgtgatctccgctcaatgcaacctccacttcctaggttcaagtgattctcctgcctcagcctccggagtagctgggattatgggtgcatgccactgcatccagctaatttttgtacttttaggagagatggggtttcaccaggttggccaggctggtcttgaactcctgacctcaggtgatctgcctcccaaagtgctgggattacgaggcgtgagccaccacactcggcccagcattattgatatcactgtgtaacagtgtctttaaaatgtgtaaactgatcaaattacttgagattcagagtctttggtcttaacgtaaattaaaacatctgcattatggcctcagggcaaatagaaaagcttattgttcatttcattgtcagtgcacctactgtacagtagtgcattctagtttttttttttttttaaaaaaaagctgaggccaggcttggtagcttatggttataatcccagcgctttgggaggccaaggccacagaaccacttaaggccagtcgttcaaaactagcctgagcaatacagcgagactgtctctacaaaaaataaaaaaattacttgggcatggatggaatgtgcctgtagtatagctactcgggaggctgaggcaggaggattgcttgacctgaggaatttgaggctgcagtgagctatgatgaggccactgcactccagtctgggcagtagagtgagaccatgtctcttaaaagctgaaacattagtaaattattctggctattttcagctagatagttccgtcattaaattaccaggtcaaatgtagtaacacatatgccatgatttaattctgagaatcaggttgtattagtctctagaagtggctatatgaacagctgaagataacatgcacttgtctttttattataacaatgcaaaatacttgagaaggaaaattctaaacagcattttaaaatcaccatttttgctgctaaaaacatgggttaagaatctgataactttgggaggccgaggcgggtggatcacaaggtcaggagatggagaccatcctggctaacacggtgaaaccccgtctctactaaaaatacaaaaaattagctgggtgcggtgacgggcacctgtagtcccagctactccagaggctgaggcagaatggtgtaatggtgtgaacccgggaggcggagcttgcagtaagccgagatggcgccactgcactccagcctgggcaactgagcgagactccatctcaaaaaaaaaaagaatctgataaatttcccaaaccagttatgcttaaaaaatagtcatattgtcatgagaatgggggggtcttacatttatcatttagcttcaatagcagtttgctaaataacaccattagtaacaacaaaagaaaagaggggaaaaggcacagaaaatttactttgtaactcccacagctgtaaacaatagacagtgaggagcttatattattaatataatgattcctgatgaatagagaaaatcaggctacaactatggatgaagtcagatcacaatctgcattctttaactctttagtgctatttatgcagaaaggaacttttctaagaatataaaatttttatctaagtgagaacctcccaattactactttttaccattaaaaaaaaaatctgagtatcctgtttttttgttttgttttgttgtttttgtttttgttttagatggagtctccctctgtcgcccaggctggagtgcagtggcgcgatctcggctcactgcaagctccgcctcccgggttgacgccattctcctgcctcagcctcccgagtagctgggactacaggcgcccgccaccatgcccggctaatttttttttgtatttttagtagagacggagtttcaccgtgttagccagtatggtctcgatctcttgaccttctgatctgcccgcctcggccccccgaagtgcgtatcctgtttttatagggaaggctttctgttctcttcatgtctttctggcctttccattttgcctttttatggatgagagcagtgtcagctcactgtaaaatgtctggcaatctcaagacagcttcttattggaaatctgaattaaaaattttaaacaatattttaaaatagcaatttaaatatactgttctgagactgggcacggtggctcacacctgtaatcctagcattttgggaggccgaggtgggtggatcacctgaggttgggagttttgagaccagcctgaccaacttggagaaaccgcttctctactaaaaatacaaaattagccaggcgtggtggtgcatgcctgtaatcccagatactcaggaggctgaggcaggagaatgacttgaacctgggaggcagaggttgtggtgagccaggatcgcgccattgcactccagcctgggcaacaagagcgaaactccatctcaaaaaaaaaattatactgttctgttcattccagataaaaaatttgtttttcaaaataactgcactgaaatgaagttataagtttatagcttagtcatctgtttcaaaagtttgaagcaggatgcagtagttcatccctctagtcccagcactttgggaggccgaggccagatgattgcttgagcccaggagtttgagactagcatgggtaatacaggaaaaccccatctctacaaagaatttaaaaaattagccaagtgtgatggcgtgtacctgtagtctcagctgcctcggaggctgtagtgggaagattgcttgagcctgggagatcaaggttgcagtgaactatgatcgtaccactgcactccagcctggttgataaagtgagaccctgtctcaaaaacaagaataatgaaagaaaattatagtttaacacagcaaatctctcataaaaaaatgaactagggctgggcacagtggtgcatgcctataatcccagcactttgggaggccggggcaggcgggtcacttgaggtcaggagtttgagaccagcttgggtaacatggaaaatcctgtctctactaaaaatataaaaattagctgggcatagtggtgtgcacctgtattcccagctacttgggaggctgagacaggagaatcgcttgaacctgggaggcagaggtttcagtgagctgagattgcaccactgcactccagcctgggcaatagagcaagactccgtctcaaaaaaataaataaataaaaaagaactatgtcctcaaaactgtcctgtgtagattatatatagaattcctatggctgggcagggtggctcacacctataatcccagcactttgggaggctgaggcgggcggatcacctgaggtcgggagttcgagaccagcttgaccaacatggagaaaccccatctctactaaaaatacagaattagccaggcatggtggcacatgcctgtaatcccagctactccggaggctgaggcaggagaattgcttgaacccgggaggtggaggttgtggtgagccaagattgtgccattgcaactccagcctgggcaatgagagtgaaactctgtctcgaaaaaaattccctagaaaccaatattaagtatataaatggatttctcatatcataacttagggaaaaaattaaatttgccacctttgattgcaaaatagcttcaaatcataagatattcacttgaaagttaatttcaactaaggcctctaatgaacattattttctgttctgtaggactataagacctacttggactttgtccttgcattagaaaacagaaaggaacctgcagctctacaatatattttcaaactgcttgatattgagaacaaaggatacctgaatgtcttttcacttaattatttctttagggtaagtctcatttgcataagtgagtcattgttccttaagatatatcattttgttgctgccggtgcagtggctcacgcctgtaatcccagcactttgggaggccgaggcaggtggatcacaaggtcaggagatagagaccatcctggctaacatggtgaaaccccgtctctactaaaaatacaaaaaattagccaggtgtggtggtgggtgcctgtagtaccagctatttgggaggctgaggcaggagaatggcgtgaacccgggaggcagagtttgcagtgagccgagatcgtgccactgcactccagcctgggcgacagagcgagactccgtctcaaaaaaaaaaaaaaaaaaaaaattgtgagatgcagcaaaagcagtggctagagggaaatttatagtattgaatgcatatactggaaaatgttaaagatctaaaatcagcatctactttaggaaattagaaaaagaagagcaaattaaagatatatcatttggtttaaattaaatatttagtaaccattttacctaactcgtgatttttatttatttttttctttttttgagaaagggtctggctctgtcgcccaggctgcagtggcatgatcatagctcgccgcaacctccaactcctgggctcaggcagtcttcccactcagcctccccaataactgggtccacatgcctgtaatcccagctacttgggaggctgaggcaggagaatcacttgaacccaggaggcggaggttgcagtgagctgaaatcgcgtcactgcattctagcttgggcagcaaagcaacactcggtctcaaaaaaaaaaaaaaaaaaaaaactacaactaccaaagtctataaaaatttctgtggaaaggagctaccttttctgaactgcttagcatcttacaagtttttcatcacaagtatagaatttatcacatatttgtatttccaatggtagtacagcccctgacgtatatttacatatttttattttacatctagtcaaatcagctttcactcaatttttttaagtaggaaagaaaactaaaaacttgatttctttctgaaatctgttatgtaaatgcttttattaaatttaaaaatcggccgggttgcggtggctcatgcctgtaatcccagcactttgggaggccagggtgggcggatcgcaaggtcaggagatcaaaaccatcctcactaacatggtgaaacccatctctactaaaaatgcaaaaaaatcagccgggcgtggtggcgggcgcctatagtcc

SEQ ID NO: 141 - DNA, 22118 bp, Homo sapiens
  source 1..22118: mol_type = other DNA
tcgccaagcgactaaagctggaagggagggggcggggttgtgagcaaatcttggtggtggtggtggtggggcggcctgagaagatatcatggctgctgccacggagcttaatcgcccgagcagcggtgacaggaacctggagcgaagatgcagacccaacctctcccgagaggtgctctacgaaatctttcgctccctacacaccctggttggacaggtgagaggtggcctgagggactgggaatatggaaaccatccggtccctcctcgccattctttttctctagcagaggccgggggcagctaggcctgcagaggtgtgggatgcggtcccgaagccgaggtgtggaaggagcccgggcccagcctcctcggtcggagtgaggaggacggcggtaccggttgcagagtcgtttaccttgcagctgtcctccccaagagtgggtgaggttggcctaagtgaaaacccggctccgagagaggcaggcttggagagaatgaatgtggaaaagcttcactgcgagtttaggaggcgcttagcgttcagggtcctttttcctccaacttactctttatgggaattggttggtcagtaggcctgagatttatagaaaagcgcgcgcttattagctttttttggtgggggagggagtaatttgttcttatgagttacttggttttgtttatttcttttttccttcgggctgttttgcgcatctataatcctttcaaatggggagaaaagtaaaaggaattcatttaaaatacttctagcgtaaaatgctgttggcgttagaactgtcgttatttaactattaactagtttaactggctgataaatcgcttttgcagaaatgtcatagtaaaattggttttaaattgaaatgggcttcttcgatcaagtcactgtttcgtttcatggtgtaaaattcaagttttaaatgagaaacaatttaaaagtatgcttgtttacctgccttttaaaaggaaatattttctatcttacatagaccattttctagccgtaaaagtttgttttggggctggtactagcgcaagtggacaaagcaggcatttgtgtcaaagataatggtaaattcctatgaaaatagaacatttgtctgatttgtgaaaattatttttaaagccttgagtagatggagaatcagtcttttaagaagttactatttttaaaaatcgtagtatgttgtgtcttacaaagaacattactgtaagttaaacggttttatgaaatgacgcagttattaatggagtctgcttaaagatataacttttaaattcagttgtttgccaagtacttaccaaaaacattttttaaagacttggggtgttttgttattaacattccattcttaagacccaagacgtttaaatggtttaaaagttagagaactttttatggcgacgttggaacttaagtttatttattttataatgtcaagatgaaaaaagtttattctcacctgttaacagaagatggaatatttttaaaaaatactgagcaatgatttaaacatttcttttgaaatattttgcatactgaatttttcaaactcattagaaaattttaaacattcaagtactgtacaagtaaagaagtgattacaatttacttatgtcacctgtcaaaaatgttcacagtaaatatttggttactttaccatgacacagtgaagggacctcctatacaagtgtcaaaaatatgattgtttcatcaattaaatacaaactgttttcataatactctatattttgagaagtgttaagagtgaaaattagagttccatacttataaaattgcccccagagaaatcagtattttcttttgcaaccactttaaaggatatttagaatgtatgttgtaacatgcctaacttcatcctgtgtcatccctaagtatcgttgtattattagatctcctcagtaggaaacataaaactgaatgttaaaaataattttttacttaagatcacaaaatttactaattttaacctttttgcttgcctctggatggtccatcttaccaagctaaacaattatttatttttagcttggatttttgtattaatttagtaaagtttttactgaaaatatatatttaaatagtctatattaatagcagactaatagagattttcgagtgagtggtttactcttccaagttctgtagggcaaaatgcatagagttcatattactaataatgaatttgttgaatgaatagttagatgtattaggacagttttaaaattaatttgtgacattatgtggttttcttaaaagactaattattcttaattgcacttgaagcttatgtaattctgctgaattgaaatgagaatatgaaccaaacattaagacttatttttctataagttattttctctagaaaatgtgatactttgctttggttgaggatttgcctgctttatccccaagctgtattcttaagttttctataatcaactatagatctccttgaagactatgaaagtacattaatgggttacttccatacataatacaggttgttgtctaacaaaatctttataggaattaaagtaatataaattaatgcattaactttaatgtacaatcttaatatattctaatctttgccagtgcagcctacatgaaatttcatatctctttatacttgtctaatatggacttttaaatgcttccattctcatcttcaaagggcagtaaatttctgtcacatagtatttattcaatatattatctttttattggtaaccttatatctttttgatctttgtacagtgattcatcttttttattataattgtgactcataaaatctgtatttgaactcacgtaacacctttattttgtagaaaagatgactcattttgaataaattatgttaacttgattctactatgaagtatagtcttatactatgctgtaaacacatgtccctagaaaagtttttgatggttcacttttattcattcaaaagactgcagatgggcgctctcattgtaaaattttcactcattttgataataatcttatattcaggttcttggtagttttctggatatgattttattctattagatcaccaactgatagaaatttccatataatgagctgtcacatcttagcatttacaaaagatctggacatttcatccagtctgacaacttatttcactgtggtggagaagtctttgtttttcagcttcagacttccattgctaaataatagttttttatttgaaataaacatgttgccatttatccctacactttatatgtatgaataatcttgacttttaaattagtttaaaaatcggttaaaagttaaaaaactaaaaatgtgatttggaggacatcagaataatgatatatttctgatatgtatttgtgtacatacttaaagagaaagatgcatgttaaaactttcacaaaacacttgtacttcctctgtttaaggctctgagctagaagtagtaggattctgaatagggcaagcctatattggactccatccaaaggtttgtatatattgaagtatcaaaagagccttcatcttttcatctttcatgaatggttttacctctaaaatggtcccattacacagacctaagaatagaatttgaacgacatgtcattttgtttttgtttttttatgaaaatctgtagctttcttggccttttgaaatggtaactgggtagagcatttcagtgtattattaaaaacttgataacttagagcaaaatagacccgttactctagaaatcttatttttgtgacaattccatatgtagagcttaatcgtgtaatttttgtgatgttgctggtttgcccctttgaagcttgacctcagagatgatgtggtgaaaattacaatcgattggaacaagctccagagcctctcggcattccagcctgcattgctctttagtgcacttgaacaacacattttatatttacaggtaaatttcttgttagaaatgataacccgatattgaaaatagaaattgattgtggttaagttagttggagtatttgacagttctaaacactatattaatagtgttgctaataaaacgttatttacatccggatttaatctaaatctgttaatttcagtagtgatcaggacagttaagggaatatagcccaaaagaccaatgtgggtatgagtgaatgaatgcaattctattcaattctagacctgcactgaaaattcaatacagttccatctatggtgggttataattaagcaataagacacggcaggtgtgtgtcatgctatgataatgattccatgccttgggtgagtttggaggctcatggagtgctttcagtggttcaagaaggggcattatcccagcatgacacatcctggagtgtctattgcaattaaacagtttcagcatagtttttaaaaagaaagtaatttctatgacattaatgtctcatcttagtaagtagccagtcactattttatcatttcttttccttaacagtttgaaataattcattctttatattagaagttaatattgaattggtatttataatagtgttgttatatttttaaatatttcatgttaataactgaacagtattatgaccttgctggtttctaattgaacatctttgcaattataattgatgtaagtttgcagtttatctctaatcaaagtgtaaaatgtgaagtgtcaaaaagataagtggaaaaactggattggtcagtttactgtgattaaggtgttataagatttcaaaagagtagtatagcgaacaatggaagcaaaattgtaggtatgaaaaaaataattggaacgttattagtgttagtgtgttttgactaatggaataggcattaattttcagccctccattcattgactttgtgggaaattttaactgtttcatgttaaaagtaatagttaaccctgtttttaaagggcagagcagtgagctctagaactcaaatgagacctcattgtggggagtgggggaggggaacagtaaatgagtaatatagtttaaattctacaacaggggttttccccctgtagtatagtgataggcctctgcctgttttcagctatagatcttttttttttcttgttcgttttcttttttaaaatttaattttatgaccaaaagatatcttgccatgtcaggaaaagtctgagtgttcactcagcctaacacctatatatttcatgtctatgcttcctcattcacattggccaactgcagtttcaagtggagaatctccagtgatacagtgataatgcagggctttgctgagtgagagcactagctctcgtgttaaggaggaaaaatactaagccttagtgttctgaggaggcatttgaatgacatgttaattaagtggcattggtgccagaggctgaaggctttgatttggcacaaaataaaagatgagtgacagaatgattctctcaaagaaaattttaaatttccttaggttttcttttcttttttcttttcttttttcctctctccttttttaaaaaacaaatttatagcaaatgataatggttacaatagcagagaatagtgagtacttatatgtggtcagatctatgtgtcctggtataccaactttttatatttattaactgatattaagtatttcatttacttagcagaaatttatgtaaatatattaagtgtgtaattaattttggtcagattgaacctcagcagatggaattgtgttgttctcagccttttttagcaaaacttcagtctccgattaaagaggagaatacaactgctgttgaagagataggaagaacagaaatggggaacaaaaatgaagtaaatgacaaattttccattggcgacctacaagaggaagaaaagcacaaagaaagtgatttaagagatgtgaaaaagacacagatccattttgatccagaagtagttcagataaaggctggaaaagcagaagtaagaaggttttttggcgggggcgagagggtattattttaaaaaatcttatgtttacactgttaaaacttgttgtttgtagattgacagacgaatatctgcatttattgaaagaaagcaagctgaaatcaatgaaaacaacgtcagggaattttgcaatgttattgattgtaatcaaggtaactacctggaaattaattttcatagggttttaagcacaatttttatagttgctctaatcttttatttattttttaaatgaatagcttttagaacacaattcaatttatttcatggatttagttagtaattaagacagtagagtttccttctgcttaataatagactatattgcaaactggttttcattttggttacacaaagtaaatgctaacattaaaaagtgtttatcacaggtgaagattattttaaagttcctttaggaaatgaaggtgaggtacgagtgagaaggttgatctatctcactagtaaaaggaactgagctctatgaatttcaaacctatacatgtactgtgaaatcatgatgttaatacgtaagtgaacttagtaaagttaatattcctccagagggagcagttttctcactactcctgagctgtttgaaatgtcctgtgtcacgatacaaccaatttatcatgaagaccatggtgtcttgcttttttcctttctgccatagtgcatacatttgctgtttttcatctgattcacctttacctctctacttgatgctatagtacatttacaaatctgcaagtatgctgcagaatacaaaatattgcaatgcagtgccatagattatactcaggcaccatagtaataatcagaacaagtagttcttaggaaaaattatggagaagagttcataattggaatgaacatgtttcttgttgcctctaatatctcatggctaattattatgaacatagaattgtcagatgaacctagaaatgactcatatcacattggtacactgattctcttaatgaaataatataggctggtattgggtcctgaatttagctgtgtgctactattaacattacacatgtgcatctctaaatttggtatattttcctgttagcttttcagaacaggtgcaacaatggcaaaatctcaggtactacaaccaactacaagcgactatgagaaagggtttgttgagagagcaagcacatgtgtcactaatgttattcctctgttctccctgctaactctattattataaaccaccaggggatagaaattgacgagaattgaaatgctcagcaggattccttggcccattcaattctttgctggctcaaaacagtgctagcaagaattgctgtggagagtgactagcagtcatacactcacaccatgctgaatttctcactgatggtcagttaatctatatgtttggaatatagttctggaatggatgatagcttctttttttaacccttagccccatgaaatggtaggaagagaatggagaaaggatggccctttaagcatattttgaggtgcctccaaaaaaaaaaaaaaggaggaaagatgtctatttagtctctagatataaaagctaagtggatttggaattttatgcatactatttgatttatcaacagaactactaaggaaagttcaactgaaaaaaatacaaatgtattttaatatgttagtgtgttccttttaatacctacaaatttaacctaactataagcagtggaatttttaaaaatcaaatttcataggggggaaaaaataattttttttaaagaatctcatttaccagccattttttacaaaatattcaggggaattttacaggagatttactgccaatgtgtggcctttaaacattatttcaaacataagtatatattattactatgtagtatcgtatgttaatatataacaattatgttaattagttgtattatatgttaacatctttccaattttccccttttgtaatttatgcattgatacttaatttgaaagaaactacttttcagcttggaaaaaaatagggacaaattttcacaatagacctttactaaaatgaaacttttttgaaaagtggtgggataagaagaagtagatgacttttgtgatgaagggtttttaaaatgagcactggaaatctaggtagagtggaaatgtatgtgtacttgaggttttgaggtcatctttgtgtggagttctgaaataaaaatgttaaataattctttttgttggatgttcactaatttggtcattaaaataaaaaatgctgaattaaaagaattctagtaaaaatgatgagttttatttctacgatgaagtagaatttaaatactctatggtagattattttctccagtggcccaaatagtgacattggttttcaaaattgtatcaatttgtgccacttaatgttgatggcttttctgtatataaatctgaacattaggtaagaatattagatattatgataaattttgacaggtaaagaaggtcactaaattctatcctatgtgtgatagtaatttattgttactattatttattaaaattattatgagtaaaatgttaatatgaattattgaaagtttattaaaatctcatacatttgaagggaagaatatatttaaacttatatttatctaaattctccttagaaaatagttgtgcaagaactgatgcgatttttaccccttaccccggatttaaaagtcacgtaaaaggtaagtaaccaccacatgacatctgagtcactgacagaagtctagattattagcaaaatggaatagaaataactttcccatctaaattttattttaaaacaaaaacatcttgccgtccttcatacttgtggttagatggtctttatgaaaaaaatataaagtgctgttaaggaataagaatttctgatttttgaaatacaaatgtatataggctcaaaagtttcttaatttagtttctagagttgtgaatacatacggaccacagactagacctgaaggaattccagggtcaggtcataaacctaacagcatgcttcgagactgtggtaatcaggctgtagaagaacgactacaaaatattgaggcccacttgcggttacagacaggtaagcaaagtgctaagtggcacctcataatgaacctttgcaaatggttaaaaaattgcagttcatttagtcaccaaattttcatttagctcctaacatttcttgaacagtaagtgccagtcactcaggaagtgttatgtgtatgtcaattcacttaaaaggtcatagtacccttttgagatggtggtggtgttatcactgtacagataaataaattgaagtttaaagagcccaagcaaacatgcctaagatactaagtgacaactctaaaaaaaaaagaaaaaagagatagtccagtcttgcccaggttgtacttgaactcctaggctcaagtaatgctcctgcttcaacctcctgtgtcagtgggactacaatcatgtgtcactactgcaccctgctcaaacccaagtcctcactgggtgcagagactgagtctccctctccatttagtcaccatgtctgttgattctgttttctaaataaatatctctcaaatctgcccacttctgtcttatctctactgctactactagagttgaagccactgtgatctctggcttggactgatggaaggatatttactggtttctttgccactggactcctctagatcatctctaccctgtggccagattgctttttctaaagctcaaatttgatcttgtttcttcccagctaaaaatgtggagattgggattgaagggggtttgtaattttaaatagtattgtccacatctgtagttccagctacacctctgggcttcccatctcccactcgttgtgctgctttaggatctttatactcatgcccttctgtccatgctttttcttcctaatcctagaccagtgcagattcaccttttgtataatcttatatagcacctggtattccctgctcccctttaaagcagttatcatggttctgtttgtttaatgtctgtctcctgctagatagtccgtgagagtgcaactatgtctgtcatattcatttctttgtacctattacagtgcctggcacaaagcaagtgctcaaatgtttattgaatggacagttgcttatttcacctttgcagatgtatgtacggagggacagaaagttagtgtttgactctctcagggtaggtcaagggatgatggcatcctaatgaagtgacatttgaggccttgaaggattagtaggaattttccagagcaaagcattccaaaaagaagaaacaccatttgcaaaaaaggacaaaaacacaaaatatggttcaggagatatctgaatccagtatagctggagtatactagctatctgaagctatgctagccagatgaaggtagaagaagaaaacagaatgagtaagtctttgagagtaataagacactggcattaagaattaatctcttccctcagaagtggatgggtttaaaatgccactgtataaaaggattgactggttaagtctctaataatagtatgaaacagttaagtttttggaaaaatatctgttgaatgtttactatgctccaagcactattttaggcacaagggatactgagatgatataatcatagtccccagcttcaaggactttataatccaaatgagagaaagattaatagtgaagtagagttttaaaggagtaatgaaaggatgggtgtagtggtgtgtgcctataatcccagttccttgggaggctgagtggggaacagagcttgagtccaggagtttgagaccagcctggacagtatagtgagagtctgtcccaaaaaactcaggagcactgaagaatggtgggggcacaaggagcctttatgcgaatgaagaggtttcggcagtgcctgcgttacccagtgaagcttgaactggctcttgaaagatacagaagtaaggcagaggacattgtaggtaaagggagcagcaaaagcaaagtcaaatgaacaagttaacttatttaagaacaagaacaaccaaggtcctaagatttcttaaaatcctcaaaatttctagaatttttacataacaagttgacaattttgatatagaaatttacccgtattctttaattgcataatgattggctaatcatgtattcattcagtcagtaaatatcaagcaccagctctttgccatgcattgtagtcttatgaactgatgcttcctaggtttgtgcagtgcacaagctgcacagccctacctaatgaacaaaacagataaaactctgtcctcttggagcttatattagaatggggaaacaaataatacagaaagaaaatatactgaatgttgggtggtagtaatggaatggagaaaattaaggtaaggaggataagggagtgctgggtaggggagtggtagtactggtatttttaacagaatagtcagagaaggtgttactgataaggtaacttttgagccaagacttgaaattgacttgggattatggcggtagagggaaccagctgaagcttacagggtgcttggcctctttgaataacagaaaaaaagtaatcaagtggctggaaccatgtgggcatagggagaatatccacattgtgtatggccttgtaggccattgtgagggctttggtatttaatctgagtgaaatgatcaggtattggaaggtatttaacctcagtgaaatgatcaggtattggaagcagagaaatgatgtgatctaacttatatttttagaggatcactggctcctgtgttgaaaatacactctacggaagcatggcagaaacagggagaccagtttgggagttgcagtaatccagggagaggtggaagtggtctggaccagaaaggccacagtgtggagggggtgagaagtagaaggattcttgatataatcataaatttaaaatttgagtggccataatttactcttcccctcctcagaaagtttgttagtttagaattatggtaaagccccttttttacattcttttaggtcaaaggaaaaatatggcatgtagggagaaatattaattgaagaaaataatatgacatattgcaaccactgcattgaattatcgtcatttgtcactatgcatttttgtcctcccatgtaactatcaaagcatatcagaaatataaattgttctacatggaagctattcaatatcttgtaaaatgaatttaacatgaaactcctagaatataggaagcataaatggggtttggagagaggaagtgtagtacaatatgtccgatagtgtataatacaaaaatacgacctaaggacttcattctgttttacttttgttttttattttcttaagtattttccattcctttgcataagtgtctttgcatggtattttaagaataaaaattgtgaaaagaaagaattattcaatagtatctcagatttttttttaatgtatttaggtggtccagtgccaagagacatttatcagagaattaaaaaacttgaggataaaatccttgaattggaaggcatctctcctgaatattttcagtctgtagtgagtataagtgtcttttaaaaataaatgaaaatgttattgtattctggattctttgtggtttaacagtcactcattgatctataagcaaaacactattttaataattcaaagatgaatgaacacagtcctgtataggggatatatctaattccttaaaatctctggttctgaatatttttaaaatttagaatttttaaaaagggatacttctattatatattacccacattctcaaacttaggccattttcatggcatagtaagtcagcctgggtggtggttgggcctgttactctgaacttgctaccttgtaaaacagaggcttcctctgtaaccttgctctttcagtgatccctctgcctctttaatctctcttccccaacaggctccttctctcagctcatatgcagttaatactaaacaaacacacacctcaagctgccactcttattctttaccttaaccaccagactttctatgtttttgtaattccttaactctagcattcattcattcttaccccgttttccaagaaccttaagaaacagtgttgtgctggtaagttagtatctttggcacatcaacatttttcagaaaaatgatcctgagctcattgtgttttcctcagtcttctgaggtgattatgtataatacctgccttctctaagttttgttttttttttaaagcagtaccatattagaactaaaataatatcaaagtgagattataccaaaactcctatttctgaaaaattatgtgagatagcccattttagcatggatcatataagttagtggtgaaaatatatttaaaatttattttaggtatgacagcaatcttccaaagttatagattgagtataagagtgagttacagaaaagaagtatttccagaagaagaaggcaggtcacgtaacaaaagggagcagcaagtcctaaatgacaaaatttcagagaagagttttagtgatttactactctcaaatgtaaaatgaggtttatgaaaatactaagggctgaagcaaagatcaaatgagataatgctgatcaaacacttagcatactgcttagcacatggtaaaaacctcattggcatttatttagttttataactacaaagtagctgtataaacgtggaaaagtcactctattcctctgatcttcaagatgtctaattttagaaaatgtattggttgtactacataattacaaaggtcttttcacttttaggattattctttgaatgtcttcctaggagacttcataaagatttttaatgacttttcctacagtagtctaccataagtttttcccattctaactgccttcattaaagaaggcaataacctaggaaagttatttttctagttcaatttcataccttgttaatataattcttattaacgatagaaccgatcttacaatagagtatggtaaaatcagatgcctccaatgagaacttgctgcagcatcattcctctcttctctctgattctgatttataaaaacttaacagaggccggatgcagtggctcacgcctgtaatcccagcactttgggaggccaaggtgggcggatcaccagaggtcgggagttcaagaccagcctgaccaacatggagaaaccccatctctactaaaaatacaaaaaaataaaaaataaaaaaaataagctgggcatggtggcgcatgcctataatcccagctacttgggaggctgaggcaggaggatcgcttgaacccaggaggcttaggttgcgatgagccaagatcacgccattgcactccagcctgggcaacaagagcaaaactcggtctcaaaaacaaaaaaaacaaaacttatagatgtgtttaacaaaaaaaaaagccctccacatcataatctttttgttttgttttgatctgttacagataggatagagtgggtaaagaggtagaagtagccagattgttaggaccttaagtgctatgctcagaagtttaaaatctattttccaggcaggcagcagggggaatctactgaaagcatttgagcagagaagtgatttgtgaacacgatatttagaaagatttatctaatacagttgtgggagacaaacgagagaaactaaggataaggagatagtattatgctagcttagatgtgaagttagttcctaaaatagggacatgagtgagaatggaaaagattaatgcaagtaggaaaaaaaatggacaaatactgatgattggatgtggaaagagacagagaacaaggatagagtccagtttctggttggaaaaatgataccatcattgatagaaataagaaaatctagagagagagatacttttgtgggaaatgtgaatttgaaggcagaggaggttatgaaggtaaaaacatcaggtaagctttttgagatacggcacttacacttgggacaattgggagagtctgtgtagtgtgagagtccattgatggataggaacacagattgtctgaggcctgaagtctgaagcttggtgactgcctaatttcaggggcaggaagcatttgtaaatgtaaacagaggattggcatatatgtattaagcattcagaaaaggatggatggtggcaacctgtgataaaacaggtgatttttaaaagtatttccaaatatgttaaaaaaaaaaactatatatcttttagaagaactgcagttcttctggattagtgttgtaagtgacacattaaattagtagtgagctacaaggaagaacaaaacactggaaagtttaaacattcagactcattctgtcctttaggcctgtgaacatacatgacacaagccctatgggaaagaagatttcatactcatcacccttctataataggatgaatgagccatctttaggaacctcacttggaatacagtcagctctaagagtgtccttgcaaacaggagaagttgagcacataccttacagaggacatagtacattattcatcaccctcaccatcatgctgggagtacatgcatggtaattgcataattttacatatttatccctcaaaagtatacagaagaaactacatatgtagcacagtcctatagcttctaaagataggaaaggaaagttgagcccattcagtttattaaggattgaacttttgttggaactcctgaactctgaaaagattttcattgaaatgtgtttattcagattcacatgtagatgaattctaaacatgggggagcttcttacaattggatagagattgattatcatgggtaacattgaagcgtagcatagaaaaacaaatatttatggggaaaaaagatgtcatttgtatttgttttataaaatgtaatcagattatgtaaagttctcattttacgaccagacataaaactccaaaataagttatatgtgtataaaacaggatttatgacaaaagttaataatacttgttggacattttgatataagagttctaaagatctttattcttcacattagccatggaaagctttaaatgtaatgttttcaaaagtttaagggcatggccttaacagtccatttaaaagaacgatcttagagtatttccaaagacttactgattttaaattatgatacttgaaaacagtaagtaccaacatgcttttacaagtatattgtttagtttatagcatttatcactcatatgtttatacatgtttttcactttatattttgaaactctcaagggcaggaactatgtcttgttcatctttgagacacagaatgtagtcaatatcgagtagatgtgcaaatgaatggataggacttggctgatagctcattattggactttgaaggtgtgttaactttgttcaaagcactgactgagagtaatttttagtctgtaacagtaactcctggttcttaagggaagtatcgggggaggggaatgctgaaaatcaggtcaacatcatgtacacaggccatgtgcgtgtgaacgtgtggtgggtctgaagcatgagtgaacaactggattcagctagaaaattagattgtaaacatatttcagagggccttgaaggtcacactaaccagtttgcacttctagtatcattggagcacaattaagttttagagaaagagagaaacttgtaatttaggtccctgtctggtggcattatgaagtctgagttggagagaaattggagtcaaggaaactagtttaggaaacatgtcattatccaagccagagagaaatgaaggtctgaatcagggctctgggactagaagggaagaaaaacattttagatactgcacgcatagaatcagttgccttttacaactgaaagaaagcaagccagtcatggaagaggcctccttacccttgagtttccttagagcactggttccctggattcatatgtgtgtgtgcatgtgcgtgaacgtgtgtatgacagtcatgctctgcataaggatgtttcagtcaacagtcaactgcatatattacagtgatcccataaaattatagtatggtatttttactgtatcttttctatgttgagacgtgtttagatacacatataccattgtgttacacttgcctacagtattcaatacagaaacatgccataaggtttatatgctaggagcaatagactataccatatagcctaggtgtgtaccatctaggtttctataagtatactctatgatgttcacacaatgacaaaattaacacatttctcagaatatatccccatcattaagcggtgcatgactaggaacctggtaaggtaaaataatgggtgaggagagacaattttgcattacctttctccagctctttctttagtgtgctgtgctctcaagtattttctctcaggtaccaaaacctgttaaaatgtccaccttttatacttctatacagatggggttatgtcccaataaacccatcaaaaactgaaaatattattaagtctaaaatgcattcaacacctctaacctaccaaacatcatagcttagcctagcctaaaacatgttcagaatgtgtacactggcctatcatgtacagttgaggaaagtcccttggcagcacagtacactgtagagtatcgggtgtttaccctcataccccatggctgactgggagctttgctcactgccactgcccagcatcacaagagagcatcgtatcacatgtcactagcccaggaaaagatcaaaattcagcatttgaagtacagtttctactgaatgtctgtcactttcacagcattgtaaatttgaaaaaccttatctagccatcataagtcaggaactgtactgagatttccttatacctaaaacaaacagtaaagttaatctagtgtatccacggtagatatggtatttctaagtgttctttttatcaaaatattctgctcagagctaaaacaagtccaaaaggccacattttactgtttttaagtcactgagcgactgatgaccttattttcctcattctaatatttcttgctttggttctatgatacagtagtaatctgattgtttaatagcatggaaactatcaatatattacaggttaaacgattaggagaacaaggggaattttttttttttttttttttttttttttaagatggtgtcttgctctgtcgcccaggctggagtgcagtggtgcagtctcggctcactgcaacctccgcctcccgggttcatgccattctcctgcctcagcctcccaagtagctgggactgcaggcacctgccaccacacccggctagttgtttgtgtttttagtagagactgggtttcaccatgttagccaggatggccttgatctcctgacctcttgatccacccgcctcggcctcccaaagtgctgggattacaggcatgagccaccacgcctggccaagggcaattatatttgcatcaagtgtataaaaagccacctcttaggaagttaggagactgatcaatcgccaaattaaacattgattccttatttgcccataggccctaccacaggtatccagcttggtttggcaaaggaaggagcataattatctgagctctattatttcttaattactaattctaatacttaatgatttcccatttattgtaacttgataagcatacctagatgttctttgaatcaacttttgacacaaaggaaaatgtgagttttaatgctgtctttaaaatctcagtagtcagaaatgctcatgagaacattttgtcttggacattcacagtttctttgtcaaatatactcatttactaatttgccattcaaaagctagtgcttgtgtgaaactaagaaaaagtctagaaagaattcattaggccaaagtttaaaaggctcattagtggatcagtgagaatgttgttagcttcaactaagaaatttgaactcaaaactggcttaaacattatgtaaattataaaataggaagtccatggtagcacaagcttcagatttaattgattcagtggctaaatcataattgtgagaaaacaggtttctttcccctcttaactctgcttggtgttaacttctttcccaggcagatggcaagatggctacagcactttcaggtgtcttacccaatacggcagtatcctgaggaactgccttctttaagggctttctctcaaaagatgtgaggaagctttttccagaagctctcctcttaatctccagcagacctctcctttactcattggccagaactggacccatgcccatttcagtcactgacaagaccgggaagccattggcttgggccacacagagaagtagtggataggtagctgcttgcataaacaaccacagtgtctactatagtcagtccagggtgtgtgtatgtgtgttttcaccccttggcctcatataccagattccgtttttcctttgtctgttgtcacttcacttgttcaataccctaggatggaaaggttatgaaaaaaaactaagcagaaaatccccagagcacctctttccgaaatcactcaggctcattagcagcgggtagttgatgggaaaatatgtattgccaaggatgagcatgttgctgcaatattactattatatattgttaacgtcatcctctttagagggtaacttgcagaatataaggtagatgttggttacagacagtaattggtattggtaaattggttggttttttttctgtcagggttcccaaggctgtacataatttgtacagtattttataaagaaaaaaaaatgatgcttagatttttctaaacattacctttttttttttaatctagagcttttctggaaaaagaagaaaagttcaaccacctcaagtaagttactgcattttcattttggtttctgaaatagtttgattagttttatacctttcttattaataaaagtttctactatggttgcttttaggtcataccctggtaaaatttaggactgaagaaaagggcagtataaactaatacagttgaatagaaaaattattttaagggcatggaatgactcagataggttaaataaataaaacctttgtcctgcttttagtagtacaaggatgtgtcattcacaaagtgcttaaaaatagtaagtgctcaagtaatttcagtctccccccatcccttccttttgtgaacacttctaattagcagcacctagatcaaaaagggtgtttggcagagtttgacttcagccagccctgtctaaagtgctactttactaattagttgaaccttaaatagtaaggctttgctagaatttaacagtggtaatgtgaatttaaagttggagaaaactttctgatttttaagagtagcatatttttttcttgtaaaattctgagtaagttttttgatagcagctattttttcccgaagtaaattattatagttgatccctcaagagagaatttctaagtattttaagcagctatttttaaagttaactaactttttttactattgattatgagaataatcaggtttttaaaagttattctcttatgtagtaaactgtaacacttcgttgctgctttaaaaatacaattcacataacataaaattcatcattttaaagtggctattagtatattcactatgttgtgcaaccatcaccactaagtctagaacatttccatcactgcccccccaaaaccctgtatctattagcactcagtcccaatttccccttctctttaccccctaatagccactacataatacttgtgtctaaattagaaatattaatatataagtgagggtgttcacataggtagacttgaataaatccaatttttattggaaggtaaaagaagtattttcttcactattttccacttcaggttaactttagtaatcaacatagaaagttttccattaaaagggatagttgatgtctcaaatgatttttttctcctggtagtagtataattagcatttttcttcttctttccaacttttacttaagctcaagggtttttcagctttgttacatgggtaaattgcatgtcatgggggtttggtgtacagataattttgtcacccaggcaatcagcataatacccaataggcagtttttcagtcctctccctcctcccatcttcaaataggctccagtgtctaataatcaggctttttttttttttttaacttattctttctaagtataaaaggttcaggagagcttagtcattagaaaagagaaaaagaaatatttaagccttgttattttatgcctttaaatttatgatatagtcaacatatatagttgctcagttttaagattattctcatgagggaaaaaaaccatttgatcatgcttttgaatattttaaatatttatagttcatttggcactttatctgcattaagatacttcagaatcttattcagcaatttgtgtcgttattgtttacagcagaactattcactggctgaacttgatgagaaaattagtgccctcaaacaagccctcctcagaaaatcaagagaagcagaatccatggcaacccaccaccttccatgaaaaactcctctcatccttgtcattttacttttttgtatacatatgtgtaacttacactgttattaattcaacggatatatatttatcaatgtagacttctctgtgaagtcaaggtttattttcacatgagtccagcttgcagcaagtaatcttcaaatattccagtaagttttgaaataatgaatgcattgaaaatagcattgttggaatttattcccttctgttttaaaggaggtattttggaaattgaaaaacttaatttacaagtgctggtacatcttttttcttttgtggaccacaggaaggaagatttattttgatattgatactttaaaaggactttatatttgtaacattgatgttaaccagtttattagtttaaatcagtactttgcatataataagcattcaacaaaaatttattgactgaaatgaattttaaatgcatgtgtatgaacttgtttttcttaatctttaagatgtcagtattcatgtaaataaacaatagatccagctttatccct

SEQ ID NO: 142 - DNA, 32744 bp, Homo sapiens
  source 1..32744: mol_type = other DNA
agcctactcggtccggggttgcgaactgtaaggtctgagttgctgcggcgcaggcagcggagaccaagcagggatcttaacagggtttagcgccacgcgggccagggccgaggccggagctgggaggggcgcgcccgggaaggggcggagctgcggcggtggcgccaaatcgcaaatatggcgccggagcggctgcggagccgggcgctctccgccttcaagttgcggggcttgctgctccgtgggtgagtgggctcgggcagcttgaagggcgagagggaagagctggggcccgtctgcctggtgcggcagcgggacgcaccgcggcggctccccgcgcgccgagagggggcttgaccttaaatttcagagttctaagaagcggtcgggcgcggtggctcacgcttgtaatcccagcactttgggaggtcgaggcgggcggatcacgaggtcaggagatcgagaccatcctggccaacatggtgaagccccgtctctactaaaaatacaaaaattagctgggcgtggtggcgcgcgcttgtagtcccagttagttgggaggctgaggcaggagaatcgcttgaacccgggaggaggaggttgcggtgagccgatatcgtgccactctactccatcctggcgacagagagagactccattaaaaaaaagttctaagaagcgaggtggatcttgaggctgccgtgccttctttggtttccccgacccatgcgaggagtttaatgtttcttctaggcgggccgaggctcttctgcacatgtcaaactgagcccgagaagctgcaacctatctatggcagccggttatcaacattgtgacctggacagctctcaggctcccgggaaggttgctgagacataagatgagagacccgagaaagcccacttgcacgtctgcagttgccaatttatgtgaaagtcaggtttcctgggcatatccgtgtttttgaggacctatagaacatatgaaccttcccaagatttctctcattaaatctgctccgtgttttagagttctatatgtacgtgtgtgtgtgtgtgtgtgtgtgtgtgtgtgtgtgtggtgtgtgtgtatatatatatatgtatttttttttttttgagtcatggtctcactctcgcccaagctggagggcagtgatgcgaacttgacttactgcagcctcaacctcctgggctgaagtagctgggactgcaggcatgggccaccatacctggctgattttttgttgttgtatgttttttagagacggggtctggctatgttgcccaggctggtcttgaactcctgggctcaagtagtcctcgcgccgtggcctcccagaatgctggaattacaggcgtgaaccactgcgcctgacctagaacacaatattttatacatattgaaatacctgctggattggatatacctctctgtatcagtttttattgcttttgtgtgtgtagatttttggttggttttgtgagttttatgggacttttaactgtgctttgggagatgccttgggagaaaataatgaattttgttcaattggtccttgacattttgaaagcatgaggaactgatgaattaactttcttttcgcttagaatttgacctaatattaagcttttgttcattaattatttcagtcataagtatacttaaatctgttagctgcaaagcaccgtgctggggtaagggggtgcaatagagagcaagagctttgtagggggcagataatgtattctattgctgcgtgacaaattaccccacaatttaaaggctaaaacagtacacattatctcaaattttctgtgggttaggaattcaggtgtggcttagttgggtcctcaacttcagggtcttttcacaaggttgcagtcaagatggatcatctcaaatgttgtccagacagcattcgcttcaagctcattcagttgttggcaggattcagttcctgattgcctggcaggctgttggctggaggctatcctcagtcccttgccatgtgtgcccccaacatggcttcatcaagagagagagtcttctagtaactctgaggcaacctaatcaaggaggtgacatcttgttatttttaaattttttttacttttaaattttactttcaaaattataatacagtaagttattctatcccttttgctatattctatttttagaaacaagttactaggtccagcccacacttaagggcaggggattacataggtgtaactaccaggagtaatggattattaggggccatcttagaagtctgtctaccatggatattaaatgactattttacagctatttaatctcaattgtgaaagggattccaggaaagaagggctatgagagtttatgataaggtgtataaactgccctagagtcaaggaagaacttcactgcagaagtggtttgggctgacttaaagaatgagcaggacttggctgggcgcagtggctcacgcctgtaatcccagcactttgggaggctgaggtgggcggatcacgaggtcaggaattcgagaccggcctgaccaacatgatgaaaccctgtctctactaaaaatacaaaaaaaaaaaccaaccagccagacgtggtgatgtgcacctgtaaccccagctactcaggaggctgaggcaagagaatcgcttgaacccgggaggtgaaggttgcagtgagccaagattacgccactgcacttcagcctgggtaagagagcgagactccatctcaaaaaagaaagaaagaaaaaaaagaaagaacaggacctgactaggtggagagaagagtgggaggaaatggccatataaagaccctaaagcaggagagtgccaggaaggccagggacatggtatgagcttaatgggatttggcaggggcaagattctgtatggctttacaggctttggtctatgctaagaactgtcccaagatgcaaccaaaatgtatatgattttagggactcagtggtcaaatatttatggaccaccttcaagtgtatttagaactctgtggaaggatggcacagagttctaagttacagttttaaagttatctataattcagttctcagttatctataataaatttgagagatgcaacacctacacacaaaacaactaataaagcaacccaatatatagaacaattagtgttatggctataacaataatatgtgaaatgttaaattgtgtgctacaaatacagaatggcatgtaattagctaattgtttaatattgtaatcagcaataatattgatgtgaggtataaagtgtgctacaaatacagaatggcatgtagtggcatgtaactagttaatcatgttcattctgatcattgttgggatttaggtaaggaattaatgtgattttattttatttatttattttttttgagatggagtttctctgttgcccaggctggagtgtagtggcccgatctccgctcactgcaagctccgcctctcaggttcactccgttctccctcctcagcctcccaagtagctgggactaccggcgcccgccaccatgcctggctaattttgtttttgtatttttagtagagatggtgtttcaccgtggtagccaggatggtttcgatctcctgacctcgtgatctgcccgtcttggcctcccaaagtgctgggattacaggcgtgagccaccgcgtgcccagccatgattttttttttttttttttttttttaatgatggtcagactccatgaagcaggtggcagtgccttaccatatgtgtattgtcaggcccgagggcctcttccatctttgtcaagtggagtgccaacctctcctttcgtataacacaaattcatgtgattttaatgagtgttgcttctatgattatattcaaatgtcatagttttttaaagccttttttttttttgagacggagtctcgctctctcgcccaggctggagtgcagtggcgcgatctcggcttactgcaagctctgcctcccgggttcacgccattctcctgcctcagtctcccgagtatctgggactacaggcgcccgccaccatgcccggctaaattttttgtgtttttagtagagacggggtttcatcgtgtgttagccagaatggtcttgatctcctgacctcatgatccgcccgcctcggcctcccaaaatgctgggattacaggcgtgagccaccgcgcacagccaagcctattttttttcttattttacaattgaaaacagtgattattggaatttactttgaacaagtgcattatcaaattaaatatatgagtgtcttatgttcaggatatggtgcttgacattgaaacagatggactcttgccttaaatgtagggtagtaagtaataaaaggctaatgtaatatatcagatctaaggtatatgtaaatgtgatttttaacaatttcagaagaaaggggagattgcagcaggtagagctggtctaggaagccttcttagaggaaggatgtgatttgaggctttatgttagcaaggcataggaggatgattttgttcagaaagcacaggaaagataaagtgctacttgaagagagcagttagtggttcttcctttcagtgccagattgatgagtatttgctgctttttggcagaaaacttttagcctttaattactaatgacctgcctcatttttcctttccttttcttagtgaagctattaagtacctcacagaagctcttcagtctatcagtgaattagagcttgaagataaactggaaaagataattaatgcagttgagaagcaaccctgtaagtaatattttctgataactcctaaattgttaatatagttctgcatcttcagttagatgtatagatttaaattgaagttgaggcttcactattaagatgtcccagtgttataagatgtatgcatggtagcatttcttcccaaggggtaatacctttagtttattttaatttttttttctttcttttttgggatggagtctcgctctgttgcccaggctggagtgcaatggcgctatcttggctcactgcaacccccacctcccgggttcaagcaattttcttgtctcagcctcacgagtaggtgggattacaggcacacacctccatgtcaggctaattttttgtattttagtagagatggggtttcactgtgttgctcagcctggtctcaaactcctgggctcacgcagtccacctgcctcggcctcccaaagtgctaggattacaggcgggagccaccacacccggccttttttattttaactgttgatgacatccaaacccttagtttagttggaacctcaggatgatccccaagggcccttttatagttcctttcccccagtggaggtgtcaccaccatgtttcctgcacttggcttctgattttgatctggtcctttatggtcactttgtctctcctagtggctattaccatgtcttatttaagtcattaactcctaaatgtttgggaggaaaaaaagaagagtaaagtaaacagagctgacatctcttcttgatttcttcagggattttttttttttaatagaatggctagtcattttaacttaattttgtaagtctaagttaaagggcagagacagtaacttttcaataaaaagcaattctactaatgcactgataatgaatacactaaacagagttggaaggcattttactgaaagcaaactgtagaaaatagacttttttttttttttttttttttttttccctgagaaggagtcttgcactgtcgcccaggctggaatgcagtggtgctatttcggctcactgcatcctctgcctcctgggttcaaatgattctcctgcctcagcctcccgagtagctgggattacaggtgtgcgccaccatgcctggctaatttttgtatttttagtggagacgaggtttcaccatgttggccaggctggtctcgaaccgccaacttcaggtgatcgcccacctcggcctcccaaagtgctgggattacaggcgtgagccattgtacctggtgaaaatagacattgatacaaaattatataacgcttgtgataagaataagtggggccaggcatggtggctaacacctgtaatcccagcactttgggaggccgaggctggtgggaacgcctgagttcaggagttcaaggtcagcctggacaacatggcaaaccctgtctctactaaatatacaaaaattagccaggcatggtggcaggcgcctgtaatcccagctccttgggaggctgaggcaggagaatcgcttgaacccgggaggcagaggttgcagtgagctgagattatgccactgcactccagactgggtgacagagtgagattccgtctcaaaaaaaaaaaaaaaaaagaataagtggatttcaagaaaagcacattctataaaagatggtcatttttttcttgagtataccaaagttatgaaacataaggtgacccaggaaggtagaggtttgggaactccttcaaggcatttgctttctacacactgcttccctcctctcccttttttttttttttttttggtgagagcgggacagagtctcactctgttgcctaggctggagtgcaatggcgccatctcggttcactgcaatggcgccatctcggttcactgcaatggcgccatcttggttcactgcagcctctgcctcccgggttcaagcgattcttctgtcccagcctcctgagtagctgggactacaggtgcgtgccaccacaccaggctaatttttatatttttggtagagacagggtttcaccatattggtcaggctggtgttgaactcctgacctcaggtaatccacccaccttggcctcccaaagtgctgggattacgggcgtgagccaccacacctggcccctcctctctttcttcatgttcttttttggaaagtcacatctgttgaaacatgcccaaagaagctagaatggggccaccaatacatgaactaaacctctgttccagttttttatgatttgcagtccatttcagccatatacttcggggagttttctgagacacctctctattcaacctgtcagtaaaactgtatcagcatgtttcctcttgccactgccacactgccatagggattcagggacctttttgttaaatacttaataccacaagcatgggactggaaagaagaaatgctcttccccttggaaaaaaagtctgatatttatagcaccctgaggatagaagtgggtatggctcactgtccactttatcttagcataaaaggctgagaagtgccgagttcactcttaatgttatatagatgctagtcacttcaattatataggaagaaacatactccgtgatacaggataaatggttattatatctcattttcattcctaaaggcagaattttacatatacctttgcttaaaaaattcctttacagttgaacatttagaaactgatacttgtctcacgcctgtaatcgcagcattttgggaggctgaggcgggcggatcacgaggtcaggagatcgagaccatcctggctaacacagtgaaaccccgtctctactaaaaatacaaaaaattagctgacagagcgagactccgtctcaaaaaaaaaaaaaagaaaatgatacttgtccctgtgtacattgatttaagatggcacatggtattttgcttgacaacatatcaaagtgattaaaagagcccccactggaatcagtcctgggtttttgttgctctctatctcttctagtttttgggcaaaattttcaacctcttaaagttgtattttccctatctataagatatgggcatcttaacatcagtcttacaggacatctacccagtggaataatacttgtaaataaagtactgaggatggtgccacacatttactcaatgcttaataagtggtagctgctattgttactatcatgctcattgaaactgagcagttatgatgataaagttatactaatgtaaccttattaaaactgggagcttagagaattttttttttttttgagatagtatctcactctgtgtggcccaggctggagtgccagtggcatgatcacagctcactgcagcctccacctccctgggctcaggtgatcctcccatcttggcctcctgagtatctgggactacaggcatgtgccaccacccccagctaagttttatattttttgtagagaaggggtttcaccacgttgtctgggctggtctcaaactcctgggctcgagccatcctcctgccttggcctcccaaagtgttaggattataggtgtgagccaccgaccctagctcagaaatgttcttataactaaacagggtttagaaaattaaggcatttgactgtatattaaggtattgtaactttgagtgtggaaaatgaaggtatttgagataaggcttttgttattgttctgacctaacactttttttctccaaaaactgtataatgagaatctcagtattaatatttgcaaattatttttgggaaaagagctgtctgtggaaagaactatttttttttttgtttttaaattttgactttgaaattctcttttcagtgtcatcaaacatgattgaacgatctgtggtggaagcagcagtccaggaatgcagtcagtctgttgatgaaactatgtatgtgggtacagttaacttttttcctccttggaggtgttattgagcacttatttttaattattgtcttggaaaattattagtgatcaacgtttctacagtgattactgttgttatttctgtgtgtctttttaaataatggctttctttgcaaacctcattattaaatgactcatctttactggtttttcctgggatttgaggttacagtgttgcttgtaccattcattactaacttttgctgcctacccaaccggttgatctgactttttattctgtatgctacaaatgagttgaattgaaatgaatattcagaagtataatttactttgctcttaggaaagtaccatgtccagagaagttcagcaactttacttggtcacatggtgaatggcaaatgagggtaggacctcagttttgtgactccactatgtcatgtttttaggtttaagaatttatatggcagtaattcttctgggttttatttctctgaatatccctctttcctcttgatatgatacttctatacaaattgatggcatttaactggaaggaaaacactggggaaaatgggctgagagacagttttaacattgccacttctttcctatttggggcaatggagatgattgaaaggagtcattatctttattttagtcagaagttataatcttctccctgtcagaacttataactgctaaaaaaaaaatagagaaattgaggatttttaattttacccttgcaaactcatttaaaatactatagtgtgaccagatgcagtggcttatgcctgtaatcccagcactttgggaggccaaggtggctggatcacttgaggtcaggagttcaagaccagcctggccaacatggtgaaacccatctctactaaaaatacaaaaattagctgggcggtagtggggcgcacctgtaatcccagctacttgggaggctgagacaggagaattgcttgagcctgcgaggtggtggttacagtgagctgagatcataccactgcactctagtctgggcgacagagtgagactctgtctcaaaaaaaatacataaaataaatactggagtataatgaatgttcctaaagccatcaatagaaattcaaaatgattgtactgaagtttgattattatcctaaaatagacgttactcgttgtttaccctaaagttacctgttatttatttatttacttattttcccccacaccaatctgcattcactttattcttctgtttatacattctcttgctcccagatttggaggcagaacgtaatatgagctcaacagtcctgcacagagccatgtaccatatcgcatcagttttccttttcccaacccctattccacccccactcagtaaagccccttgtccaggtgttgctcttgggggtaagaaagcagaaaagcaggctgggcgcagtggctcatgcccgtaatcccagcactttgggaggccgaggtgggcagatcacctgaggtcaggagttcgagaccagcctggccaacatacagcaaaaccccgtctctactaaaaaatacaaaaattagctgggcatggtggtgcatgcctgtagtcccagctatttgggaagctgaggcaggagaatcgcttgaacccgggaggcggaggttgcagtgagccaagatcgtgccactctgctccagcctggacaacagaatgagacttgtctctcaaaaaaaaaaaaataaaataaataaaataaaataaagaaagaatgggtagagattccagtgagtgatgggagcctctttccaaggcacaaggcgccaccttctcaatatggccactgctttgttcagatttgggcagtgtgctggccaggagctgggggctgcagtacctccagctgactgaggaggcaagcattgtgagggtgctgctgcaggtccacagtcatcattgaggccaggagctgccacactcctgaagaatgcgtggggctttgtgggatgctgagttggttctgcacagcaagggccacactgtcacgtttcttgaacaccatttcgtaagggccttccccaaacattgtggcatatatcacacagcccagggaccagacatcagtctgttcatcaatgacacagtgactgctcagggaagagctctagggctcagtaggagatggtgcactgctgggtcgcctagtccggcagggtcagggcctggtgggagcccttcatgtgaggcatgcttgattcatggcatccaagtgtattaaaactggctgcccctcgtctccaagcaagatagtggtgggcttcaggtccctgtgggcctaacccttggcatgaatggcctcaagccgctgtagatacccagcaggagctgaaggatttgatcctaagtcaggaagttgccatcgtccttcggcctttctctccattccacagtatatctctcttaaagaacggaagcagcagctgggcctcatgcttagcaccctactccctcagacagtaagccgtgaggtaaaggatgttggggtgattgaagaggtgatgcatgtttgcttcttggctgggcctcctcccagtcctgctgctcgtgacacaggattcgcttcagggcgtagaagtgtccatcctgtaacccctccactaggtccacatggctgaacccactctcccccaggttctggatgaagaaatagctattgtcaatgatgacatttccctaagagcaggcacacagtgcatggcccatgatgtctcagtcatcctcctcaaggactgtctgaggctgccaaagggctcgtccaggatgagtgggctcttccaggcaatgcactaagcgcccagggatcatgattctcatctagagtaaacaggtcctggtgatgccagttcagcaagggtggggtcaggtgccttaaagcctcagggcacatagcaacgaccaggatgcttcctccaaccccagcccacttttgggcagctcctgctcccacacctgtcaggcctcaaaggcagggcacagggtagtttcagaggaggtgcatggctcaggcccatccctggcctcagtgcgcagtgcctgggtcggccagcccgtactcctcactgacctggctcggctatttctgtcaggctgtttatatgttatagccagcctacatggaggtccagtggggactgaatggtaaaggatttttgtaccttcaattgtcagagagtcattatatcataccacagtagaggctcttgttctcatagatgaagagatggcatgagaagttcaataacttactcagactgatctaccagaaaatagtggagcagtgtctggagtctaggttttcctcaagttcagtgattctcagccactctatacttgttacctctagggtagcatgaatcttttttgatcattttcaatttgggagataaacatgtaattttaggaaagatttttaggttgggatatttatacagtagtgctgtggaaatttttaacttcttttaaacatggttatattattaaaagtatctgaaattaaataattttttttggttttccatctctaacactatatatatattgtataagtctgaaagatatggccagaattggagggggagctctttttccattgtgtaacttttcctgggacacttctgcataacattttagatttggcagggcgcggtggctcaggcctgtaatcccagcactttgggaggccaaggcaggcagctcatgaggtcaggagtttgagaccagcctggccaacacagtgaaaacccgtctctactaaaaatacaaaaattagctgggcgtggtggagggtgcctgtaatcccagctacttgggaggctgaggcaggagaatcacttgaacccaggaggcagaggttgcagtgagctgagatcgtgccactgcactccagcctgggcgacagaactagactccatctcagacaaacaacaaacaaaaaacattttagatttttaaaattgttggggttgggcatggtggctcatgcctgtaatcccagcagtttgggaggctgaggcaggcggatcacttgaggtcaggagtttgagaccagcctggccaatatggcaaaaccctgtctctactaaaaatacaaaaattagctgggtgtggtggcacatgcctgtaatcccagctacttgagaggcgggagaatcgcttgaggccgggaggaagaggttgcagtgagccaagatcacaccccagcctgggcatcagagtgagactgtctcaaaaaacaaaacaaaaacaaaaaaaataaaaaattgttggaacttaatcatatcctttaataatactgtagctcatggccgggcgcagtggctcatgcctgtaatccctgcactttgggaggctgaggtgggtggatcacctgaggttgggagttagtgaccagcctgaccaacataaagaaaccccgtctttgttaaaaatacaaaattagctgggcgtggtggtgcatgcctgtaatcccacctactcgggaggctgaggcaggagaatctcttgaaccctggaggcggaggttgtggtgagccacgatcgagccattgcactccagcctgggcaacaagagtgaaactctgtctcaaaaaaaaaaaaatactgtagctcataagagtagtacatatagggagagatttctttaagatgtgactattgtttatataattcttctttttcaacagatgaaattcttaactggaaattaacttgattaatttttttcttgagagttttggcaatgctttcttgtcccttgagatgaaaatgcacaagctaaacattttacacccattgtatttttgacactataagaaattatgggctgggcatggtggctcacatctgtaatcccagtactttgggaggccgaggtgagtggatttcctgaggtcgggagtttgagatcagcctgaccaacacggagaaaccccatctctactaaaaatacaaaattaactggacgtggtggtgcatgcctgtgatcccagctacttgggaggctgaggcaggagaatcgcttgaacccaggaggcggagcttgcagtgagctgatatcccaccattgcactctagcctggagaacaatagcgaaactctgtcttaaaaaagaaaaagaaaaagaaaaagaaattgtgtgcctggcctgagaaaatgtgaaaagtgtgttattacaaatacttataatgcaagttatcatgttcacctagagtacttatgttttagtaaatcaggtctgtattttgtgggatgtttttcagagagcacgttttcaatatcataggagcatttgatattccacgctttgtgtacaattcagaaagaaaaaaatttcttccgtaagtatgtcatccactgattttaaattaatttcaaatgtactttttttttcagaaggtatagtctcttgcttcacttttggctcacctttgtgtattatgatagtcaaaaataggcattctctttttctagtctgttaatgaccaaccaccctgcaccaaatttatttggaacaccaagagataaagcagagatgtttcgtgagcgatataccattttgcaccaggtaagtttggtagggggcggaggggaggatactgggtaaaatgagagaaaaggagactgtttcagtttagggaaatctcagggatatttaaagaatggaattttgtggtccaaagttggtcattcaataaactgttattaagatttctgtgattgagactgtgtagaagatacagagatgaaaaagctattttccccttaacaacaatgatgatggtaaaaatagtagttactatttaatacatgatatgccaggtagcacttaacatacattatttacctcatttaatcctcataatactaataatgtgtaaatgctattattcccattttacggatcaggaaactgaggcttaaagaagtttagtaatttgcccatagatcgtatatagtaagacaggattttaatccagcctgactctaaagcccaaccattgcctactatactttaccactttcaagtagcttacagtctatgaagttatagacatttgtgcaatacataaagtagaattttatatgtgctataaaagagatacaaacaatgtattcaatagaaaaatcaggaaaggcttcaaggaaatgatggcatttggcatggacctagattgccttaatcttgtggaaatggggaaaaggtggtgattgtgaagaaaggtacagcaaaaaatggactctgagcaggaaatgatgagaaaatcaggagtagtgtgggatcagtttggaaaggcaagtgggagccaaattgtaggagcactttggatgccacccttgggagttgggactgttctccttgtgtgaggtgctttggaataccagagaaactcggtcgcagccaggttttttgagtgcttcctccaccagcagatatggggatgacttggagtgtgagagaagtcttctaggagtctgtggtattagtcttggcataaatgatagcctggatgaaggaagtggcaaggggtgtagaatgagggcatcacactcaagcagcagaaactataacacatggtgactgtctggatgtgaaggagaagggagggggtgaagaatcagagatgagtaaggcctagagtctgagagagtagaatatagaaaaatacattaaacaggaaaaagagaatgttgtagaaggtgatagcaggttctgttttaagcatttgagttaagattgccaggagagtatcaagtgaagtgtacatctggagctatggaaagagagttggtagcaagagagagatttgggagcatctgcatagagtaaaaaatggaactgcaaggatgagaccttgggagaaagagaagtgataaaaagacaagagggaggctaggcgcagtggctcacgcctgtaatcccagcactttgggaggccgaggtgggtggatcacctgaggtcgggatttcgagaccagcctgaccaacatggagaaaccctgtctctagtaaaaatacaaaagtagtcaggcatggtggcacatgctcgtaatcccagctacttgggaggctgaggcaggagaatcgcttgaacctgggaggcggaggttatggtgagccaagatggcgccattgcactccagcctgggcaacaagagcgaaactccgtctcaaaaaaaaaaaaaaagaggggagaggatagaacttgggggccaggtgaggatggtgttatatggcagaagcacaagaaggcttcaaggaggagcagatggtcagcggtaggttaaataaaggttgaaaagaatgatcttgaggaaccagcatcctctgctgcttccattgccgacatagtgttgctaggttaatctgcccaaagtatagctctgaccacctcgtgggttttgtacagaagtctttcaaggaaattcactgcctattgaattaaatgcagattatccttaatatgtaagatcttctctcacacataattggcctaatctctgcttttcctgtagtcataatctgggctggagccaaaactgaaatatggaattattgtttctgtttctttcactacttctgtgactttgtttatcctgttgactgctcttccctcttatctccactgttgaaaccgtcctattttggaaggcttttctcagattcctcctttctggagcctgtcttgatcttcagttggatgcagtctttttcttttttatttattttatttttgatatagagtcttgctctgtcgcctaggctagagtgcagtggtgcaaacttggctcactgtaacctctgcctcctgggttcaagtgattcttcttcctcagactcccaagtagctgggattataggcacataccaccacacccagttaacttttttattttagtagagacggggtttcaccatgttggccaggctggtctcgaactcctgacctcaagtgatctgcccacctcagcctcccaaagtgctgggattacaggcatgagccaccatgcccagctgaatctctttctgcttgaacccagtagtacgtctttttttttttttttttttttctgaggcagagtcttactctgttgcccaggcttgagtgcagtggcgcaatcccggctcactgcaacttccgcctcctgggttcaagcgattctcctgcctcagcctcccgagtagctgggactataggcatgtgccaaagcgcctggctaattttttgtatttttagtagagatgggtttcactgtgttagccagaatggtctccatctcctgacctcgtgatccacccgcctcggcctcccaaagtgttaggatcacaagcgtgagccactgtgcccaactcagtagtacgtcttttatgtcactgactggacttggccctgccttgcatttgaggtgcttatccctgtgatcagactgtggattcgttgtttatctcctgtgccacatttggcactgtcctttatacagagaaggtgctcagtaaacaccacatttcttttttcttaagtatgttttgaagtctactctgttatggtgggtgtgccacttatcccttctgagcctcgtttattcatctgtgaaataaacaggttgaagttcagtccatccatattttcattgcaattatcttccagaaaatgaatctgatgttatcattatcctacttcaaaatctttgtttctcattgtctataggacaaacttcttggctgggcatacgaagtttgtattgtcagggctttttgagctggaggttacagaaactcaaatagattaaaactgaaaaaggaatatattggcttagcttgtattatgaagtctagaagtccaccagtttcaagcctggctggattcaggtgctcacacaatatcaggaggcatctgtctctttccatgtcccacctcttttaaaaaattgattttactttcaaataggttctccctataaagtgacaaagatctccactagtagccttagcaactcttggaaagagagttcctcttttctaatagctctagcaaaagtcttgaatctgtctcttttgagcctaccttgaagcacttgctcatccttgaaccaatcactggccaaaggatggagtactttcattttctagaccttgaattcctatctatagaagggggaaggggtatcaatcctacctaaactatatggactgagagttggggagggaagtatctccacatggatcttattaatctctggccttgtctcatgttctaccttgtgcaccgcataattcaactgtattaaactttgcatagcttcctaaatactctaactcttataatttctctgcctgaaatgtctttttttttttttttttttttttttttggagacacagtttcgctcttgttgcccaggctggagtgcagtggcacgatctcagctcactgcaacctctgcctcctggattcaagcaattctcctgcctcagcctcctgagtagctgggattacaggcacctgccaccacacccagctaatttttgtatttttggtagagacgtggtttcactatgttggccaggctggtctcgaactcctgacctcaggtgatccgccctcctcgacctcccaaagtgctgggattacaggtgtgagccaccgcgcctggccctgaaatgtcttatctcagactccttttgtttcttactacccaaatcttatttatcatctgggctgttgttcagtggcccctttggcctggggtacagtcagccctcacagaactttgttgtgtggtggcacttctctttcactagccccaatgctctcagggtgacacttggttgttcttcatatcctcagcctacaatgtgctgctgccatacacacaatagacctttaaaatttttacattttttttgtcttaaattttaaaacttacattactagatatttgtatgttaaattatgtgggttttcaaatttgtggagaataagtaatagtgacattagtttaaggacagtgtttcatcagggcactattttaatgaatcttatatttaaatgtctgtttcaggaattcatgtgaatctttcttttttatagaggacccacaggcatgaattatttactcctccggtgataggttctcaccctgatgaaagcggaagcaaattccaggttagaacattatcctagttatgtagggggtataagtgtgtaagtttaatatttgttgcttaattctaattcattgaattttaaatgaaaataaactattggtaactgtttagctaactggatgggctgcatgcccacttttgatacagtccattcctagagtcctgtgtcccacaaatctctaacagaagctactgcttcctttgagaaggccctgatacgatgctagccccagatacactctggcctccaaggtagattcctagctcatttggatactacactggctttctgataacttttcaacatttcttttcttgccctcactcatcccttagtgaccataacactaaggaactcaaatgctggttccttgcccaactcatccctcagtgaccaccacacacagttattgaactagaatgtgttatattggttgaagtgaaaacttaaggtactaaggaaacaacatttatagaatgaataagagaacacaaatgggtcccacaacctggccaacatagtaagacctcatctttataaacaataaaaaacattagccaggcgtgatgttgtgcacctgtggtcccagctactggagaggctgaggtgggaggattacttgagcttgggaggttgaggctgcagtgagctgagatcatgccactgtactccagcctgggtgacagtgtaaggacccctctcaaacaaacaaacaaaacttttattagagtataaattagattttagaaattgacattacttatatttccctaccaaagatcatctatatgttttctatattaggttttctctggcaactgagatgcccacagcccaggagccttttcccttttctcctctttgacaaagtaattttaaggcttaactaaataattattcttttcaaactgtcttaattctgtatctgtgatggcacattccctacttaaattacatttatctacctgtataatatccttttaccaattgcaaaaatgatgtgctaaaaaatactgttatttttacttctcttgtgttgttttaggttcttttttttttttttcttttgatagagacatggggtcttgtcatgttgcccaggctggtcttgaactcctggcctcaagtgatcctcctgccccagcctcctgagtagcttggacaataggtgtgcaccactactcttagctaggttcttttgccttcccttcccccttcccccttcctccttccctttcctttcctttctttctggcagagtcttgctctgtcacccaggctgtagttcagtagtgcgatcttggctcactgcaacctccgcttcccaggttcaagcaattctgcctcagcctcttgagtagctgggacatacgtgcacaccaccatgcccaactaatttttttgtatttttagtagagatggggttttgccatgttggccaggctggtcttgaactcctgacctcaagtgatccgcccgcctcagcctcccaaagtgctgggattacaggcgtgaaccaccacgcccagtccttggttcatattttttaagagtaactccagtattaaatgttaatgtgattattatggaatgatgggattatataagtttttatttttttcttgtctatattttaaatttttttctatagtaaacatgaattatttgtaataagaaaacataaagataaaacgtaaagataaaagaagctccacttggtaatttctataaatatgaaaacttatatatccttttatctagcaattgtgtttctagaatgtgtagaactttattcaacagttattatctgtagctggatgcagtggctagtgcctgtaatcttggtgactcagggggctgaggtggaaggatcacttgagcccagtttaaggctgcagtgaggtatgagagtgccactgcactccagcctgggcaatgtgaaaccccatctcaaaaaaaaaaaaaaaagtttctatctgtgtagtgggccaagaaagttgcacagaaatattaaacattgtttttattagtagaaaactgggaacaacttaaatgtcctttaataggagtttggtgaaataaatggtcatatgtataatatagatatctctattctttaaacagaaggaaatctatatgtagaaaaatggaaagatgtctcagataatattaacttcaattagttaagttgcagaatagtacatatactatgatttcatctttgtaaataaactgtataggtgtgtgttataaattatatatgtatgtatttacatatatttaggattacatatagaaaaagatggaaagttttttgttttttttgttttttttttgagacagagtcttgctctgtcacccaggctggaatgcaaggcgatctcggcttactgcaagctccgcctcccgggttcacaccattctcctgcctcagcctcccgagtagctgggactacaggcgcctgccaccatgcctggctaattttttgtatttttagtagagacaggatttcaccatggtcttgatcttctgacctcgtgatccgcctgcctcggcctcccaaagtgctgggattacaggcgtgagccactgcacctggccggaaaggattttttacaatagtgtcccaatttttactaccttaaactttctgattagaaaaaaagatcagattgagaatgtaaataataatgagagccttttaaaatactaagtaaaattggaatatatatttttaaatagcttgctagttttcaaaaggtactgttcaaagaaaataaaattgatattcttttctatatttaaaaaataaatgtacttatcattattcagaatgatatggtgtgaggattcagtcattggtaagagcctgagtcgatgtggtgtttctttaggcatcatacacttgatcttacagcttttttgtaggacaaaattaaacatcctaagtttaattttacaactttatttccattttatttgattttctactgtaaagtagctataaatgctgaaatgtataccccaaatatagttatttataaaaagttttgtttcttgaaagaatatatttacagtctttaaaatttattttgttttattttagcttaaaacaatagaaaccttattgggtagtacaaccaaaatcggagatgcgattgttcttggaatgataacgcagttaaaagaggtaacttaataagcatcaaacttttatttttggccttggattgatgaaatgtcggttacatagaacatttttgtagtgggcacaggaatgtattctttattgaaaactcgcctcaccaacagaacaatattggaatagtggtaatacgaggaaatagtatcatcatgtcagaagccttggaacaaggataaataatggctgttggctgggcgcggtggctcacgcctgtaatcctagccactttgggaggctgaggtgggcggatcacctgaggccgggagttcaagaccagcctgaccaacatggagaaaccctgtctctactaaaaatacaaaattagccaggcgtggtggcacatgcctgtaatcccagctactcaggaggctgaggcagaagaattccttgaactcgggaggtggaggttgtagtgagctgagatggtgccattgcactgtagcctgggcaacaagagcgaaactttgtctcaaaaataaataaataaataaaataataatggctgttcagcagagaaacccattttctctctccatagggcctgttttacaatgacgtaaaaattaggtcatgtacattttcatattagactttttgttaaataaacttttgtaatagtaaaaaaaaaaaaaaaaaacccagaaaaaacaaaaaccttttctcagtcaccaagtgtctttttcatctgtgtttggtttcctgagaagacatcaggacagagtgtcttgtgcaggagcccagtttgcatagcctgaaattaggcctgtagtgacctctggataaacggagagtactgggtttctgaacaagcaagctgcagagtatgtcctggtcccttggacatgctgttggctgtcttagaaggtacctggggagaccctccttatggcagacatcaaatgtccctcttgccatttcttatctgtaggagtcattctccattgtacctgtgaggagtcagaatctcagttaagtgattagtctggggttatcagactagtaaatggaagagcctggactagaaataatagctgatttttaaaatccactttctccctattgtattctgttgtcaaacttgtagtttaatttttttgtcaacggttttcattgttacataaatgtggatttatttattttcatttttttagggaaaattttttctggaagatcctactggaacagtccaactagaccttagtaaagctatatccttcacttgtctgtattttttaaaatctgcattacgtgaattggggaaattgattatatatccttctaaaatttacctatttgggttctcaatgtaacttctctatgttgctggtgtaggaatgtagagatataatcctaaacagggacagaacaactttaattttctcttatttggagaatctagatgaatcactgacgaaatttatatcatggtaagaatgatccaccctgtcaatattaccaagaattaaacatgaggacatttaaaactaaaattttttaagctctttctaagctgtggtctattcacagtttcaaatgggaagtctttaaatttattatttagaagccttgttggactcaaaatgtatgttgactttattactgcctcaagaatagaattattttcctcaactgttgtgtaccagttccatagtggtttatacacagaggcatgctttgtcttagcagaaggtaagtcagtatactttgttactgtccttcttctcattctccagtaaaactttctgctttgggtaaaatatgttaacatgatataatttgggataccattaattagaagagcatatttttggcaaaataactcttagactgttaatgggctaatagaaatctttttggggtgatgaaaatgttctgaaattagatagtagtaatggctacacaacttgtgaatatactaaaaatcaccgaattacacacccttttttttttttttcttttttttttggagacagagtctcactctgtcacctaggctggagtgcagtggcgcgatctcggctcactgcaacctccgcctcccgggttcaagtgattctcatgcctcagccttccgagtagctgagattataggcgcatgccaccatgcctagctaattttttgtattttagtagagacggggtttcaccatgttgcccaggctggtttcaaactcctgagctcaggcagtccacccgcctcggcctcccaaagtgttgggattacaggcgtgagccaccatgcccggcctgaattatatactttttttttttttcttttgagatggagtctcactctgtcacccaggctggagtgcaatggcacgatctcggctcactgcaagctctgcctcccgggttcacaccattctcctgcctcagcctccctaatagctgggactacaggcgcctgccactacgcctggctaatttttttttatttttgtatttttagtagagacggggtttcactgtgttagccaggatggtctcgatctcctgaccttgtgatccgcccgcctcagcctcccaaagtgctgggattacaggcatgagccactgcacccggccctgaattatatatttttaaagggtgaattgtatagtatgtgaacgatacctcaataaagttgaaaaaaacacttaattttatatagggccataaaatgaaacatttcctaatctgtatcaacacgtactgccaaactgaaaagtgaaaagttctgaatctatttctatttaatgaattttataagttgagactctctgtggatctaaagttgttcactgtggttcattgaggttggcaacctctgtaattagttcacagggcatgagactagcctggcattattgctttgttgtaacataattttgtcctttcaaacatagaggattagacaaatgaaagtgacgttactttttttcaggttggtttgaagatcaagtgtttcatgtcaatgcctttggatttccacccactgagccctctagtactactaggtattaaaatgtttggtttatactctatgggaatttggtaatactggcaggagtgaatgtaagatagtacgtcatatctcagttactaaaaggtgtcaggctttgtgtcaaaatggaaaaagcaatggaaaatgagaattagaagactgggttttgtatgtaatgtgaaaactagcagattggccaacaattagttgcaataccgtctttgtacttcggctttaactgggaaagatttccagtctgttttatctctggggttgatgagaagttgaagtgagataagacaactaggataacacttagaagaatataattccatgttaatataaaattctcatttttatattccaatgaatgaaagttatgtgaggtagcttatagctccttaatataagtgaaagcatcataatattagagctattccaaaatggccttctcttagaggagctgagctccctgtcacttgaattatttgggcagaacctgaatgatagtataaaaattgtacttggtgtcccatgggttgaaagtagtttatagacctttcttttcttctccccactttgaggtgtttaaaaacatttcgagttagtttccagtgtataaaaactagaagatttctcataaaggcctaggtttcagagttctcttaacaggaggatctggcaatacagagcctgaattctcacacagcaaaaactaaactgcagtggttgcccactttgggcagggcatgtatgtgtgccctagttagtgtcagtggactgctgctttgctatttagtgttatcttcctggagcctgtaagcatttgagtttgccacctctgggggaattaaagtagttgccttctaaccatgagattctgtataatggtgatgatttcaaaaggaagcataaagattaagattttagttttaccaggaggcagaggttgcagtgagccgagatcgcaccactgtactccagcctggcaacagagcgagactccgtctcaacaacaacaacaaggattttagttttagtatgcctgtataaattcaaggtgcaaaggcaacatttcctggctgggagtttactggcagggcggcctgtgcagagcatctactcttgctgttgaagtaactgagggaaaggtgctgatcttgctaaggagaacacaagccctaatcaagccaagctcacctctatttgagtgcttttggtgcagtttgtggcttttttccaatatggtaagtttcctttggaatatatttagagcaaaattgccattgtcatggtatttttgttttgtacaagcttcaaaattactactttggaatgagaggtatagttgagttggctggctgtgagtttaccatttgtttctctttagccaagagatcattattataatgtttcaaataattttccacttaaattataccattttctctaaatccaactgcttagtatatgcttagtaaaccaaaggattggtatgaggtgtaataaagtacattaaaataaaatgatcattttattcttgttaggattataaattttctctaaaatgccttcaaaatataaaattcagggggctaaatctggtggtagtcaatcaattcaacaactaatattttagtgagtatgttttatgtgtaaaatactgttttacaaataagtgcaaataggtctacagcatggtcctatcctaaagagatttacactgactcaataccctccctaccattgtgtagttaatgcaaataatttttttttaaacggaagatgtgagtaaggcttttctgaagtttaatttctcaatatttagcttaataggtgtttctgtgatgctctgatttatgtttgggtatatgcttaactgaaatcatcatacaattatgtctacttactgcattcctctagcaactataaaattattactgtacctttgaaaatgccagttggtccacttggtgggaacaataacaatatcagttaccatatctaagggctcacaccgtactaagcactgtgccctgtgggctttctgtacattatcacttgtattccttctagtaaccctgtgcagtagatatcagtttagtttttttttgcatttgaagagttaggttaagaagtgtcgatttgggaggctgaggtgggtggatcgcttgagctttggagttcagaactagcctgggcaacatggtgaaaccctgtctctattaaaaatacaaaaattagccaggtgtggtggcatgcggttgtagtcccagctacttgggtgagagaatcgcttgaactttggaggcggaggttgcagtgagctgagatcctgccactgcactccaccctgggtgacacactgagactttgtccccctaccccccaaaaaagaagggttgggtaatttgtccatggtcacaaactttttttaagacggagttttgctcttgttgcccaggctggagtgcaatggcaccatcttggctcaccacaacctctacttcccggtttcaagtgattctcctgccttagcctcccaagtagctgggattacaggcatgtgccaccacactcagctaattttgtatttttagtagagacagggtttcgctatgttggtcaggctggtcttgaactcccgacctcaggtgatccactggcctcggcctcccagagggaggctgggattataggtgtgagccactgtgcctggcccaaactttttattgttagagatgtgctttgatcccaaggtttccgactcaagccagtatgctgcattggaaaagtagttgagtctttaaaaaaagaaaagttttttcttattaataatgtagttcatgattgcaaaaaaaaaaattagaaaatatatgaaggcacacaaaaggaaaggaaaatcacctgtaattttactaaacagaaaaaaactgttaacattactttatatatgtatatacagttgtgtattgcataacaacggggatacatcctgagaaatgtgttgttaggtgattatgtcactgtgcaaacatcacagtgtacttatacaaacctagatgatatagcccactgtacaccaaggctgtatggtacagcctgttgcttctgtgctacaaacctgtgtgacacgttgctgtattgaatactataggcaactgtaacacaatgataagtatttgtctctctagatacagaaaagataaagtaaaaatatggtataaaatataaaattggtacacctgtatggaacacttatcatgaatggaacttgcagggctggaagttgctctgagtgagtcagtgagtgagtagtgagtgaatttgaaggcctaggacattactgtacactactgtaggctattaacactgtatacttaggctacactaaatttgtttaaaaagagttttctttcttcagtaagaaattaacctagcctgggcacagtggctcacacctataatcaatcctagcactttgggaggctgaagggagtgttgcttaaggccaggagtttgagaccagtctagacaacataacaaaacctcatctctaccaacaacaacaacaacaaaattagctgggtgtggcagtgtgtacctgtagtcctagctacttggcaagctgaagtggcagcattgcttgagcccaggagttaaaggctgctgtgaattatcattgtgccactatacttcagccagagtgacaaaggaagaccctgtcttgaaataaaaattttttaataaaattaattaactttagttactataacattctttataacctttaaaaaattttaaatttttgactctttttgtaataaacagcttaaaacacaaacacattctacagctgcacaaaaattgtttctttgtatcctgattttgtgagcttttttcttttattgattaattgatttactgatacaactgtactctcttcttcaggctggaatgcagtgatatgattatagctcactgcaacctcaaattcctggacataagtgttcctcctgcctcagcttcccaagtagctaagactgctaattaaaaaaaaaaaattgtgtagggattggtgggggtcttcactatgttgctcaggctggtctcgaactcctggcctcaagcaatcctcccacctcagcctcccaaagtactgtgattacaggcatgagccactgtgcccagccacttttttccatctttatattttctaaaaatcttttttgttaaaaactaaaacaagtgtattaacctaggcctatacacagaatcatcagtatcactgtttttcatctccacatcttgtccactggaaagtcttcaggggcaataattcatggagctgccatctgtagtaacaatgcgttcttcttgaaggacctcctgaaggacctgcctgaggctgttttacagttaaaaaaaaaagtagaaggactacactctaaaataatgattaaaagtacagtaaatacataaactagtaacatagtcatttattattgttatcaagtgttacatattgtacattattatatgtgctgtactttcctacaactggcagctcagtaggttgtatacaccagtgtctctacagacacagtaatgtgtggcactaggacattgtgacagctaagatgtcagtaggcaataagagcttttcagttccattatcattctgtgaaaccactcatatatgcagtccgtcattgccaaaacgtttttatgccgtgcatgacagtccatatgtagtagatcctcattaatttacagatttgtgctaaaatgtttttgtacctcctaaagtcaatactaaaggtgctttagtggtcatttatgcttagcagaacagcaaaaaattttgagtcacctggcatgcatgttcccagctgaagtcgaacaggccatactgccttcttgtttcagcctcattaagagatgaccagaggggccgggcgcggtggctcaggcctgtaatcccagtactttgggaagcctaggcgggcggatcacgaggtcaggagatcgagaccatcctggctaacacgatgaaaccctgtctttactaaaactacaaaaaattagccgggcgtggtggcaggtgcctgtagtcccagctacttgggaggctggggcaggagaatggcatgaacccgggaggcagagcttgcagtgagccgagatcatgccattgcactccagcctgggggacagagcgagactctgtctcaaaagaaaaaaaaaaaaagatgaccagaggacagagactgcagggagcagtacagggtagtgcaagaagctctggccctggggccagttttgtgtggggagggggcatttgaatctcacctctggcacctgtttttggagcaacctcagataagtcacttaacatttctgaaccaacttttctcatttgtaaaaatagaatctaccaggataaattggttttaggacttaagactataatcaatccatgtatatataagtacaaattttcccaaggagcaatggttcagtgtttgccaattcattgtttgtggagattttatagaacataatatcactaataacaagaatcaactggctgggcgtggtggctcatgcctgtaatcccagcacttcggaagggcgaggagggtgaatcatttgaggtcaggagttcaagaccagcctagccaacatggtgaaaccccatctctactaaaaatacaaaattggctggatgcggtggcatgtgcctgtaatcccagctactcaggaggctgaggcaggagaattgcttgaacccgggagatgaaggttgcagtgagctgagatcgcaccgctgcagcactgcactccagcctgggagacagcatgagactccgtcaaaaaaaagaaaaaaaaaaaaaaggaatcaactataacaagatatgtatgtgtatatctggagagtttctttttatgcatgaatgcacaggtctatatctattccctttttttggcattataaatggatacatactgtaccttgctttgtaacctgtgtttttcatctaataatatgctatcaacattttctattactgtgaaatattgttttatagcatgattcgtgacattcaggaaatatgttttgagcacatactgtattgccactaggtggggagacagacatgaaacaatcgcccaattacaattggctgactacaatttttttttttttttttgaggcaaaatcttgctttgttgcccaagctggagtgcagtggcatgatctcggcttactacaacctccatctcctaggttcaagcgattctcctgcctcagcctcccgagtagctggaattataggtgcctgctgccatgcccggctaattttcacatttttaatagagatggggtggatttcaccatgttggtcaggctggttttgaactcctgacctcaagcaatccccccacctcggcctcccaaagtgctgggattataggtgtgagccaccctggcctgattacaaatttgataagatctgcaaaggagaagtacaggttcctatgagagtgtataatgggaaaatctaacctcttttgggatcctcagaggaggcctatggggtatttgcatttaagctgggaactgcaggatgtcagtgtagagtgggcaagagtggtggaggctgggagtgtgtagattacccactttcctactgacccttgcttggtgagcattgaataaaaccaagctttgaaggaaccgttgaataattttttcacagttcttggatataggctagtctttgtatatatctttaattccttaggattagccattccagaagtagaattacttgggcagatggttagcacatattttgaggtttctatgagatattgttcaaatggtgtactcatttcttctactttcagtgacataggaaattattattttaatgtttgctttagtcagttttttttttttttttttgagacaagagtctcactgtcgcccaggttggagtgcagtggcgcaatctcggctcactgcaggctccgccccccggggttcacgccattctcctgtctcatcctccagagtagctgggactacaggcgcccgccacgtcgcccggctaattttttgtattgttagtagagatggggtttcactgtgttagccaggatggtctcgatctcctgacctcgtgatccgcccgcctcggcctcccaaagtactgggattacaggcgtgagccaccgtgcccggccgtttagtcagttttaagacacagatatagcctattattttatttactgcttccatattgcttatcttgttttagaatatttagataacctttgtacttttaaagtgttacaaagagtacctttttacactggaaaataacttcattagatacaaagaagctaaatgtatacaactattagaaaaatatctctagtggtatatagaagataattatgttataattatctagggcatactatggaaatattaatttttttggaggtccttctaatacatctgtgaagacttctgcaaaactaaaacagctagaagaggagaataaagatgctatgtttgtgtttttatctgatgtttggttggaccaggtggaagtattggaaaaacttcgcataatgtttgctggtaggtcttattttttttcttctttcttgaactc

SEQ ID NO: 143 - DNA, 23261 bp, Homo sapiens
  source 1..23261: mol_type = other DNA
cagaaggacgaaccagtgagctaagctgcggggcgcgggctcggccggggcaccggtgagtcgccggcgctgcagagggaggcggcactggtctcgacgtggggcggccagcgatgaagccggtgagtcggacgtgctggggtttggaggagcgaggcggcagggacgcaagcggtcccggggacccgatcctgggccggagggcagccctagcctggtagcagtgcgactggcgccgtaaccgttctgcgggtcggggaggtgactcgcacgggcccagcacgggcacgagagacgaaggagcagggtcggtggccgacgaaggaaagacggacattcgctgtgcacctgctgtgggctgtcacctgtcccctgcggggtctcataagcctcccagccgcccagccaaagagggccgagcctcgttgtaccgaggaaaccgagccgaagagcttgagtgtcagcgatgagtgggcgcgataccccagccccgaagggtggccgggcgctacctgcgcccacagggcctggggaaaccttgagtacgaatgccacgccgcggcttgtgggcgacaccaccgctgtcaccatgccccagggccacctggcaatgctgctcttttcccgtgacgttcagaatcacagggcctggggaagcagaaacgtccagctctgttaggattaataaacctggtgaatgggccacacaaatttgaaatatgaatcatcaaagttgctttaaagaaaaaacagatgcaggcaaggagctgaagatcccccacctaacccatatttcctactgcccggcttgacaacctactggaagcctttcctttgggtgcagttgattataatacttcagatagagccaaagcaacagaaatccatagcctagggccgggtggtgtctcgcgcctgtaatcccaacactttgggaggccaaggcgggcggatcacttgaggccaggagttggagacaagcctagccaacacggtgaaaccccgtctctactaaaaatacaaacattagctgagcgtggtagtgcacgcctgtagtcccagctactcgggaggctgagccacgcaaatagcttgaacccaagaggcagaggttgcagtgagcggatatcacgccactgccctccagcctgggcgacagagcaaaaccctatctcaagataaaagaaagaaagaaaaaaaagtccgtagcctaaattagccgtcctgtgatcttctagtaccaagaccgttgtagaatatagcttcagagctagaaagagcattaggtgcttacaattgctaatccctatgttgccatgtggagggacatcagctgtccttcactcctggcctctttctccacctgtccccattgagttatctgatccccgagtttggaaggaactgaacaccagtatctcaactttttctttccttctttcttgggatctacctgcctgcctgcagaaggtgctttctggtccactctctggcacacaggagccccagactgtccatggccacctgtgactgggtggatacatttgtctaattctggggtgaacaaggggcaagcccacgtggcaacagctttaagctgcatactccatttgatatacaataataaaactccatttctttatctttcaattggtttcaactagggagtgagaaaagggtatgggttttgttctgttttgtttttgtttttctttttcttttgattccttaaaatttcaacaaggagtgtagaagtcttccatgtcaaaatgctgcaggattaagttccaactgcttagatcagcatacgaagtctatctcaatctctctagtctagtgattcataaagttggaggcaggttatttcacctacaccacccccaccaaactactaggccatgtggggatgttttttgagaaaaggggtgggcaaaactacttcatctcctctactccatctctattttgatatcacagttcctcaatacacaagcccttggcttaacttctttcctttcttttttcttcttccttttttttttttttttttggcagagtcatgccctgtcagccaggctggagtgcagtggtgtgttcctggctcactgcaacctctgcctcctgggttccagggattctcctgcctcagcctcccgagtagctgggattacaggcatgtgccaccatgcctggttaatttttgtatttttggtagagccaggttttgccatgttagccaggctggtctcaaactcctgacctcaggtgacctgcccaacttcgcctcccagagtgctgagatttacaggcataagccaccgcaccctccctttcctatcttctttaaaacctgctcttccttcaaaacccagctaaagcgtttcctctgtgaagccttctccagctacctacgtggtcactctcttctctgttccacagtgtatagttctgcttccatttcagcacttatataatacctttcttctgtaatctatgcacacatctgtctctccagccatactgaaggcaggctatttatcttatagatcttttgcatctccagtgcttggcaaatgaaggtggccaagaaatatttgtgaatgaataaatctcctcactttatagttgaggaaaatcgagatccagaaccaactgaagtggcttgtcagagagtatacagtaagtggcagaaccaagatcagaagccagatttcttggttcccaatccaactctctttccactatgcagtgctataattattaataggaaggtaaatagcagtcatttattattaatattgctgatctcgttaatattctggattgatggctgaatacattgcaaatatgaattcagtgtgtgtttagacaaggattagctatcctaaaactacaaaaaaattctttacagttatttaacataacatttcttttgaagcccagttcaatacaaacaagtgagtttgactcatcagatgaagagcctattgaagatgaacagactccaattcatatatcatggtatgttagcatttctgatcaatgatgagctaaaatcacaatctacatcataaatgtaaatttagttacatcataatcttagtagaatgtagttcacatattgaaaatgttaagggattatccccctctgattatataattctaatcattaaaggatcttctaactccatgattcatttactatctataatacagaataagacccttttttttttttggcccttctttatacattctaactccatgattcatttactctttataagaccctttttttttttttggcccttctactaacttagtagaaggaagtaagtaggaaatagaggtaggattgaaataatctcccatttagtatcaaaatctacttattcttttatgacaaaagaataatataccaaatatgagatgagatatttaatcatttctcattaaatcaaatcctaggtaatacttagaagtaatgtcacagtaatgcatctatcaacagactctgtttaagataaaagccacatcaatgcaataacaaaaagtttctacataaaatcagccttttaatcttggcaagtgacttatggttataccagattctttacaatgagcaatcaaatgctttctctcatcactgcaaatataatagtctctcttcttaagaaagcactatccctactgtcagaagagaaagagtgtcctaaaggtcttttgtcctgccatcaaatagcattactttccatttccacttaaaactcccatttaaacacaaaaattcatctaattttcaaagtcaggtggtatttagatgatgcctcctgttttcctttaaatcatcttctgacatgcagacaaggtgagcctctgtccctgagtactgcaaactgggaatatgatttcttcacattatttctttttaaccaaaaacctgtggttttcatcatatgaaattatatctgttaaggaagttctatttaaaaatcttaaaatagtaatgtagaataaatgctggggagaaaattgtccaatagtcattttccaattcattttcctaaatcactaatacaaattatctcaggtaatataccacaggataacataagtacaccgtatactaccggttggcaatctaggcattattatctttaaggtaaatttaaattaacttggttttttgttttcttgttttttgtagagacaggatttcaccttgttgtccaggctggtcttgaactcctggactcaaacagcctgcctgccttggcctctctaagtgctgggatcataggcatgagccactgcacccagcctaacttgtcatttttaagacttaaataataacaaagcaaataagtccctgttttaaaactttgtctttctatgtttttttttgtgaccaacatattgatacttaactgtgaattcttactttgtgactactgtaaaactttaacacaactttatttggtggcaagcacccatattgattaaactgaatttccatttataactttttaaaaacttaactaaacatgaaaaatttttcttcttttcaggctatctttgtcacgagtgaattgttctcagtttctcggtttatgtgctcttccaggtgggtaacacaataatgggcttcctatcaatatgtatatattttttaatatatttttattgcagtagcttttggggggacaggtggtgtttggttacataaataagttctttagtggcaatttctgaaattttggtgcacccatcaccagagcagtatacaatgtacccaatgtgaagtcttttatccttcatcccccttccacctgttccccaccagcccccgaagtccaatgtatcattcttatgcctttgtgtcctcaaagtttacctcctgtttatgagtgagaacatatgatgtttggttttccattcctgagttacttcacttagaataatagtctccagtgaccgggtgcagtcactcacacccgtaatcccagcactttgggaggccgaggccggcagatcacgaagtcagaagatagagactatcctggacaacatggtgaaaccccgtctctactaaaaatacaaaaattagctgggcatggtggcacgtgcctatagtcccagctacttgggaggctgaggtaggagaattgctttgacaggaggcaggggttgcagtgagccgagatcgcaccactgcactccagcctggcaacagagcgagactctgtctcaaaaaaaaaaaaaaaagaataatagtctccagttccacccgggttgctgtgaatgccattttgttccttttcatggctgagtagtattccatggcatgtgtgtgcgtgtgtgtgtgtgtgtgtgtgtgtgtatgtatatctcacattttctttttttattatactttacaaccccactttttgatggggatgtttgtttttttcttgtaaatttgtttaagttccttgtagattctggatattagacctttgtcagatgcatagacggcaaaaattttctcccattctgtaggttgcctattcactctgatgatagtttcttttgctgtgcagaagctctttagtttaattaaatcccatttgtcaattttggcttttgttgcaatcgcctttggtgttttagtcatgaagtctttgcccatgcctatgtcctgaatggtattgcctaggttttcttctacagtttttagagttttaggtcttaggtttaagtctttaatccatcctaagttaatttgtgtgtaaggtgtaaggaaggggtccactttcagttttctacatatggctagccagttttcccaacaccatttattaaatagggaatcctttcctaattgcttgtttttgtcagttttgtcaaagatcagatggttatagatgtatggtgttatttctgaggcctctgttctgttccattggtctatatatctgttttggcatgtgtaccatgctgtttttgttactatagccttgtagtatagtttgaagtcaggtagcgtgatgcctccagcgttgttctttttacttaggattgtcttggctatatgggctctttttttgttccatatgaaatttaaagtagttttttctaattctgtgaagaaagtcaatggtagcttgatggggatagcattgaatctataaattactttgggcagtatggccattttcatgatattgattcttcctatccatgagcatggaatgtttttccatttgtttgtgtcctctcttatttccttgagcagtggtttgtagttctccttaaagaaatccttcacataccttgtaagttttactcctaggtattttattctctttgtagcaattgtgaatgggagttcactcatgatttggctctccgtttgtctgttattggtgtataggaatgcttgtgatttttgcacattgattttgtatcctgagactttgctgaagttgcttatcagctttgggctgagacaatgaggtttctaaatatacaatcatgtcatctgtaaaaagagacaatttgacttcctctcttcctatttgaatactctttatttctttctcttgcctgattcccctagccagaacttccaatactctgttaaataggagtggtgagagagggcattcttgtcttatgacggttttcaaagggaatgcttccagcttttgcccattcagtatgatattggctgtgggtttgtcataaatagctcttattattttcagatacgttccatcaatacctagtttattgagtgtttttagcatgaaggggtgttgaattttatcaaaggccttttccagatctgagataatcatgtggtttttgtcactgattctgtttatgtgatggattatatttaatgatttgcatatgttgaaccaaccttgcgtcccagggatgaagctgacttgatcgtggtggataagctttttaatgtgctgctggattcagtttgccagtattttactgaggattttcgcatcgatgttcatcaaggatattgacctgaaattttcctttttgttatgtctctgccaggttttggtatcaggatgatgctggcctcataaaatgagttagggaggattccctctttttctattgtttggaatagtttcagaaggaatggtaccagctcctctttgcacctctggtagaattcagctgtgaatccatctagtcctgggctttttttggttggtaggctattaattactgcctcagtttcagaacttgttattggtctattcacggattcgacttcttcctgggagggaagaagtccctttagtcttgggagggtgtatgtgtccaggaatttatccatttcttctagatttctagtttatttttgtagaggtgtttatagtattctctgatggtagtttgtatttctgtgggatcagtggtgatatcccctttatcattttttattgtgtctatttgattcttctctcttttcttctttattagtctggctagtggtctatctattttgttaatcatttcaaaaaaaccagctcctagattcattgattttttgaatggctttttatgtctctatctccttcagttctgctctgatcttagttagttcttttttttttcttgagacagagtctcactctgtcgcccaggctacagtgcaatggcacaatctcggctcactgcaagctctgcctcccgggttcatgccattctcctgcgtcagcctccctagtagctgggactacaggcacccaccaccacacccagctaatttttttgtatttttagtagagacgggggtttcaccgtgttagccaggatggtctcgatctcctgacctcatgatccatccacccgccttggcctcccaaggtgctgggattataggcctgagccaccgcacccggcttgatcttagttatttcttgtcttctgctagcttttgaatttgtttgctcttgcttctctagttctttcaattgtgatgttagggtgtcaattttagatctttcccgctttctcatgtgggcatttagtgctataaatttccctctaaacactgcagattctggtacattgtgtctctgttctcattggtttcaaataacttctttttttctgccttaatttacccagtagtcaggggcaggttgttcagtttccatgtagttgtgcagttttgagtgagttttttaatcctgaattctaatttgattgcactgtggtctgagggactgtttgttatgatttctgttcttttgcatttgctgagtagtattttgcttccaattatgtggtcaattttagaataagtgcgatgtggtgctgagaagaatgtatattctgatgatttggggtggagagttctgtagatgtcaattaggtctgcttggtccagagctgagttcaagttctggatatccttgttaattttctgtctcgctgatctgtctaatattgacagtggggtgttaaagtctcccactattattgtgtgggagtctaagtctctttgtaggtctctaagaacttgctttatgaacctgggtgcttttatgttgggtgcatatgtatttaggatagttagctcttcttttgcattgatccctttaccattatgtaatccccttctttttctttttttatctttgttggtttaaagtctgttttatcagaaactaggactgcaacccttgcttttttttgcattccatttgtttggtaaatatttctccatccctttattttgagcctatgtgtgtctctgcacgtgagatgggtttcctgaatacagcacaccaatgggtcttgactctatccaatttgccagtctgtgtcttttaattggggcatttagcccatttacatttaaggtcaatattgttatgtgtgaattttatcctgtcattatgatgctagctggttattttgcccattagttgatgcagtttcttcatagcgttgatggtctttgcatttttgtatgtttttgcagtggctcataccagttgttcctttccaggtttagtgcttccttcaggagctcttgtaaggcaggcctggtggggacaaaatccctcagcatgtgcttgtctgtaaaggattttatttctccttcacttaggaagcttagtttggctggatatgaaattctgggttgaaaattattttctttaagaatgttgaatattggcccccactctcttctggcttgtagggtttctgcagagagatatgctgttaatctgatgggcttccttttgtgggtaacccagcctttctctctggctgctctttacatttttttccttcatttcaatcttggtgaatctgatgattatgtgtgttggggttgctcttctcgtggagtatctttgtggtgttctctatatttcctgaatttgaatgttggcctgtctttctaggttggataagttctcctggataatatcctgaagtgtgttttccaacttggttccattctccccgtcactttcaggtacaccagtcaaacataggtttggttgattcacattgtcccatatttttggaggccttgttcattccttttaattcttttttctctaattttgtcttcacactttatttcattaagttggtctccaatctctgatatcctttcttctgcttgatcgattcagctattgatacttgtgtatgcatcacgaagttctcctgctgtgtttttcagctccatcaggtcatttatgttcttctctaaactggttattatagttagcagttcctctaaccttttatcaagtttcttagtttccttgcattgggttagaacatgctcctttaacttggaggagtttgttattacccaccttctgaagcctacttctgtcagttcatcaaactcattctctgtccagttttgttcccttgctggcgaggagttgtgatcctttggaggagaagaggtattctggtttttggaattttcagcctttttgctctggtttttcctcatcttcgcggatttatctacgtttggtctttgatgttggtgacttttgaatgggggtttctgcgtgggcgtcctttccgttgatgttgatgctattgctttctgtttgttagttttccttgtaacagtcaggcccctcttctgcaggtctgctggagtttgctcgaggtccactccagaccctgttttcctgggtatcaccagtggaggctgcagaacagcaaagattgctgcctgctccttcctctggaagtttcgtcccagaggggcacctgccggatgccagctggagttctcctgtacgaagtgtctgtcgacccctgctgggaggtgtctccccgttaggaggcgcggggttcagggacccacttgaggaggcagtctgtcccttagcaaagctcgagcactgtgctgggagatctgttgctctcttcggagccagcaggcagaaatgtttaagtctgctgaagctgtgcccacagccatcccttccgccaggtgctctctcctagggagaagggagtttatctataagcccctgactggaactgctgcctttctttcagagatgccctgcccagagtggaggaatctagagaggcagtctggctaccatggcttttccacactgtggtgggttccgcacccagttcaaacttccgactggctttgtttacactgtgaggggaaaactgcccactcaagcctcaataatggtggatgcccctccccccaccaagctggaacatcccaggttgacttcagactgctgtgctggcagtgagaatttcaagccagtggatcttagcttgttgggctccgttgggggtgggatccacagagcaagaccactcagctccctggcttcagccctctttccaggggagtgaatggttctgtcttgctggcattccaagtaccactcagttggaaatgcagaaatcacccgtcttctttctgcattggtcttgctgggagctgcagaccagagctgttcctattcagccatcttgcccgggaatcccacattttctttatctactcattaattgatgggcatttgggctggttttacatttttgcagttggaaattatgttgctataaacatgtgtgtgcaagtatctttttcatataatgacttcttttcctctgggtatatacctagttgtaggattgctggtcaaatggtagttctacttttagttctttaaggcatctccacactgttttccatagtggttgtactagtttacatttccaccagcagtgtaaaagtgttcccttttcaccacatccgtgccaacaatatatttagaacaagtatttggtcaactaacacatcattctctatactgggcaataagtaaatttcacagaccatcagcactggggaacacactttgcgaagccctcatggtggactatagttaaaggaacatagatctacctttcagcccttccagatctgcagtcacagccctacacttgtactttgccaatcttaataaagcttaaagcctggagtacaaatgaggctgaggactacaaccaggtacttgttacagaagaaacacagaatacagaatccttgcttaggatgaatccctgtaattatattcctagaaatataagaaattgaaattcatattcaaaatataattgaaacatataaatgattacgtgaaatgactttataaagtagctatataagtgtttaaacatacctgttacatatgacgaaaaactgacttttttacttgctttattattacttataggttgtaaatttaaagatgttagaagaaatgtccaaaaagatacaggtaggtataatatcacgcaaccacactcatgggttttttaaatgaatagcattgaaaaactctctgtcaaaaagaacaaatcagtttttttttaatataaaaataagttttcaatattgtgtgaagttccaaactatagacttattctgatatgtaaagaggtatttgtgaagaccatcatttacctaaccatggagttgcttttcactgattgttgtagttatattatacatataaactacatttgaggttagaatgtagaagttggcatgaaaaaaagtatgtaaataggaaactgacatattgctccccccaggtctttactgttccttgcagacttgactgtggtagtagaaattaaacatgagctgggaactccaagttagcagtgaaattgtgaatcctggatggaaaattttgagagccagcatctagatggaaaagacagaatgggaactggttgttgcctgctcaaggatgttcataccattatagccacaagtctaataatcctcataatctgccccaatttggaatttacatattgcatgatactaacaaatgtggattttcaaaagattttattctgattggcctggaatgtctcaaacctactagtcctaccgatatccttatagtatggcaaattaaaatgtatatattgcttgattctaactagtatagattttctgaatcttaaaaacttttcgtggttattctagaacatcagtttgctaatgtacttttaaaaatttattcctggtcaggtgcagtggttcacacctgtaatcccagcattttggtaggccgaggcgggttgatcgcttgagctcaggagttcgagaccagcctgggcaacaaggcaaaaccctgtctctgcaaaaaatacaaaaattaactgggcatgatggcgcgtgcttgtagtcccagcaacttgggaggctgagatgggaggatcacttgagcccaggaggtcaaagctgcagtgagctgagatggtgctgagatcacaaggtcttgctctgtcatccaggctggagtgcaatgagctgagattgcattactgcactccaacctggtggcagagcaagaccctgcctcaaaaaaaaaaaaaaagtattccttacctaccaaaaaaagacttaaagacagtaatagatagttgacccttatagtatttataaaacttttctgctttagacacacccaccatgctaggaaatttctatttggagaacatttaggtcataagcaaaatatatgtaatttaaatcattggttcaaagtcagtcttgtacattttggaatgtcatattcatttagcattttctataaaaacagtttccaatttttttcaaaatacttttttttctgcaatgaaatcttaaatggaatccagtacataaaacaggtcaatatgtttgattggagacctagaatctccctgcagcagttcctgagatactttcttagccctttctcagaaagttggaaaatcactggataataaaaattaccaaatgtgtacaaaaggcaaatagatgtatagtactgtacatctcagggattagttcatgagaaggtactttgtacttaaatagctacatgtccttggatttaagggacagggagagggctggagttgggagcacttagatcatccagttatttattttaaaccaaatgctcaatagttaatattgccataaagaagtcctagtgtatagaatgcctatagtattcatatcattataatgagaatagctaggtcacagaagtttaatacaggtaatgttttatttactggcgacctagtctataaaattaaatacacaaggatgtgttacagtgcagatatgagggagaatactagcacctctgacaccatggccatgctggagattttatatacaatactcagagtcaagcaaacagctaagtgatgaagtagcagacatggttgattttgtgagaaaaagaaaaaaagtgctatcatccttaattgaacatagatctatcataccttaattgatagcactttttttctttttctcacaaaatcaaccatatttgctactcaattttaagtgttttaagagttattttatgccaggcatggtggctcatgcctgtaatcccagcactttgggaggcggaggcgggcagatcaactgaggtcgggagttcaagaccagcctgacaaacatggtgaaaccccgtctctactaaaaatacaaaattagctgggcgtggtgacacatgcttgtaatcccagctacttgagaggctgaggcaggagaatcacttgaacctgggaggcagaggttgcagtgagctgagatcgtgccattgcactccggcctggtgacagagcaagactccatctcaaaaaaaaaaaaaaaaaaaaagagggggggttattttaaagcagtattcattgcaaaaaaaaattttttgcaagaacagcaattgacttattttgaaattcagtaaaaggcattttgacttgtaatatgaggtttaattctagaccccttttgattcagacatatcaataggcacttcagatttatagattgtcatttggtattagtttggcttaagaaatttaatttcatattctccctcttgatggtatttaaatgtgtgatgttttctatgtgtgtgtgtctgtgtatcctggtctattggcagaagaactaaagagctgtggtatacaagacatatttgttttctgcaccagaggggaactgtcaaaatatagagtcccaaaccttctggatctctaccagcaatgtggaattatcacccatcatcatccaatcgcagatggagggactcctgacatagccagctgctgtgaaataatggaagagcttacaacctgccttaaaaattaccgaaaaaccttaatacagtacgttcttttctccatacactatgtgagaaatgtctcagtcaaaatgatttctggaattatggtagccctattcagttatcacctacttcatagtttgttgtaaggattaaaaggtaataatgcactaggaaagcactggcacaatgtctggtacagggtaagtagtcaaatacgtgctgttattacttttcaagagtagggacaataaatgagtagatttggaaattgttagaacaaggttacaagcttttcttttttatttctttcctttagtcttagacctttagttgcaattttgggaccctcctttcccctcatcaccatcactgcctcacttattagcttttcaattgcttagttgctttcaatagcaagaaaatcaattttttggccaggtgcagtggctcgcgcctgtaatcccagcattttgggagactgtggtgggtggctcacttgagctcaggagttcaagaccagcctgggcaacatggcaaaaccccatctccgcaaaaagtatacaaaagaacatgccaggcatggtggtacgtgcctgtagtcccagctactcaggaggatgaggtgggggaactgcttgagcctgggagacagaggttgcagtgagccaaggtgacagtactgcactccagcctgggtgacagggagaccccatctagaaaaaaaaaaataaagaaagtcgattttttcaaaattagctaccaaaaaagttacctctaagcaataagcaatcctaaaaatatgacttgaaaattacatttgatgatatgactgctaacagattgaaagagggcctctcattgtgtgtcagtggctataaaaacacaagctgctggtgtgaaagtttaaaacaaaagaagatgggttaaggaaaggggacaaaatgaggaggaaagaaaagcagcttggaggaaggccagagagagtggcaatgggcagtagatagtagcatggcaaagattcaaaggggcgatgtggataaaaaacaagagatgctctgccggaagtgaaacacacaaagcaacagagagccagccatggggaggaaactggactttgccgtgcataatgtatatttcatattctaataacctgcttaatcctttctcgaataaggtagggtattaaatagtttacgacctcaaaagccccaagttccttaaggacattgctttgagctagaagtatagaaattatatcaaatagccatggggttctcagggcacctagtcataggacaagcccagccaacttctcctcttaaacctatagcccaggggcctcatgccaacagtgtcagttctgaaggcaaaccaactagtacgagggtctttggggacacacacctgtttgtggccaaactgaactctgacatacagagaaatatagtttgcagaatatgcagtagagaactagaagccattctacatcctattgtttcccatcttcctctatggaaaaagcatagtcacttaaccagtactaattataaaagctaaatttcaaatagatccagttgatgatgtgaaagtttctgatacatataggtaaaatagtattagatagttaaatgtagctggggaaaaatattttccaacatagggccctatttttcaaaccattttgagatcttttttttttttttcaaataaatttttgaaagcagcctctactgaaaagtttccagaaatcaaactagctctgtttagtgaagtgaagcttaacaaattctactgtagctggttctggcaacccaaatgctctgatgtttgtgcagagtacaaacaggatagacagtagatgggtgactttgcatatgctgaatgtttcagtctcccataaaataaagcatctgacaactggcatttttcattgtcctagagctttcgaaggtgtcctacggtgactagtttattttctatccattctgccatctttgaggacccacacttctagacagctatagagcttatccttcagcaacaggatctggtaaacctttttcactgacctgttgtctaccagtgctgtctcactggttctgcctggacatttgcagccctttataaaattagtgaacaacactgcttgcctactgtattttgtagtttcttggggctattgtaacaaagtaccacaaaccaggtagctgaaaacaacagaaatttcttctttcccatttctagaggatgtaagtccaaaattaagatgagagcagagccatgccctctgagactgaggagagtccttccatgcctcttcctagcttctggtggtggccatcaatccatggcaggccttggcttgcagctgaatccctccagtctgcctctgtcatcacacacttcctcggatgtctgtgtctttgcatggtgttgtccttgtgtaaggacactagtcatctaggatgagggcctgctctaattcgtcttaacttgaatatacctgcaaagactcaaattctgaataaggtcccactcacaggtacaggataaggacttcagcatgtcttttggggggacataattcaaccagtaacacctaccgtgtaccacacgccaagactaccaaacgaggcacagtccccaccttcgaggaacctataactaacactaccatttaactgcaataagacaggagaggcagcacacaggaaaatgatcctttctgtaggagcacaaaggcattttaggaaatgaaatttgaggttttaaaagataagtaggaattcatcaaatagaagaaaaaagatgaaaatagcaaaaggtataaaatagtattaatcttgcaaaaagacactgaagtgttctatcttgatctttttttttttttttaataaggcagttgtctcttctctgtcacccaggctggagtgcagtggcactgtcatagctcactgtagccttgaactgccgggctcaagcgatcctcccacctcaggctcccgagtagctaggacttcaggtgtgcgccaccgtgccaggcttttttttttttttttttttggagagacagggtctcactttattgccaaagctggtcttaaactactggactcaagcagtcctcccaccttggcctcccaaagtgctgggattataggcctgagccatcatgcccagcctctccctttatatggtagatccagatctctgaaacagttctatgtctggaacactttgtggaaagcaagttcacgagtaagactaggggtcaatacctattcagtcctctatttcacatcctaaagcaaaatatatatctacagctttacctacaatacaatacaatacaatacagtaattgatgtccataacgataagtcatccacactaaattaggctcagtataccctctaagtacattaggaagcatgtaatacattttttaggatctttgaaaatgacttaaatgaatagttttgctactgaggattaatctccatttttctggaaaatccagttatacaaaactgctaatttctttacagtgctagataacagcagctaatgttcatttacttcttactctgcacaaagctgtgttctaagtccttggcaaatgctcactcatttgtgagcctcatttaatcctcactctgatgtacatactattgctatcaccattttaaaggtgaaaaggctgagtcccagagagattaaataacttgcttagctttacacatctaataagtggcagagccaggactgaagcccaggcagtggtgctccagagcccatgctccagacttcggtgataccctatctctggactcctttagatacatgaatggttattatctacatggcatttgtgcagtaaccactcagattttgtttagacagaggaataatcaaagtgacagttggtaaaagtctgatttctatctattggtaacatgctccatttctcagatgtggatcttggaacctaaagaggtcaataagaagactctgcctatcttgatgcttagaggtgttcagaattcctcccaacaaagaaataagcacaccttgctctcagttgattaaatcaaaaatatttattaatcttcgtgtgcaaggcactgtgctaggcattagagttgtaaatagaaggcagaaagagcaagtctttagttgtaactagggatggaatgaaatgtacaaacttcaaaactgtatttccctttcagctgctatggaggacttgggagatcttgtcttggtaagaaatatatttctattatttttttaaccgccaaatagacaaacttctgtttccagaccatatgttcattttgtattaaaatggaaccaagcaaaatataagtttgctaagactcaaaggattacttaaggccctaaacatggtgttccctggaaagcttgggtgggagtgggaggtattttcagcattgttctggaggattctggcaaaacatcatttacaagtcttaacacctgcattcttattttttaacattttttgatgttcttcctgtggaggtgttataatagagtaacttccaaatagtttccatgggtaactatttatgaataccaaagttaattactatatgttaatttaaaaaatgttttaatgtactaagaaaaacaaaaaagagttcgtgaaatgccacactggagtagtagttatttttttagtgttggatgatatcaaaattgaaagcttttgtgtttcaaagaatactatcaaaatgacaagactacccatagaatgggaaaaaatatttgcaatctatatatttgataagggatttgtatccagaatataaaaagaactcttacaactcagtaataaagataggccgggcgtcgtggctcatgcctgtaatctcagcactttgggaggccaaggcagaaagatcacctgagtttaggagtttgagaacagcatgagcaacatggtgaaaccccatctctacaagaaatacaaaaattagccaggcatagtggtgcatgcctgtagtcccagctccttgtgggactgaggctggaggactgcctgggcccaggaggtcaaggcaccagtgaaccgagtttacaccactgcactccagcctagatgacaaagtgagatcgtctctctcaaaagaaaaaataataataataaacaaacaacataactgaaaaatgggcaaagtatccgaataaacctttctacatgcaagatacacatatagtcagtaagcacatgagaagatgctcaacatcatcagtcatcaggaaatgcaaatcagaaccacagtggataccacttgacaccaattaggaagggtattataaaaacatgaaaaataacaagtattggcaaggatgtagagaaattcgaaccctcatacactgttggtgggaatgtaaaatggtgcagcggctttggaaaatagtctagcagtagttcttcaaacaagtaaacattaacatatgacccagcaatttcactccaaagtatatacccaaagacttgtatacaaatgtttatagcagcattaatcataatagccaaaaaatggaaacagcctaaatgtccatcagttgacgaacagataaacacaatgtggcatatctatacaatggaatattatttgatcataaaaaggaattaaatacagacatatgctacaatatgtatgaaccctgaacacattatgctaagagaagtcagacacacacaaaaaaatattgtatgtttccgtttatgtgattgctcagaataggcagatctacagagacaaagtacactagtggttgcctatggcaggggttgatggggaatagaggatgacagcaaaagggtacacttctttctgaggtgatgaagtgctttaaaattgactgtggtgatggttgcacatatctgtaaatatactaaatcactgaatggatgaacactttaaatggatgaaagaatgaagccagtgttaaactctaattcaaccatacggtcatttaagatcataatttaactgtcaaaaacacacactaaaagtctcagtcttttaattcatttggaacaattacaccagtcttctgtatcaacagaagtcttattaaatataaaatgctgtaccctgtcactagttatttaataacatattatttttctgtcatgttccattagtagctgcttgtctcctactatacctgtctgacacaatatcaccagagcaagccatagacagcctgcgagacctaagaggatccggggcaatacagaccatcaaggtgaggaggtgggcggtgcttgcttggttgtggttggggtcgttgttacaaatacagattcatgtgtaaccaaaaggttacatatgaaaatccaaaagggcagtgaaatgaaaatccaaagcactctgttattcaaataccacttgcttatgcttttagtttttaaaaatttacaagtaaatataatccaggtagtctaaaaaagcacacaggatttcaaacaagataatgaaaatttgaacttcctggtttacttttccaggatctacctacttctcagtttttgccccagtccgttttgggaatggatcctctcacctaggacaatgagatggttattgttaatacaaacttggtacgttcttgggtagattcttggccaaaaaaaatctatggaagatcttgttatatcaccaaaacatttaataaagacagatgaatgactataatacaaaaaatggaaagcagtgctaattatcctttgcagtagataactggggacatcttccacatgtacattcccctaacacttcaaaacactgcactagcaatgccaaggatattgcattaatcatgttactgaaaagattctgcagatgtcacttcattttgtagatctgtaaagctaatgtgccttcttttcagaagcgtgccctctcagcattagaatccgctcatcagaggagtgggcaccaaagaatcctggctgttaggcagctccctagacttgagagcccatcttcccagggttggaggtctaatccagtgtcattaacagtgaattatcataattactgataaattcaccaagcaacctgattcttagggcttaaataaggtcattaacgggacaatccatacaagatccactccactgtacaggtctgaaacagacaactctctttatgttaaaaatcaaacgatgcggccaggcgcggtggctcatgcctatatcctagcactttgggaggctgagctgggtggatcacttaaggccaggagttggagaccagcctggccaacataacgaaaccttgtccctactaaaaatacaaaaattagccagggtggttatgtgtgcctgtagtcccagctacttgggagcctgaggcacaaaaatcacttgaacctgggaggcagaggttgcagtgaaccgagatcacaccactgcactccagcctgggcgacaaagtgagaccctgtctcaaaaaaaaaaaaaaatcaaatgatgcttcaaatccaaaaagttcacctctcttctcttgaaaacaaactacatggccatggccagatgtatatatgaatatccatatgttttacatctttaacattgcagataattaagtccatattactacagactcagtttatcacctcagcattctgtggcaaacaggcttgctggtgttagcaatgcagtttccacatctcaataaggatatgaaatgagatgattggcagagtaagaatatcttttgggaggctattaaaactccaaataaattatttaaagcttttattttgcttatctgctgagattagcaatacagtttgtttttaaaaaatattgtctatgaaaattatccctagtgcattatgtcatcacaaaaaagcagaagactagggcttctataaattgagaaatggattttgttaaatataccagttacttgctacagaaagtgctctgtccttcttaccaggggggaaaaatgttagcaaaaataatgccattatgtactgttttaatcttatttggtcctgtaagtaaagagagaaagaattttagacttaaaacatatccatctacatttcatttcaccttctgatttttagagacttgtagaacaatagtttttcacactatatggctttactaaaagataaaacttccccatgatgcaaatgcttccttacccaaaaagatgtagaattgtgcttagcaagtatttttttttattcctgatacctgctaatattgtgcccacactgataactagttttctacagtgtattccaatgtatctttacttttttcagcaatacaattatcttcatgagtttcgggacaaattagctgcacatctatcatcaagagattcacaatcaagatctgtatcaagataaaggaattcaaatagcatatatatgaccatgtctgaaatgtcagttctctagcataatttgtattgaaatgaaaccaccagtgttatcaacttgaatgtaaatgtacatgtgcagatattcctaaagttttattgacaa

SEQ ID NO: 144 - DNA, 14501 bp, Homo sapiens
  source 1..14501: mol_type = other DNA
ggtcgcggctgtggccgggggaagtgaatggttttacccagagggccctgcgccgcctttctccgctggcaacggcgccgctccccgctcctcctccccagccatggcgttcacgttcgcggccttctgctacatgctggcgctgctgctcactgccgcgctcatcttcttcgccatttggcacgtgagtagctggggctggggaaaggagggcgaggcggcaacacagcctcttttcgccccgggcccgcggtccgggccgccacggccgccggggctttgcgcgtcggggatgcggcccggctggcacgggccgcgcggcgaggggtctgggggccgcgggtactggaggagccggggcgcgcagtcgccaggtggacgcgcccgcgttgcctcggcacaggccgcgcgcaccgctactcctcccctactggatggggcggccgcggtccaggcgggcgcccgcggttccgcgctgcgttcgcaccgacctctgccggcccgcggccctgcattcccggggaggatgtcgacagcgcggtgggacggccgtagtgtgaatgaagttttccgaatttttgttaatacagattgactttcttttagggtttccacagaactgtggccaaaatgtaacctacttagggtgaatttccaactctacttttcagcacttgttcggtgctcttcaaatcaaatcactttttttctctttttccagattgttgtttcctggtgaactttgatgcaagttcaattgattactttgttgattgcatgtgcgcgtttcccccccaaatcatactttgaccgctggagtttcaacaggcagctttccaagccacccttatattcaggattgcttgatttagtagagggagttttcatttgattttgagatgctcagaaaccttaagcttttctggggcagtatttatttctgttacacacatcatcatcactattgcagggtggaagcacagccttactggtccctctaaggaaaaagtcgtaagttccctgtgacatagttctacagagataagaatttctgttgctttagcacaaaattaaaagccttgagagccttctggaaatcattcattaaaaatttatctcatacttgcttctcttttccccatattccagtgccttctggaatgttgcttttaatttgaatgaccgcgttcactcttacgtagattttaagtcaggtttcatcatgccagtaacaaggatttctatgaaacatacggaggggcagaatgattaaacagcagcagcgtcttgtgcaaaaaagtctcgaaagtggaagcatatcacaaatccattcctttttgctaagcagtgtgattatgtttacaattattttaggacctgactgcttattgtaatcaggaatacttatgtaggctattaactgtgtcggaaataactgctacctcagaatgcttgtcagtaggagcagtaatttgaagagcatcttcagccctgctttgatggaagaacaatacctaagataatttgggatacagactagctcaaccttagtaggcctctgatgaaaatgtgtggttccatggccgggcgcggtggctcactcctgtaatcccagcactttgggaggccgaggcgggaggatcacgaggtcaggagttcgagaccagcctggccaacatggtgaaaccccgtctctactaaaaatacaaaaaaattagccgggcatggtggtgggcgcctgtaatcccagctactcgggaggctgaggcggaggagaatcacttgaacccaggaggcagaggttgcagtgagccgcgatggcgccactgcactccatcctgggcggagactccgtctcaaaaaaaaaacaaaaaaaaagaaagaaagaaagtgtgtggttccattccatctgtagatgtagctttaagtcattctgcttgatgggtattccttttttctgggatgatggggattcttagagtggtggggtaggctttttcacatttttacgttttgaaccaggttgtgtttggcttaaggaaaacctgaaccgcactttcaaaaaatgggtaatttcagcttaaacaaatgcgtgtctgggtgaagtaaataattttaagtcgtgttatacaatgaaaaaaaaattataccgcagattcgtggagagcttttatgcttagggatttcttcattcagagaattagtatccttttggaaacaattctaaataaatagatagttttaatttttctattacccatataaccttatgtttatcatcttaggtagtatcttagtccattcctttatagtgtttatagtgttgctatacaggaatacgggaggctgagtaatttacaaagaaaaaagaggtttatttacctcaggattctgctgactataagactgggcatctggtgaaagtctcagcctgcttccactcatggtgggggagtagtgtgtggagatcccatagtgagagaaagcaaaggaaaaagagggggaggtgccaggcgctgtttacaagccagttctcttgggtcctaatggcaggagaactcacttattccctccaagatgacaccaaaccattcatgagggatctgctcccatgacccaaacacctcccgttagatcccgcctccaacattggggatcagatttcaacctgagatttggaggagttaaaccaaactctagcaggtagttgaagtatctttcagaagactcattttacaatttttaaattacattccaaaaatcttatttacattaatcactgtattagagaatgttttttatgctgatgattatatctgtcaatttagtcctaattcatgtcattgatgctctgtggagaatagagtcgggagcatagattgtttgaaaaattaaaagcttaaaagtcattccttaaagatgtgtattaaattggaaggtattctgaattgtgtacttgggcatctttagggatttatctgttttatttttgttatacttctgtaggaaattttgtgggtgtctttgctcagccacatagctgcaaaaagatttgaaaatcattaagaatattctcagaagaggttcgaaaaccctagcctatagcactcaaagagaaacccattcaacaacatagttaaaaaatccctgtgaccaggcacagtggctcattcctgtaatcccagcactttgggaggccaaggcaggtggatcacctgagctcaggagtttgagaccagcctgggcaacatggtaaaatcccatctctacaaaaactacaaaaattagccaggcatggtggcatgcacctgtagtcccagctactccggaggctgaggcaggagaatcatttgagccgaggaggtggaggttgcagtgagccgagattgtgccactgcactccagcctgggtgacagagtaagaccctgtctcaagaaaaaaaaaaaaaaaacccttgaagtcacctggagaaaatgtccaattaaatgtcagttttaaagacaagttttgtattctgttaagttggatcttgttatagacaagtacttatgattatcatccttgtcttgagctttattactaaaatgcattggggttatataccacggctgacgtcaagtagcagactaataacgtccataagtaatcagaaattagtattttctaattacacatgtatgtttttaacatttgtgttaggtgtcattagccaagggaaatccccctggtgagttctgcattttttttttttaatccctagtgctatttttttcaccccctccttccagttaatatttattgaacacttaactatgtgccaggcactattttatattttaggccctgggacataatagtaaatacaacaatctttgttctttcagagattacattctaatgttttattattttccttctattgttgtttggttggagtttttattagggcaggtgggtgaattttatggaactctagaaattaaaaaaaccgtctttttatgaatctaaattttaacagggaaataaacagtcatgttaaaagatggaaatatgtaactttactgattactgataatattgagcaacactttcacatataaagatactattcctaactcattaagggaagggtagcttagtttgtgtgtccctggggtgagtagtgttagcaactaaaatggctcccccatcaacttgctgcctttgttttctttctttgtcacctgaaatgatgccacaaagtggtgcagagtccctattttgactcttaatgtacattctagtgacccttgaggttgaagccacattcctccagagtgtggacaaaagcatccttacaaatgtatgtgtttgggcaccaatgggaacacattgaagagttcgaatccatctctagtgtcccactgagcactgtgccaagggaggaggagcatgcacagataaataaaaatggtccttctccctgagagtgtagaggggcagacagacctgtgtgtaaataccacactccagggtgagaaaagccatatcgatggcattatagagtcccatgctgtgtggagatgtgggcaattacttctgcccaaaggagttaggaaagcctgcagaaagaagttgacctaggaaggtttgttttttttttaggataaagaggaatttggataaacagttgaaattatttttctactcagaagattatttcgagtagagataagttgaaataacttgagcagaggcattgacgaaattgaaaattgaaggtatttattacagtaataccaaattttagtgatactgagataagagtgttttcactttaaatcgcattctggttctttttgtcatatatgagtttactgtaaattggtatttgggatcttggtgtacttttgttcttgttttattaactttaataattatttgaagatggggcaggtttgttgctgcttttaattaaagtgagtggtcctaactgttttaattttattttagattatagcatttgatgagctgaagactgattacaagaatcctatagaccagtgtaataccctgaatcccgtaagttataatataggatttatctttagattttaaaaatatgtttgtttttaacttgaagtaatttgaaaatggccagtattctgagtagcataatatatttgtactttttgaagtaggcagaatttaaaaaatcttctttttcctgtcgtgcttgactattctattattaatctgctggtgatcttgtcagctgtcatactaacattcttccaatctgctttttacattgtcggccaaagacagttgaaaaggtcaaaaagattaaaagagtcaaaattgcattaaaggtgtgtactgctttttagttaaatgttttaatgctatattcatttcatggggagggttagggcatttgtatttgtaacgttttgttcagtgtgctcgttcatatgcctgttgaggtttatgatttcatgaaatttcatattttatgcaaatatatgcttgctggcccagtcaagtagggaaagctgttaaatgcgtatgcgtttttttatgttatagccataggcacttctatgtgaaattatttggtgtagtacttgaaagttggttaacataaaatgactaatagatggtgagatgattctcgggttgtgacttattgtgaggtagtatgtgagtgaaatctttagtatggacttatctgccatatctagttttatctttggtttgcatattctggaataaatgagtcattctttcagctgatgtttattcagagcctgttaggtggatagctctgttctgggggctctgggatctcgcagcaatgccattctttggacttagggtgccataattttgtagataacaatttgtatacaaatgtctatgtggttatttctagtgtgtatctactttctgtttctaaaacaggcctgaattacactgagttctgagccatcatgaatttagtgataatgtagctccattgtgcttagggtttttgaaaaaatatatatgtatgtatttttaaattttcttttgagatgggggtgtctctatattgcccaggctcttatcaaactcctgggtcaagtgatcgtcctgcctcaatctcctgggtagctgggattacaggcacacaccagggtacccagtttgtttttttgtatttttgcctgcatttaggaagatactcttttagcctgtgtatttgattttgcctgactggtcagtaattgaaaggttggttgtttataagaaagcagtgggtatgtcttcaagaaataaaatacagtaattcagctttaaaaattacttaacgaaggggagagtttgtgtagattttaattgtctagcatactagtgtactagcactaggtgctagagggattttatttggaaaagcatctagaaagttagtttggtactttattattgtttcccagataaatgtggatggtggaagagatttctagtttgtctttagagaactgttacagtaagagttgatgtaggtacaattaaaagtattaacttattagctgtttctttgctcttatgaaacaagacataagaagatgaatttgccttctcttggaaagcattaagtgttaattttaaaacatcttaacctaagtagttgaagttgttaccaggaaatgaagaaactgaaatttccccttttgatagctgtttattaatagtattctgtgctgtttgtcttttcattacttcaataaccaaatgatgatgaaggtaaaaatatttgaaatcagatgaggattttcctgggtgctaggctctgtggtaagcactttgcctgaatttttaaatttaattctcatgacaatcctgaggtaggtaaattgttatctcatgaataggagagtaaactgaagctttgccaggttaaagcactttgccgaatgttatacagctaagatagagtcagaacttgaactcaagacagcctaatttttgaagctcaagttcttgtattttcctaatgtattgtaaatttaggagggacaggtttcattttaacaggtaatgtgcgattcctggcttttcttaacggaaagaaattctcactgagaagagacatgtgcttgggacatcctaatgctgcaggaggttgaaggacgtttttatagcagcacaggttgccttttggatagggtgccaataattggctgaatagcagtgcatctgacagttttccctatttaaatttgttttgacagttctgccaaagtatgggggaagacaaatatcactattttttaaattgtgaactttaacaagagaatattatattttgcatgtttaaatgttatcatttcagccatatttgcttgaggttttttttctggatactagtttctgtttgaaccttggttcctaaattgaataatttttgtgtctcttatggggaaattttgtcattaaagaatgctcggagagggttggtttttaagagagatgggtagtaaatgtttctggactccttttgaggagaagggagggaatggcattgtttcatattagaactggtagagttgtagattatctttattaacacttttattaaagtaatattaagagcgggaggggttcatgctttcaaaatcattctttccatacttcattctgtaagtgtaggataaaaccttgcatgaggatttgtttgttaggtatcagatggctttttagggctgaaataggcttatattttaaagacaacgtctgtaatttaaacaagtattataaaagcaactctagtggaattcttaataaaatgtatatttttcttggtttgttctggttatagtccttgagtttcagagtcctatggcccttttcttgtttagagaactttgatcttaaatagatgctggcttaaatgttatttagaagtttaggtacatatgccgagtttatcctttgttattgtattgcttaagtttgtagaaaatatttggttagtggtgtagatgagttgtttacctggattttttttaaaaatagtattcattagaaagtcccctctacagctttaaattggaaagagtaatttgggagtatgagaaaatgggtctgagtatgtagtgtgattacaatatctacagccatggtttcccctcaggagtgatctgatgatgataagtattcatatgatttccatttggtatgaagtaaacatttgagaaactggctttgtagctgtgacttacaggagatacttcggctgaaacttgcaatgagaggttttggtatttttatttaacaaagtcctcaggctgaaatctttaggatgagaaagataatttaacataaagcattaactcctggtcattttataaaaagcattttgctcgaattaatttttcttcacttaatattacctagtaccaaaaggtttattttgtttttgggttctgagcttctactggtcttctgttgtgtctgtagcattttgttggcaagcaggggtaaagaaacggaaaggccacctaagaatgagaacttgggaacctggaaaatcttaatttcatggttaagaactcagtcttttccctcctacattgcagaaagcgaatcttttacatttgcgcatattagtgttcttcccctcactgtgctgagattattggctgattggctttccattaaaaaattacttctgtgggaatgcaatgtggtttgctaaatattgtgtatgtagcatttctggtttttgttaaaggcttaaaaacactgatatgtaaaattccaaaggggagttttgtttctgtggaatttttaatatgttgcatgtgatcagatatctcatttttgtacttctatcattgttgaatggtgaaaagaaaaagtattctagttgactagcatattgtttaacaatctgggtggtaactttatataatttgatctgtttctctaaggatttgagctttgaattttaagtcatgtatcttactatgttagtgcaagctatatgctctggtcagtttgcctgtaatcctacttttggtaaaaagttaaacatggaaataaaactcagtagcatcttttatttctgagtctaagaaaacagtgatttttcattatggaaacttggttgccacctgctttccagattagtagttgacttaatgctgaggcattttgataactggcttgtgttttccttccagcttgtactcccagagtacctcatccacgctttcttctgtgtcatgtttctttgtgcagcagagtggcttacactgggtctcaatatgcccctcttggcatatcatatttggaggtaatatttagatacacttttaatatttttttaaattaaaacttaaatatactgtggttgatatggttatcttacatgctagtcacctacataaaaatggaagatcagttggcatttatttttttaaaaatcaagtgggtgaacaaaaactatttcaatacctcatatagagcttactttatttttaaaggaatttttttaaaaagtgaagtataacttagtgttgtgcacaagtctgaagtatatagctcaatgaatttttacatacgtatacacctgttaaactaccacccagatcaagatacacaacagttgtagcctccagagcattcacttatgccccatcttaagtcagttaccctccacacctcccaagaccactgacctctatcaacttagattagctttgcttgtccttgaacttcaggtaagtcaaaatgtacagtatgtgtctaatttctttctgtgtttatgactaattttggttatttgtaaaagataatattttataacttccatagtaatatctgccgtatatagagttagaagtttttgttttaaataggcatgtcaaaaccttattgcccttgattttaggagacatatactgaagaagtatttagaagtaaagtgttatcaggtctacaatggactttgaaatgattcagaaaaaaatgtacttggccgggcgcagtggctcacgcctgtaatcccagcactttgggaggccgaagtgggtggatcacaaggtcaggagttcaagaccagcctggccaagatggtgaaaccctgtctcaactaaaaatacaaaaattaaccagtagtggtggcgggcgcctataaactcagctacttgggaagctgaggcagagaattgcttcaggctgggaggcagagtttgcagttagccaagatcgtgtcactgcactccagcctgggcaacagagcaagactctgtctcaaaaaaaaaaaaatttactcagggccaggtacagtggctcatgtctgtaatcccagcactttgagaggctgaggcaggtggatcacttgagcccaggagttggagaacagactgggcaacgtggcaaaacccccctctacaaaaaaaattagctaagcatggtggcgtgtgcctgtagtccccgctacttgggaggctgaggcagaaggattgcttgagcccaggaatctgagattgtggtgagccaagattgcaccactatattgcagcctgggttacagggtaagaccctgtctcaaaacaacaacaacaaaaaaacaaaacaaaaaaccaaaaaaaaccagtactcagaatgagaaagagaaggagaaagcaaatatagtaaaaatggacatttggaatatctgggtgaaaggttcttgtatcttttctgtaagtctaaaattatgccaagataagtaaaaacaaaacacctattttctttttacagttcttcctatttttcatggatttctgaaaaggcagagactagaagaaacttgtttagctatctcattctgctcatttaggggctctacttttaaaattaagatggtaaaaggaaagcattttacccataagtaaaagaatgcttccctttatggaccacctctcgtaacagatgttttagaagaaagacctgctttcttatctgaacatttactgccctttctgaatgcctaatagactgtgtttattccaggtatatgagtagaccagtgatgagtggcccaggactctatgaccctacaaccatcatgaatgcagatattctagcatattgtcagaaggaaggatggtgcaaattagctttttatcttctagcatttttttactacctatatgggtaagttgaaaaggtaaaatgaaatatgctttcactttgctgctttaaaagtttgcaggcattatggttttcacacctcaaaatccatttgaagaataacttagtgtcttaagtgtgcatggtgcacaccagcaaattcgcacacattcagtgtggcccacactggtgcttgtcaaggcagtaaaccagcctgccatcagaggcagaaggtttggtcagggatgctgcttcataagttttcagacacattcagtcagtaaaggatggtcctcattctccatggcaaagtgatgtcattgaaggatagggatgtgtgagtttgcagaaatttctgcttgtcttcagggtctctccagacattatgtttcattttttccttatcattcttcataagtggtgtgctctgccctttattttctgatttgcttgatttgagtggtatgaatgaaagaagtagttctaccttacagggtggtgcagtttccgatttttgttctttttttttgagtcggagtctctgttgcccaggctagagtgcagtggcgcgatctctgctcactgcaacctccgccccaccaagttcaagcaattctcctgcctcagcctcctgagtagctgggattacaggcgtgcaccaccacgcccggctaatttttgtatttttagtagagacagagtttcaccatgttggccaggttggtcttgaactcccgacctcaggtgatccgcccaccttggcctcccaaagtactgggattacaggcgtgagccatcgcgcccagcctgatttttttccttttatactctcatggactcattgttcctctaggtcagggtgtctcagcttcggcactgttgacgcttctgggctgtgtgggaatttctgtgggaagctgtcctgtatatcatgggacgttcagcagcatccctggcctttacccactagttgccatgagcaccctcctgccccctcatgacaaccaaaaatgtctctggacattgccagatgtcctgaggggcaaaattgccctgggtgagaaccactgctgtaggtgtgttgtaggtgcagtgaaatgactgcttattaaaactagaaaaggacactgttaaatgtagaattatatatttctttaagctatgtgaatatacttttacacatcacttatataaaatactttctcattttttattaatacatactcaactagagaggactttctccttgattttcagaatatttccaaaaaagctgtaagctttaaaaaacagcataagcttcccttctctttttcattacttgaaaacttgctaagataggcttatattcatattcatatttctcttcatacataagtttccatcatagaaaagatgaatggttagactgaaatttaggaaaaaggtatttttggtatttttatgcctttagaggctattactgtgaaaatgagtatcctttagtgcatatgcagatattactcatctatgaaacaaagaagtgctctgaaaagtgaaattctatgtgtcactttaatttcctgttaattttcatttcataagtttccatagcaaatgtctggaacgggctggtgtatgataggcacttcatacgtatttgttgaatgaaagaaatgaaatgaatgattgaataaatgataaagttggagatgtgcagttgtgggaaaatgttcagcaggatatggtagcaccaggacatttgttgtgttttaaggttgtctatcaagcttgttcaactcctttgtatttctgtttagagttatgtgctttttgaatcatgcccctatgccgttcccatagcactctgtagaattgcccttggcagttcttaaacctaaatcaaaaggtcattgccttttattttgctgttttccccccttttcttttttaaccacttcctaaaagttgctattgcttagatcctttctgtaatgggaaagatccttgattgatcattcctttctatacaatggggatacacatggtacctgccttctaggactccttgaaggattaagcaaggtaatgtatataagagacctaacagggcctggcgtgaagtgagccctccagagatactcattctattattagacacaactccagagtgtgtgatgtttggatggcttctctaagctctgatccgccattaagctttcagctgtgccgttctacttgctaaaattggaagggaataggggacaactacagcatatgcactgagccaagtcatatgttaggcaaaagtccataaatgcaaattaaaatcactgtgaacttgtcattagtcttgtcattttctgtgatactagtttgctatataaagcatactctctcatgctctgagtttttttttaataattagtaatgttcaaattaacatcttttttcttcttttcagcatgatctatgttttggtgagctcttagaacaacacacagaagaattggtccagttaagtgcatgcaaaaagccaccaaatgaagggattctatccagcaagatcctgtccaagagtagcctgtggaatctgatcagttactttaaaaaatgactccttattttttaaatgtttccacatttttgcttgtggaaagactgttttcatatgttatactcagataaagattttaaatggtattacgtataaattaatataaaatgattacctctggtgttgacaggtttgaacttgcacttcttaaggaacagccataatcctctgaatgatgcattaattactgactgtcctagtacattggaagcttttgtttataggaacttgtagggctcattttggtttcattgaaacagtatctaattataaattagctgtagatatcaggtgcttctgatgaagtgaaaatgtatatctgactagtgggaaacttcatgggtttcctcatctgtcatgtcgatgattatatatggatacatttacaaaaataaaaagcgggaattttcccttcgcttgaatattatccctgtatattgcatgaatgagagatttcccatatttccatcagagtaataaatatacttgctttaattcttaagcataagtaaacatgatataaaaatatatgctgaattacttgtgaagaatgcatttaaagctattttaaatgtgtttttatttgtaagacattacttattaagaaattggttattatgcttactgttctaatctggtggtaaaggtattcttaagaatttgcaggtactacagattttcaaaactgaatgagagaaaattgtataaccatcctgctgttcctttagtgcaatacaataaaactctgaaattaagact

SEQ ID NO: 145 - DNA, 28747 bp, Homo sapiens
  source 1..28747: mol_type = other DNA
tggcttttaccctggccgggcgggcggggctcagccgggctgggctgggctccgcggctggagccgggctctacccagagcaagaccctgatggctgcggtgtttctggtaacgctttatgaatactcgccgcttttctacatcgcggtggtctttacctgcttcatcgtgaccaccggcctggtattgggatggtaagtgtcccaggggtgagagacgaaggggcggataccgccagagtggggtcgcgacgagcagcagggggcaccggagccggagggccgcgggccggaggacgtcggggattcggtgtccccgggtgcctagaactccgactttctctgggaggaaaacaaggtggacgctgcacctgcgtcactgccctgcatcaccgtttggtccgtgtcgctggggcatcttggggtggtaccgcattggggtgttttactcagctttgtttctaggcgataaagcagccaggaagggcttgggcttgggcttggtgttgggagaaagtgcttctctagtaggcttctgtcccggattcgggcctactgtgtgtcctggatgagttagtcacctgtgctacagtgcacagactggacagtaagcgaggttaacagttgtgattctgacctgaatggagcccttagcctcagatctttcagagtaacttgtaactgaactgttaccgtttgagaatttaatggtttctgtatacattccacaccttttgaagtaatatttagtcgatagaattgtaaaatcataattttagagctggaagagaccttagaaatatgtaacaccgagggtaggacagttgcctattggagacaaggagaatggtctgttagataaccgctgagcaattcttctagcctagaggttcaatttctctcttgaggagatgctattgtatcatgtttagacaagccttgtaaataacgagttgaaaccgtgtaactagcccacaacagtttttctaggctgcagcctccaaaatccctttgagatgataatagttacaaaaagatcaaacagcagttctaagtggataacagccatggtctgaagaggtcagaggggactctgttgaagagggacatgagctggattttggagaatgagcattttgaaaaataaatggagttaaatgtatatagtagggaagaaaaagcatctcagagaagacagcatgagcataggggcagagaacatgttagtgaataaagaaggctacgtaaaacgagttttaaaatagcctttggtcacatatatgtgattgccttaaagaacacgggcccttgtcggtttctgaaaatatatgccatctttaggaagtgacaaaagttttaacctgtccacactgctcctcaccctaccagcaatagagcatagaattccttgccttgtatgtgggtgaggattggaaatacaaattccttatttgtgggggtaagattggaaaacaaagaccaatcttacacaattggttattcttgacccatcagattttattgctaatgttcattacacaaaagtttgtaattggaatgaggaaggtgttgcccatgtgagaaaagcagtcttaacacaagatttttaaatgactataatgttagtgttattctcttaatgaagcataattttcctccactaaggaaaatagtaactagttgataattgccttatgtgctttaatttttattttaaataggccaactaattagatatcttagatatcaatctttagtattgggaagagggtagtcaggagcctcatgtttgtagtggttaacagacagactttggagtcagtcagacataggttcaaatcctggctctgccagctttaagacttggtttgaaaatttaataattgccaaatcaccccatttaggtaagactttttacaagagtggaagcccatgtaattatagaacgtttggaagtctgggctaagcactgctgaggccacaagaccatgtaaatccagtcacttccatcctaatttaggcctaaccagtcatcttgtgcctaacccaaccattctctccatccgagttagttttgcccacgtagataaactttttactatgtttatttgcaaacttaagccaaggccatgtatttattgactagaaatgatgaaaacttggacaccatctaaatcgcataaaaacatctttctaatagtaccaatagtaccccagtcagaagggtaaactagttaatacgcatgtttttcacccttgtcattgttttgttttgttttaacctcccataataccatctctactgttcatgtgttttctgtcatggtttttcccttggtacttctctgagtttttcactatttgcttctttccactgtttgccatgtctgcctgcactgtgtgggagtggagaaaaaacaggagcatatgattattggaatcccaatagcaatagcaaagaagcatgcaactggaaatatagtatttttctttcaccatgtggtggtttctgtgatctctgatagctttctgcaggcactgagcacaaagaagcccaaaagtccatttacatcctttaacagtttcaaataatcagggaccatgactccagtagctattcccggcctcctcttgaccacagtttattaagctgttgacctcaacttcataccaccctctgctttgtgaatctagggcagaactctaaactacatttcttctttgcaagctgactgcccattgggctttgccaacaagggagggagactggaaagctggaagaggatgaagggacttgctgcttcctgttgattccttttcttgtctgtcacttgccacaatagtgcctcactctggcattaatagttggtcccacttgttccagtttatgctttcctactctgctagaatcagccttatgcacttccttaaagataccagtatcctttcctcagatctgagtcctgagctccatagagtctctcctccacatttctaaactatagtaaattctctttattctcttttctctgttcccttgtcctaggagtgatagctgcttcctgctgttactacttcttatcacataagtaggactcagtgtcctctttttgccttttcagttcttcaacatatggttaacatttttcatatgaaaatttctcttgatgttgatgctgacaactttaaaaatcaagtccaatctctctgttaaaataacggatgcattttcagactcctgcctggaccctgactgataaagaaattgtcactaagaatgggatcctggtgagaaaactttcaaagatagaatttgggggcatcggtttggtaatttctttagctctttgccaatgggaaataatctagtaacccacaacatgtagtggcatcacaatcaaattgatacatttggttgattgtgataaaattatttctgaagctgtgtgctggaggaccaagtggctaaagcgcttgactgttaatggcagtaatgatgactacagggactgagggagaagtgagaagtgagataggtgcttctttgttcactggagcactgacagaaagcaaatgacaaactcaggtcttcaaagcgttagatcggtcaagtcttagagaatcaaaaagtttccatggttctaaagcacttcattttgtgtagccacggaaagacttgctaaaaattggacacagttttatgttatgttatgttatgttatgttatgttatgttatgttatgttatgtaatgttatgttatgttatgttatttttgagacagagtcttgctctgttgtccgagctggagtgcagtggcatgattttggctcactgcctataattccagcactttgggaggctgaggcaggaagactgtttgagcccagaagttcaagaccaacatgggaaatatggcaaaactcggtctctacaaaaaatagaaaaattagccaggcatggtggcaggtgcctgaacacagttttaactgcgatagtaatagaattacctagcctttgtcagtgtctcatttagaatattgtttggaaagaagtagaaccctgagacttggaatggggacatctaggtagacatggacagagctgagaatcttgaaaaaaactccagtcactctgagcctccattgttgacagaagctgcttacttttgaaaattagccttctcttgcttgaagatcctgtaataacctcacctagggtagtttctttgcaaagggctatccacacttaagagctacctctattatcttgtcatgaggcccagatctctgcatgttgcctagtatagggacaaaatctgatctgactagaaatagtctgtccttgaaaagaattgcaaaattttgctaatttatatctgtggaatcctgaggaatatatgtgaggatggattgtaagccggagaatagaatgtaacactagatcagatcatatttattcatctgggtatattctcaagaaattctgcatctaaagcgttaactcatacttgtttgtttgatggaaacttggactcattggtggcctgtattttataacgttgagatttctgttgttgttgtttttaaacatttaggttcagaggtacatgtgaaggtttgttacataggtaaactcgtgtcatgggtttgttgtacagattatttcatcacccaggtattaatcccagtactcaatagttatcttttctgctcctgttcttcctcctaacttccaccctcaggtggatcccagtatctgttgttcccttctttgggctcatgagttctcatcatttagctcccacttataagtgagaacatgctgtatttggtcttctcttccaggagatggaacagaaatgttgagtgccttctaatttccttgtaagtactgctttatcagcattcccccacattttgacacatatgtcttcatttttattcaggtcataatttaaaataatttcccttttgatttttttcttgacctctaagttatttagaagtttgttattgagtttccaaatatttggaaattttaaagatatctctgttactgatttataatttgattccattgtggttagcatactttttatgatttgacatcttgtaaatttattgagacttgttttataatccaaatatattctctctttggtaaatgtcctaatgcacttaaaaataatatatattctgctattattgggtgagttttttgtttttttttttttttttgagacagagtctcgctctgtcaccaggctggagtgcagtggtatgatctcggctcactgcaacctccgcctcctggattcaagcaattctcctgcctcagcctccagagtagctgggactacaggtgtgcactaccatgcccaactaatttttttttttaatttttagtagagatggggtttcatcatgttggccaggatggtctcgatcgcttgacctcatgatctgcccgcgatgacctcccgaagtgctgggattacaggtgtgagtcaccgcgcccggccgggtgagatgttttataagtgtcaattaagtcaaattggttgatagtgttattcaagtttttgatgtccttactgattttctatatattggagctatcagttattgaagttgtggggagtattagaatttctgactataattgtggatttatctatttctcttggcagttgtatcagtttttgctttatattttgaagttctattaataggtacataaacatttaggattattttgtgtgcatgatgaattgacccttatatcactatgaaatggacctctttgatcctggtaatagtctttgctctgagatctactttgtctggtattaatgtagctacttcagctttcttttgattagtgttagcatatacatctttttttcatccttttacttgtaaactctttttgtctttttatttaaagtgggtttcttgtatgcaccatatagctaggtcttatgtttttatccaatctgataatctttgccttttaactagggagtttaaaacatttacatttaatgtgattattgatattgttagatttaattccaccatcttgctattcgttttttgtttgttttgtctgttctttgtttcttttcccctcttttattttactagtctgttttttgtttctttttcccctttgttcagccatcatttacattagttaaataatttatgtgattccattttatctcctttgttggtttattagcaataactttttttagtggttgcttgaaagtttataatgtatctctaacttatcaccatctaccttcaggtaatattttaaagagatataagaaaagcattataattcctcacgtagttaccatttcactgctatttatttctttgtatcaatccagatttttatttggtatcatttttcttcttcccaaggcatactttaatttttcttgttgtgcaagtctgttggtgatgaattcttttagcttttgttatgtttgaaaaagtctttattttgctttggaaaaatataggtatagaattctagattgacaagatttttttcctgttagttctttaaagatattctgccttccattgcttcttattaatattaaaaagctactgacattcttatctttgttcctctatgtgtagtatatctttttttccttttctttggctaccgtagcatatcttctttctttttcttaggattttctctatattactggttttaagcaatttgattattatgtgccttaggtaattttccttgtttcttgtgcttggagctcattgagattcttgggtctgtaggtttttatagttttcaacatgttggggaaggttttcgccattatgtgttcaaatactttatctgtcctctgcaaacttcagtgatatgttaagacttcagttacatggctgactaaaagttggcttactgatgctttttgttgttgttgttgttcagtctttttcctttctgtgtttcaatttcagtactttctgttatgttgtcttcaagattactaatcttttattgtgcaatacctaatctgctgttaatctcatccactatattttttatctaaaacattatctttttcatctctaaatattgatttgggccttttaaatatcttccatgcctctatatcatatgtgcagtcattacttttcttctgaaacatatggaatatagtcctaggagctatttttatatccttgtctactaattcaagtatctgtatgatttctggatctatttctatagagttttgctcctcattgtgggtactgttttcctgctctttgcatgcctgttaatgtttttttatcagatgctatactttgtgaattttaccttactaggtgctggatatttttgtattcctctaaatattcttgagctttattctgggtcactgttaagttactcagaaatagtttagtctgttagaggcttgcttttcagctttgttaggcaggaccagagcagtcttacccaactcttttataaaatcagagtcatcaaaagtgaatttttatttcatttgttaattttattggttatctttcagtgttagacttgtgtgttttgaaactttagttttcaacctaaattttagtggaagattcgttttgttttgttacttttctccctttgttatcaccctcactgtttatccactttgcaattattattattattattatttttagttgagtattttattttattttttccttcaacttttaagttctggggtacatgtgcaggatgtgcaggtttgttacataggtaaatgtgtgccatggtggttagctgcacagatcaaccattcaccttgatattaagcccagcatccattagctattcttgatgctctccctcccccagctcccaccctgatgggccccagtctgtgttgtttcccctccatgtgtccatgtgttctcactgtctgctcccacttacaagtgagaatatgcaatgtttgattttctgttcttgcattagtttgctgaggataatggcttccagcttgacgcattttcctgcaaaggacatgaccttgttcctttttatggctgcatagtattctgtggtgcatatgtaccacattttcttcatccagtctatcactaatgggcatttgggttgattccatgtctttgctattgtgactagtgctgaaattaatatatgcatgcatgtatctttataatagaatgatttatattcctttgggtatatactcagtaataggattgctgggtcaaatggtatttctgcctctagatttttgaggaattgccatactgtcttccacaatagttgaactaatttatattcccaccaacagtgcaaaagtgtttcttttaggccaggcgcagtggctcatgcctgtaatcctagcactttgggaggccgaggtgggcagatcacctgaggtcgggagcttgagaccagcctgaccaacatggagaaatcccgtctctactaaaaatacaaaaaaaaattagccaggcgtggtggtgcatgcctggaatcccagctacttgggaggctgaggcaggagaatcacttgaacccaggaggtggaggttgcggtgagctgagatcatgccattgcagtccagcctgggcaacaagagcgaaactccatctcaaaaaaaaaaaagaaaaaaaaaagtgtttctttttctccacaactttgccaagatctgttgtttctggatttttttaataattgccattatgactggcgtgaaatggtatctcattgtggttttgatttgcatttctctaatgatcagtgatgttgagctgtttttcacatgtttgttggctgcatgaatgtcttttaagaagtgtctgttcatgtggtttgcctactttttaatggggttgtttttttcttgtaaatttgtttaagttccttgtagactctggatattagacctttgtcagatggatagattgcaaaaacattttatattcatttatacccagattcctagacctccagaccaggactaggtttttgttgttttgttttgttttgttttgttttgtttgggacggagtttcactcttgttgcccaggctggagtacaatggcatgatctcggctctctgcaacctctgcctcctgggttcaagcaattctcctgcctcagcctcccaagtagctgggattacaggcatgcaccaccatgcccagctaattttttttgtatttttagtagagacggggtttctccatgttgttcaagctggtcttgaactcccgacctcgggtgatctgcccaccttggcctcccaaaatgttgggatcacaggcgtgagctactgtgcctggccttttttttttgagacagaatctctctgtgttgcccaggctggagtgcagtggcacaatctctgcttactgcagtcttgacctcccaggctcaagcgatccttccacctcagcctcttaagtagctgggaccacaggtgtacaccaccatgcccaactaattttccatttttttttttttttttttgtagagatggggtctcgctattgttgcccagactggtgtcgaactcctgggctcaagcattcctccctcctcagcctcccaaagttctgggattatgggcaggagccagtgcacccagcctaggaccaagtcttataacgacagttctgcgtatttttgtattgacctaatccagctcctggttccaagttataaacctggctctggcccttgtctggagaagacagcctatgctggtctccttagtacatgaaggcttggttgccactgtctgctgccagactgagaaccatgaaaccatggcatagccttactcattactttgtttctttgctttttttggatccataaaggtatttgttcccagcattttattataaaaattttcaaacatacagaatactagaaagaattacacagtgaacacacatctgcccatcacttagattctacaatcagcattttactgtaatttctctattacatatctgtccacattaatccactcttttatccatacattggtctatcttatttcacgatgcccttcaaagtgagttgtactcttcacctgtaagttctaaaacattacatattactgattagagttcagtgtttgttttcgtttatagttttttgaagtaacatttacatataagatacacaaatcttattttttatttatttattttttttgagatggagtcttgctctgtcgctcaggctggagtgcaatggcgcgatcttggctcactgcaagctcagactcccaggttcacgccattctcctgcttcagcctcccgagtagctgggactgcaggcgcccaccaccacgcctggctaatttgtgtgtgtgtgtgtatgtgtgtgtgtgtgtatttttagtagagacgggatttcactgtgttaatcaggacggtctcgatctcctggcctcatgatccatccgcctcggcctcccaaagtgctgggattacaggtgtgagccaccgcacccggccaagatgtacaaatcttaagtgtaccatttaccaagtgttatcaaacacatcatctatacagcttaagcctctgtcaagatactgaacgttaccgtcaattttcttatgctctttcccagtcagtcctactcctgtacttccggaagcaaccattgttctcatttttatttctaccataaatttgttgtgcctgctctagaattttatattagagaaggatacagcatttattcttttgtgtaaggcttcttttgcatagcacgatgtttctgaaatttatccatttgattgtagtaataagttgttccttttcactgctgaatacttctattcttttctttaaatataccacagtttgtttactcatttcagcggagtctttcttttttcttaaagcatatgggactcaggtatctgtggggtctttttaatttttctttttcttttttatctatcactgatatgtatttggagagaagggagtgcatcaaataggctcctaactgtgccgtctttaactaaaatttcctagtttaactggtgtgtattaattttagattattttatgtaaattgagtaaagtagctgttttttaattttattgggaattgaatttagcccctttcattttccttttaattctgttccatgggcattgtcagagtttacatttttacatgaaatttaaaagtagaagatatataaatgaagagctatagttggtgttttaaaagttccattgtcctggctgggtatggtggctcacgcctgtaatcccagcactttgggaggctgaggtgggcggatcacctaaggtcaggagttcgagaccagcctggtcaatatggtgaaaccccgtctctactaaaaatacaaaaattacctgggcatggtggcacatgcctgtaatctcagctacttgggaggctgaggcaggagaattgctttaacccgggaggcagaggttatagtgagccaagatcacgccattgcactccagcctgggcaacaagaatgaaactccatctcaaaaaaaaaaaaagttccgttgtcccataaatcatattagtctgcctcttttttcttttgagagacgaaatcttgctctgttgcccaggctggagtccagtggcacgatctcggctcactgcaacctctgccttccgggttcaagccagtctcctgcctcagcttcccaagtagctgggtctacaggtccacgccaccatgcccagctaatttttgtatttttattaatgacagggtttcactatgttttggccaggctggtctcgaactcctgacctcaagtgatcctcccaccttggcctcccaaagtgctgggattacaggcatgagccaccacacccggccaatagtctgcctcttgaatatatatttctttttcacatttaaaaaaattcaataagttcatcatgtgtttgctgttaaattaagtataatttatctataatctccatactcctttggtgttatcaacagtattaacaatagaactctttgttttcaagaatgtgttgattcagccagctgaacaatacctagtccttccttgatatctgagggggattgattctaggatacccaccccccatattctaggatgcttaagtcccttatataacattacatagtatttgcatataacctacacacgtccttctgtacacttcaaattatctctagattacttacacctaatgtaaatgctgtgtaaacagttgttatactgtattggttttgaatttgtagtattttttattgttattttttattcttccccctcgtccccaaatatttttgatgtgcacttggttcatacagagggccaactgttttgcagttctgtgggatctctaaaataacgtaaattgagaaatttaacctctttctgacacttaatgctaaaaggaatcgctaatgaagcacaacagattttacacataacataaagtttcaacatttgttaaaataatattttattttttacctttttttaggtttggttgggatgttccagtaattctgagaaattcagaagagacccagttcagcacaagagttttcaaaaagcaaatgagacaagtcaagaatccttttggcttagagatcactaatccatcttcagcttcaattacaagttggtggctgttttccaaagattttctctcattgtttgccctctttttttagcccttttattttctttctctatttctttcccttcattagacttttaacaaacatttgttgggcaactatgttgttccaggtgctgtactgtatatgacagatacaaagattaagaagttacaaactttactcctgaagaatttatcacctagtaaacagaggtagatgtgtatacaaaggagtagaatgaagtattacaggtgttaatagtgaagtctcttaggacactatgccatttttattggtctgtagtaaagtgagaaatgatgtgttatgtctaaatacagttaacgtaaggttgctaaccttttgaggaacaattgcctttttattttttttgagacagattcttactctgtcatccaggctggagtgcaatggcacaatctcggctcactacagcctccacctcccgggttcaagcgattctcctgcctcagcctcccaagtcactgagattacaggcatgcaccaccacacctggctaatttttgtttttttagtagagacagtgtttcaccatgttgaccaggctggtctcaaactcctgacctcagatgatccacccacctcagcctcccaaagtgctgggattacaggtgtgagccactgcgcgcggccagaatgattgtcatttaatctgaaactatggtattttggtataaattattttgatataacatgttcttttgtagatggtaggtaatagatggcagttgtttgcttttgtacttgcttggaaaaataagttgtctgcaggaccatataggaaccattagaattgtaaagaaagagatgcttaaatttgttaaggtgaagaggcatattcaggaaagccttcataaaaaagaatatgctgagtctctcttactttttttttctttattccttcctccttttttttttttgagtagaatcttggaagataggtgtttacttcgtggatgagaaatggagtgatacattaaagaaacagtagttatggctaaagcataggatgggacaggtaacagaggagtctaagaagactcaggttcttcctatgggtcctccatagccagatcctgttagaaaaatgaggagtacagaaagaatagcaagtttccaaagaaaggcaatgaattcaattttgaacttttggactttgaaattctttcgtgacagttcaatagaaataaagagtaggcagtcctagatacagttctgtagctttttttctgggccgagaccctgtcccttctatacttgcttacatttctggtttcttgaaaacaaataagccagatctttctctgcttttcatcctagtctagctactgccgtatttctcttcttcccctcacagccagcttcttagaagctgtttgcattttccttctcttagcctgcttcatttttactcctcagtgcagtgcagtctgacttttccctgtatccctttactgaaatggctttctctgaggtcactaattacgacttctgccctgcacttttgacccccagcagtcatcaaatccagtgggagcctttcagggctgagttaatgctctctctctagtattttacagagttgaccttcatttgcaacgtcctgctcccttgcgtctatggaccattcttgtctattcatctttcctgcctctaactctcagaatctaataactggtcagaaatcagtttacttagtcaaatagatcatcaggcttaagtaaatcttgatttgtaaggaaaaatatatgtttttttttttttttttcgagacaggctcttgctcttccacccaggctggaatgcagtagtatgatcatacctcactgcagccccaataccctgggctcaagtggtcctcctgcctcagccccctgagtagctgggactacaggtgtgcatgaccgtgcctggctaaataaaaaaaaaaatgttttttgtggagatggggtcttgctgtgttgcccaggctggtctcaaacttctggcctcaagcagtccttctgccccaggctcacaaagtgctgggattacaggcgtgacccactgttcttggccccaaaaagtacaaaatttcttattcatcctctttagctgtaaatactattaccctatgaattgatggaaactaggatctcggccactcccctccccgctccttccctataatagataacagttcattctgatattttttacttgagaaaaccaaattttgagatatgacacagataaaactaatttgtttaaaagatagtaggttgtgcatgcctgattaaagtgtacacccagctaccagctactcgggaggatgaggtgggaggattgcttgagtccaggaggtcgaggttgcagtaagccgtgatcacaccacttcacttcagcctgggtgacagagtgagactctgtctcaaaaaataaaataaaaaatcaagtgtacagcatagtggtggttcaataacctcccacctctgtggccataggctagaacctgctacaatgtcacatctggctcttgagcaggacccgcaatgaaaaacctaccagctgcaaggccttccttcctgcagtacagttccacaggtctgaaaatacactgaaaaactaagaagagctgatacattgtgagcaaaacacagggcacttgtgaggcagaaagtgtgaggaaatccatcaatctgcttttcaggcagaaatagtcacaaatagaaccagccttgcgaatgtttgaggcaaatgaaaagatagccagtaagtagccctcttagctatgcctgcacactagttgctaaccaacagtagtattactgaagtcatgaaaaattatttaaatgtgtggatgtacagcatgaatactgaaatattttaatttttaaaataccgatgcatatcatttattatctttctcctatggggaaatagaaggattttgataggagttatactcaacagagtaaaattcatttgtttaaactgtggaaaagtgggtatcattaaagatgtctatacagaacattaaaataatattgtaacaatatttgtgacatttaaaaaagttatttcatttgatgtgtagatagtttaaaaatctttttttcaccactgtacccaaactgcctgacatatagcagaagagggtgaataatctagagacctgatttaacttgaaaataaaccagaggctgcacgtggtggctcatgcttgtaatcccagtactctgggaggctgagacgggcggatccttgagtccaggagttcaagaccagcctggccaacatggcgaaacctcatctctactaaaaatacaaaaattagctgggcgtggtggcacatgcctgttagtgccggctactcaggaggcttaggctggaggattgcttaagtctgggaggttgaggctgcagtgagctgagatcatgccactgcactccagcctgggcaacagagtgagaccctgtctcaaaaaacaaaaacaaaaaaacacacatgctttttatttatatttaagatttttttttttttttttttttttgagacggagtctcgctctgtcgcccaggctagagtgcagtggtgcaatcttggctcactgcaacgtctgcctcccaggttcaagcaattctcctcccttagcctcctgagtagcagggactacaggtgcatgccaccatgcccagctaattttttgtatttttagtagagacagggtttcaccgtgttatccaggatggtctcaatctcttgacctcatgatctgcccacctcggcctcccaaagtgctgggattacaagtgtgagccactgcgccctggccatattttaaaatttataattaaaaaaaaaagaaaaccagagaatcgattttaatctgagtcatttagttctgtttactaggggtgggttgctgggatttttttgttgttgttattatgtaatgatatatttggatttgcgtttccatgtctccaatatagagtctttaatgaaattgaaagttagatactcagtgtatataagttgagttgaattaatttgattcaggaattctgctttttgtaaatagcttccttatattttagcttattcactctggtaagagctaacattaaagcaaaagggttagaaaaaaacacaatgtacatggcatgtttggaggcgtttgtgaacctccattctctacaacctaaaactttcatctcccaatactctggctttattatcctcatgaatggtctccttgttttattactgcttctctcacagggatccttcctcaagaaggtttgtggcttttccgccccatcatttctccctttttagtggcttagcatattttctacagtccttatttttttcacttttttgcaaggctgtctcttacactccgctttatttgcttgttatagatagtctgggtaaggacagtttgagagataccacacccatgtgcttcacttattttgattctgaattttcttacagctacgtcccaattctgttaatgctattgatctaaagtgatgtcatgtgtgtactgagttttagaaggcaaaaaaatacataaaaattgaaactctttgcaaaaaaaaaagtggaaaaggtaaagggagaatagttttgatgggggtactgacactgtcttcagatagtggaaatcattacattctcccctcagtttatgtaatggacaagtttgtaaaagattatagagatatacctaatgctaaatgacgagttaatgggtgcaggacaccaacatggcacatgtatacatatgtagcaaacctgcacattgtgcacatgtaccctaaaacttaaagtataataataataacattaaaaaaagagattatggagagtataattttatagattctgtagtttttttaaattaattttagagacattttaagatctgattaatctccagttgtcaaaggtctctgacactcttcccattttagttaagtatacaaagtctataaacgagtctcttaagtagctctgaatctttggggctctggctttttttttctttttacaaagcaaataaacagggtagttttatatgttctgtaagctgtaagttgagttttaaaaggcttatccttccattgttctttttttttttttctttttttgaaacagggtctcactctgtcatccaggtggaaatgtagtggtgtgatcatggctgactgcagccgtgatcctcctacctcagccttccaagaagttaggaccacgggtgcgtgccaccatgcccagctaatttttgtgtgttttgtagagacatggttttgccacgttggcccaggctggtctcaaactcctggctcaagtgatctgcacatcttggcctcccaaagtgctggaattacaggcatgaaacaccacacccagcctgttcttctttaatgtaaacaaacacatatatgggtatccattcttgtgagataaacagtagcatatatatttaattttctctaccttgcttttttttcatttactaatatattctgaagatcatttcataatagtgtgtgcagatactctgatatacctcaattcttttttttttttttttttttttaagagacagagtctcactgtgtcagccaggttgtagtgcagtggcacgatctcggctcactgtaacctccgccttcctattcacttttaatagcttcttagtactttattgtagagtactatatttattcatttaatccgcattgatgaacatttgggtttattccagcattttgctatgataactagtgctataatgagtagccttatacatatatcttttcacatttttgctagtaatacaataataaataatcattttgtgtttcttgttttttctttttcaatgttttaaaatatgcattttctattttttcctttcgtatctacctccagcttttttcttctgcctcatgttatgtggttctacagtgacaaagggaaaaatatgtgtgattttgtatgtgtgtgtatatgtgtgtatatgtatttgtgtatgtataaataaaatgttttccttcagctatttaatatcaaatggaatttttcattcttgagttaatacctgatgattggaatcataaaaatttgaaatcaaagcctgctccaattaacctatgcaaagttcctaccaattaaaatttttccttaagtatgattagaaatggccatgtatcaatgctactcagactctcagactgtgtgtacatactactaaatactgagagtaaaattggaaaaatcagtttttggtatcctgtggagcatctgcttgtatttgtgtatcttcttctaacatatactcttgatcacattttaaaaaataggtaatatatcaatcagaattcttattagcaagcaacagaaacaacttcaataaaaggatattgggtagcttacagaattgctggcaggtttggagagccaaaatcagatgccaaggctgttgagccaggaacaatgaccaaaaccaggccctttttatctagtcagtgtatcagtgccaaggagtactacacgttacagtttgcgctgctacagtttgcacccccagcagtatgaaaggctggatgttgctacccttgaatgtgatattgctacaaataccactaggagggggaaatcacataggtgacacaaagtaagtcctatacaagtgttaaataaaactgtataatttcacatctacttacaatttgtatatccatttaatcaggtctactcaaattgttatatcttcttaagttgaaagtgaacaactgaattaagataccactattaaactctttatgttttggaatccccactcttttcctcaggatattttgcatattacatgggacattaagtctgtgacaagcctgtatgttaatgttgtcaatgtatacattaatgttagtaaagctcagtttctttttaatatttttcttacaacagcgatcatgttgtggagcctataggttgtacatatcccctttagaggacagctgtattctgctgcactgtttcttgtcgttaggatcatatacactatgagagtggtaggttatcaatagtgaactgtattttagttttaaaaatctagatgggaaatgtcttagagtcgccaaaaaagaaaattaacagtttctaagctttaatagataaatagtaagaaatagttttttgatagctctcaaaaaatgtgtagacattgagcttttatatctcttgttacagaggccagttccttcgtttataggaggcataccctttaacaagttcttttaactgccatcatcctggccagcatccaaaaggaagcttttgttactcaccctgtatgattgtattagaagttacattaaatcactttcattctttctcctttgttttttacagctggcataaccttgacaacagattgccttgaagatagcctccttacatgctactgggggtgcagtgttcaaaaattatatgaagctctgcagaagcatgtttattgcttcagaataagcactccccaagcattagaagatgctctgtatagtgaatatctctatcaggaacagtatttgtatcctttcgtctgatatacccattagcactgaaaattagacttcttatggataaagtgttgctaacttattgatcattcttggtatactagaagcatgtttattgcttcagaataagcactcctcaagcattagaagatgctctgtggagtgaatatctctatcaggaacagtatttgtatcctttcatctgatatacccattagcactgaaaattagacttcttatggataaagtgttgctaacttattgatcatttttggtatactagaagcatgtttattgcttcagaataagcactccccaagcattagaagatgctctgtggagtgaatatctctatcaggaacagtatttgtatcctttcatctgatatacccattagcactgaaaattagacttcttacggataaagtgttgctaacttattgatcatttttggtatactagaagcatgtttattgcttcagaataagcactcctcaagcattagaagatgctctgtggagtgaatgtctctatcaggaacagtatttgtatccttttatctgatatacccattagcactgaaaattagacttcttatggataaagtgttgctaacttattgatcatttttggtgtatttttgttcttatggttatagtggcaatttacctttacattttcaaaaagtattaaaaaggatagcaaagaagaaatatattgccagttaccaagagatactaaaattgaagactttggtacagtacccagatctcgctatccattggtagcgctattgaccttagctgatgaggatgaccgggaaatttatgatattgtaagtaattgaaaattttgaaagcattacctttaagtgatttgaatggtggttcttcattatttgataaatagaaaaagttttattttaatttctgaggatgtgcatttggcctacaacaactatatacctatttggtttttatatgtgaaacagtaccttcagattatgactcatttcttgccttatgggtcacagtaatatgactttatttggaaaataaaagatatataatggttgaattaagttagtttcatcattaacacctatttggttgtatacacctatttagtttttatatgtgtaacagtaccttcagagtatgactcattttttgccttatggatcacagtaatatgactttatttgggaaataaaagatatataatggttgaattaagttaatttcatcattctgtattctgtcatatttgctgtatagaaacagtctgttgggaagcatgtttattctgaacatgtttagcagtgaataaataagcacaataatgatcgaaagtgctcaattttaagatagtatccactctttttttgcctgcttgcagtcaccttgtttccatcaaagtccctgctgcacctatatcttatatgtctggtccctgtattttcagtaattataataatctcctttcctcattatgtgctaattattttttcagtctgatagttgattcctattaggaagttaaaagtatcttagagatctaagaggactgaaactttgacaatcatctgagtataatagaaacttagacatgaaataaacttttgatgaaattgtatcatggtaaaaatgtccttacacacaattgactacttttctgaagtatttaatatagattattcattaataaacatatggtaacattgttttgtgatattcgtaatatgcaaagtacgttcacaaacatgaacttatttttttcttctaacaacctggtttcttaggacagggcaaatattctcctttcacagactgaaacagagtcaagaaaaatcccagtcattcaggcagtaagagatggaacaagagcttgactctgagctttttgtgtgtgtttgtttgtttttgttttttgagtttattttttttagcaggaatatcttcctgcaacaagtgtacattgagctttggaaggtaaagactctttgggaaatctagacccttcttactcatttgcagttaagcacctaggtttttggtttttaatattttcaaactgaagttccattgagctgaggtcagcttattttttccaagtcatggggagcagaggggaaggaaatggggatatgtaggtcactagagacaaagttacagatacataaaatgaacaggtctagagatctaatgtacagcataaagactatagttaatgtggtattgcttttgggatttttggtgctcttgccacatgcaaaaaaagtggaagtaactgtgtaagatgatgcgtaatttgcattataatagtaaccatttcactaggtatatatatatcaaaacatcctgttgtacaccttaaatatatacaataaaaatacaaaatacaaaagtcataccagcagtagtgtatttccagaacctagtacagtgcctaggatataataggggttcaataaagatttgataagtaaaaaaaaaaaaaaaaagtcatactagacaatgttaatgagcctcatagagcttgacagcgaaacaccttagctgtacatcccatgcaccttagcgtgcatgagaggccttctggcttcctccctcctttctctcagtttcagttagagataaataaaacctgttaaattggtgtctcctatttctagcttctttgttcttgaccctgtgtacttgggcaaggaagcccttctgcccccactgtgtgccccatctctgctgagtttcttgggttctgttctcctttttcctttggttcagcacaaaaggatcagatcgcagtcattttccctcccagcttccccattgcattccttttcccttcactgatagtgctctctaggtgctcagggtctttttttttttctaactttcttcccctgtccaaacagggagtgattgtgtatctgtgtggtaaaatatatatattttatatataaagtttaccattttaaccatttttgtgtgtgtgttttcagttcagtggccttttaggccagagaagagtttgctctcaggtccctgatcacactggatgaagactgtgtggcccagctgtagttgtgggaggcttgttcccatagggaagcctgagtgtctcccaagggttaacagccatcttctcttgtgctttgtgtatgtctctgtgtctgggtccttttgaatgtcttttattctcatctgtgggctccctccttttttcctgttaatccttgcttctcgtcttatttcttagattgggggtaatattggcactcaaatatatttattagtgtattttgtattaatgttctctgtttataattttaaaagcaaatggaccatttcctatttctttttcatatgtgttttttcagtattgtatgtgcgtgtcagggactatatttttttaaaaaatttattaataaaatcatttttattttaacagcaaagaattatatttaggtagtacagttaggaaccactttgttgttttagattaaaaaaaggaaagcaggaattgttactacaaaattttgactttaaaattttttcatttttagttaattacattggctttttttcagtattattcaaataatacatttgtggcaggaaaaaaaattagaaagtgtagataagccaaaaggagagaagtataataatctgtattctatcatccaaaaataatcactgtgaatatttgtctgtatctttccaaatctttatatatgtaattaaaaaagggataaaattatacattttatactattttgtgacctgctttcacttagtagtatattcaaacattttttccatatcaaatatttacccacaactacatatataactagtatgataatagcttcagagacttttaatattaaatcaaatgacaaaattggttttttttttgttttttgagacagaatctcgctctgtcgcccaggctggtgtgcagtggcacaatctcagctcactgtagcctctgcttcctgggttcaagcaattctcctgcctcagcctcccgagtagctgggactacaggcacgcaccaccacgcccagttaatttttgtatttttagtagagatggtgtttcaccatgttggccaggttggtcttgaactcctgacctcgtgatcgacccgcctcggcctcccaaagtgctggggttacaggtgtgagccactgctcccagaggacaaaattgttagtatgaagtgataactactattttctactaaccccatcattttgatttagtattaaaagcctctggtgccattactaaattaataaatctttataaacttgtaaagaatattgtgtttttgcaactaatgtagggttttaaaactttttatttgtacataatttcaaaaagttgcaaaaataaaaaagtaaaagatcacccatataccctgcacctggatctcctattgttagcatttctgtcctttgcattattgttctcccatttatgtatgtatgtgtgtattgattgattggttgagataggatcttgctctatcaccaggctggaatatagtggcacagtcatggctcactgcagcctcaacttcctgagctcaagtgatccttctgcctcagcctcctgagtaaccgggccaacaggaatgtaccactgtgcccagctaagttaaaaaaaatttttttctaaagacaggatcttactgtgttgccctggctggtctcaaactcctgagctcaagcagtactcccactgtgatctcccaaagggctgagattacaggcgtgagccaccacacccagcctacccatatgtttatacatacacatatatatgatcgtatatatattttaaatcaatgatttgagaataagttgcatacgtgatgattctttacccctaaatgcttcagtgtgtatttcctaaaaataaggatgctttcttatataaccacagtatagtcatctgctttataaatttaacattgatacagtattttatccaattcacaaccaattttcttctccagttcaggttctagtctagagccagattttgtatttgtcatggatctttagcttcctttagcctggaacatttccatactctgtcttttatgacatgagcatttttgaagggtatagtcacacacacacacacacacacacacacacacacactttttgtaaattaaaacattctcattttgtttgtctgatttttcttatgatcagatcaaagttttacatctgcagccagtgagctgcccgggtgatgtgtccttttcagagtgccacctctagaagcatgcaatgttcttttctctaattggtcatgttaattttgatctcttagtcaaggtgttatctaatttctccactcttctgtttttttctcccccttgatctgtgaggaggcactgtaagatcatgtaaatatcctgctttttattaaaaaaaatttttttgtcctagatttaacatccattgatgattcttgccagatttcatctttactgtgatggttgcaaaattattattttccaactgcagccctccctccagtcggttcttggcattctacaacaagcaagagacttcctgtctctcccatttgtttgtttgcttatctgttgtctctatggcctcatgaatttttcccccagtgttttataattcatggctgaatttaattattttgacgctcaaactgccatttccctgcttcctgccaagactgagggtttgtagtcaaactgtgcccacagattacttggattagttctctcaaaagtcagaaaaccatataaagaaatatactcatgttgttttcttccgtatcccttccacgccattcccacacaccccagtctttagagatagttgttgttttctgatttttcctccctgttttttattttctcttttttcttacacaaaagatagcacatactctatgctacatatgctgttttgtactttgctctttttcatttcagaaaatctggaaatcactgcacaccagtttgcagagattgtcttcactttttttttttttaatagctgcatggcactgcactgtgtgtatgctgtgcatattccatagttattctgccagtctcctgtgcttggacattcaggtggtttccagtattctgcagtaacaaataatcttatgctgaataattcatatatacatatcttaatattgttggaattgtatggttgaagtgtaaatgcatgttgttttgttagatattgccattggaattgtacctttttggaaaaaaacatttccaccaacaatatatgagagtgtatttccacagagtgtattgacaagcttctggatttttgttactttgatgagtgaataatggtgcagtattaattttaattaaacatcttttaatatggtcaaggctcatgtttatatctttttatgaattgtccgttcatgtcttttgcccatttttctataggattttggccatttttcttcagtttttaaaagttcttcataaattaggaatattaacctttaatttgtgacacaccttgtgaatatttattctagtttgtcatgtgttttgactttgtttatggtgctttttatcatgtatatttttaattcttatatagtcaagtgtatttcctctgggttttgagttgtagttaatgtctttccttacactgagactaaaatggaatttgttgattttcttctagtacttgtacagttttattttttacatttagatctcttatgtttctggagttgattcttatgtatggtatgaggaatgcatctaattatatatttttccaatagctatccaattgtcccaatactgtttattaaaaaaactctttggtgatttgacatcacacctttattatatttttgtacataattacgtctgtttctggactgtttatcctgtttcatccatctgtctattcatgtgccagtaccatactgttttaattttaaaggctttgtagtctgttttattatctgatggggctagtcgccctcataactctctcttttcagtatttttctagctgttcttttgtgttcatttttctatatgagaattttagagtcaatgcatgtagctctctaagcaaaagtgttttctctggtccctttacatccaagtttcttaaaagactgtttaatactgattttaattcctctccatttccttctttagtcctctcaaagattcctttgtccattgtgatagcattaaatttgtaaatttgagtacaattaaaataactctgccaaaaatatgtcagtaactgattcctctgcagtgattatgatttaatcagattgacgtaaattttctaatttatcagccttttatttttgagaagcatttttctttttttttggcagaagacagtgtctagaagcagttgaaaagcatttttcatatatttgtgaaataatataaagattttaagtactgaccagtgttcaatttttattttagatttccatggtgtcagtgattcatattcctgataggacttataaactatcctgcagaatattgtatcaatatttactcttggctcaaggtcaatttcatgatcttaaggtaagccgtactctgtagtcttatctctgtctcttttgtttacagagtttcaaagaatggccatttatggaaaggtgattatatttttcagttaataattacagaagataactaactgttctttgcaattgaatttgctagctcataaattttaagccgcttcttatgacccccaattttaaagagtaattgttatttataataatctttaaatttatttctttgattttcagcaacttttcatgtctgcaaataataatttcactccctccaacaattcctcttcagaagaaaaaaacacagacagaagtttgttggaaaaggtgggactctctgaaagtgaagttgagccatcggaagagaacagcaaggactgtgttgtttgccagaatgggactgtgaactgggtactcttaccatgcagacacacatgcctgtgtgatggctgtgtgaagtattttcagcagtgcccaatgtgcaggcagtttgttcaggaatcttttgcactttgcagtcaaaaagagcaagataaagacaaaccgaagactctttgaagacatcgtaacactgaaaagtacactttctactaaagatgcagaaattgatgatcttggaattcatcataacatggaatctacagtactgaccatcaatgaaaattatattttaacttcatatttgtatggtacttggatgataaaaattaattattcctttctgcttagtgaatgaatactggaatccatctgtgttgatacataaaaattcattcaactcttgaaaagaa

SEQ ID NO: 146 - DNA, 32744 bp, Homo sapiens
  source 1..32744: mol_type = other DNA
gcagtgtggtgagcgagccgaagcgcgggaagcagctcttgtggatcctcagtggcggaggctcggtcacccgggtgagtccccactccggctgcccgcgtccaccaaggagatgcgtgttccctttccggcttattgtctgacagaccctctgccttatcccgctggtgtcactcgggtgggggaaaccgggctgcggagaacgggccctagaggagactaagctctcttcctatccctagcctcgctgcttttctcttttgaaataataagactggcttttataaaacattttcagataggtaaaggaaaacatgcctgccacacggaagccaatgagatatgggcatacagagggacacacggaggtctgttttgatgattctgggaggtaaggttctttgagaaacaacgttttaggtgcaaatgttaaaacatttatccttaaactttatatgtgcagtcagctaaaaatgactcatgcggatagaggaataatgttgaaatctaaaatggcacacatatttctttagattattgtttgattcgggccgtcatggtagttgtagtatatcgacaaagttataatcgtacttccagaggagttggaaagatgcgagcttctctccatatattttccccttccctgcatcttacattattaattttgtcagatcactagttactgcctacttgtcaaattcagtggcctgttctgtttggaatgatatccttccatgcctttagtgatgctatttccctttttgcttatttttttttaactttttgacggcttaaaacaattttttcctctgattcctaaactataatattttcctacggttattctggtcccttttatctttccaagtcccattcttacgcactactgctcgattgcacggcttccactgtcgcttctatgttgattgattcattgaaaaaatacttgtgtgtctcttttgctggggactacagatagaatagagcgaaccagacacagtcttttcctcctttgagcttaaggtctttttggattgacaggcattgaacacaaattaatcacaaaaataaatgtgtatttagaaacaagtaatatgtgcagtgataaacatgtatgaggagaagctcatctagttaaaggagtcagggaaggcttctttggacaagtgtttcttgagacgccatctgaagacggagcaggcattaagcagtataaagagatgagtggtggtggcggtggggtggtgatgttggcatagtaagcagaggcaatactgtgtgtaaaggcccaatggggccagggatcatggtatgctcaaagaactgaaggaaaactagccttactaaaatgtggagagtgatgcagagtttagtgagagatgaatctgtgaagttaggcaatggatgtcctatccaagaccttctggactttattaaggaatctcgttttatcctaaaagcactgagaaggtattaaaggcttgaagcagagagatgtgatcaggtttgtttttgagaaaatgcatggaggatgaattggaaaaggagcactcatggatgcagaaagactgttagaagatacctgtattagtttgtgtaggggcgggttgcccctccacacttgtgggtgtttctcgtaaggtggaacgagagacttaggaaagaaaaagacacagagactaagtatagagaaagaaataaggggacccggggaaccagcgttcagcatatggaggatcccgccagcctctgagttcccttagtatttattcatcatttgtgggtgtttctcgaagagggggatgtgtcagggtcacaagacaattgtggggagagggtcagcagacaaacacgtgaacaaaggtctttgcatcatagacaatgtaaaggattaagcgctgtgcttttagatatgcatacacataaacatctcaatgctttacaaagcagtattgctgcccgcaggtcccacctccagccctaaggcggtttttccctatctcagtagatggagcatacaatcgggttttataccgagacattccattgcccagggacaggcaggagacagatgccttcctcttgtctcaactgcaagaggcattccttcctcttttactaatcctcctcagcacagaccctttacgggacggtcaggtctttcccttcccacgaggccatatttcagactatcacatggggagaaaccttggacaatacctggctttcctaggcagaggtccctgcggccttccgcagtttttgtgtccctgggtacttgagattagggagtggtgatgactcttaaggagcatgctgccttcaagcatctgtttaacaaagcacatcttgcaccgcccttaatccatttaactctgagttgacacagcacacgtttcagagagcacggggttgggggtaaggttatagattaacagaatctcaaggcagaagaatttttcttagtacataacaaaatggagtctcttatgtctacttctttctacacagacacagtaacaatctgatctctcttgcttttccccacaagtttgggtaagtgtgatagaagcttggactagagtaaacatgggtgtgtagaaaagagtaaacattcaggaaatatttaaaaagataaagtcaacaggatggatcagatattaaggatggagaaagaggcaacagggataacgtctacatttctgaatgttacggttgagaaagtgatgcttccacttgcaaataacaggaacacttgaagaagggcgtatttcagaggtagagctgtgggtggagattgagtttgcgtttggatgtgattattgtaggatttctttgagatattcacctagagggataaagtagacagttggataattgtgtctcaagctcagagaaaaatgtgagctagagatagaaatatacaattgacccttaacatgaatttgaattgtgtatgtctacttatacgtggatttttttcaatacacatattagaaaatttttggcagtttctaacaatttgaaaaaactagcagacgaaccatgtagcctagaaatatggaaaaattaagaaaaagtatgtcatgagtgcataaaatctatgtagatactagcgtattttatcatttactaccataaaatatacacaaatctattataaaaagttgaaatgtactaaaatttacacactcaaacatttccagaccatccgcagtcaagagaaatgtaaacaaacataaagatgcagtgttaaatcgtcactacataaaattaactgtagtatatactgtattactgtaataatttcatagccacctcctgttgctatttcggtaagcttaagtgttgtatctgcttaaaacactgtatgaggttgtatctgcttaaaacactgtatgatgctcatgagcagtttgtctctccagtaaattgcctatcccagtaaaaagacatctctggtgattctcatatatttttcatcatgtttagtccaatgccgtaaactttgaataacaccatgggaatcatatgaagtgccactagtgatgctggacatactcctaagaagcagacaaaagtcatgacattaagagagaaaagttgaattgcctgataatgtactgtagattgaggtctgcagttgcggttgctcacaatttcaagataaatgaatccagtgtaaggaccactgtgaaaaggaaatttgagacactgttactgcagctatgccagcaggcatgaaaaccttgcactttttgtgaaataactttatcttgtattgaaaacgcagcttttatgtgggtataggattgcaatagaaaggcatagctatagactctaatgtggttccagaaaaagtgaagtcattatctgacaacttaaagtgaaaggtaggtgaaggatctaaagctggaaagtttaataccagcagaggatagtttgataatatcagaaagagatttggcttcgaaaatgtcaagatggccgggtgtgatggctcacacctgtaatcccagcattttgggaggccgaggtgggtggatcacctgaggtcagagcatgcccaacgtgttgaaaccctgtctctactaaaaatgcaaaaaattagccaggcacagtggcaggcacctgtaatcccagctactcaggaggctgaagcaggagaatcacttgaacccgggaggtggaggttgcagtgagccaagattatgccattgcactccagcctggggatcaagagcgaaactccatctcaaaaaaaaaaaaaaaaagaaagagaaagggtcaagatggcaatagaatcagcttctgctgaccaagagacagcagattcccagacaccattacgaaaatcattgaggagaaaggacatctgcctgaacaggttttttgtttgtttgtttgttttgtttttttgagatggagtctagctgtctcaccggctggagtgcagtggcgcgatcttagctcactgcaacctccgcctcctgggttcaagcgatttttctacctcagcctcccgagtagctgggattacaggcatacaccaccacacacagctaatttttatatttttagtagagacggggttttgccatgttggccaggctggtgaacaggtttttaatgtagactaaagtgccctattctgtggggggaaaaatgccacaaagaacatttattagtaaggaaggaaagtgagcactaagatttaaggcaggaaggctaactctaatgtttggtgcaaatacaatcagatttgtgatcagaactgccattatttataaagctactaacccccgggccttgaagggaaaagataaactccagtctcttagttgtataacaaaaagacctagacaatgagaaccttcttttctggattggtttcactgatgctttgtgcctgaagtcagaaagtatcttgctagtaagggactgcctttaaaattcttttaatgttgggcaatgcccctggccacccagaacaccataagttcaatactgaaggtgtcaaactggtatacttgcccccaaacacaatgtctcgaattcaacctctagatgaggagttcatacaggcctttacgggctcattacataaactaatctatggaaaggattgtcattgctatggaagagaaccccagtagagagaacatcctaaaagtctggaaggattataccattgaagatgccatcattgttatagaaaaagctctgaaggccatcgagcccgaaacaaattcctgctggagaaaactgtgtccagacgttgtgcatgacttaagattgacagcagagccagtcaaggaaatcatgaaggagattgtgggtatggcaaaaaagataagggagcgaagtaatttcaagatatagaccttggagacattcaagaggtagcagacatggctgggcgcggtggctcacacctgtaatcccagcactttgggaggcccaggcagatggatcacttgaggtcaggagtttgagatcagcctggccaacatgatgagaccccggtctctaccaaaaacataaaaaattggctgggtatgttggcatacgcctgtaatcccacactccaccttctctcaggaggtggaggttgcagtgagccgagattgtgccgctgcacattccaggctggccaacaaagcaaaactctgtctccaaaaaaaaaaaaaaggaacgctaatagacactaaaccgaagagttagcagaagacaatttgatagaaatgagttcttcctaactactgccaagtgataaggaagaagatgtagaagaagtagtgccagaaaacaaattgactttaggcaatctggcagaagggttctgattattcaagactgcttttgacttattttacaacatagacccttctatgttatgagcactgaaactaaaggaaatggtggaagaaggattggtactgtatagaaacatttttagagaaattaaaaaggaaaagagtcagacggaaattatgatgtgtttttataaggtcacaccaagtatgcctgcctctcctgcctcctcctctacttcctccccctcttccacctctgagacagtaagaccaactcctcttcgtgttccccgtcagccttctcactgtgaagacgataaggatgaagacctttatgatgatctacttccacttaataaatagtaaatattttttctcctctttatgattttcctgatatattttttctctatattgctgtattgtacagatacagtatataatacatagacaaaatatgtgttaattgtttatgttatcagtaaggcttctactcaacagtaggctgttagtaaagttttaggataatcaaaacttctatgtggatttttgactgtttaggggttggaacctgtaatgcccatgttgttcaagggtcacctttacatctttggctgataccttccagagttcagggttgaggttctggctaagaatataaatgtgagaattgtccttataaacataatatttattactgtgaacttggatgaagtcacctagggaaggagtaaatataggtaagaaaagaggttcaaggatactccaaaatatttagagatcaagttaaagaggatccagctaaggagactaagaaagagtagctagaaaagtagagaactgaaagacaagaaggatgtttagaagccaaatgaagtgtttgaggaacaggaaataatagactctgtcaaatgctcctggtgagtcaggttgaagactgagaattcaccattagatttagcaatgtggaggccattggcaagttttatggaatggtaagaatgaaaaccttgaagtggattcaagataatggaaggggaggaatttgaattagtgaggttgacactacgtggttttgattttgtctctagtaccagtggggtatagaaagtaatcagtcactacttaagagggctgaagaggaagcagtgaccccagaagaatgaccagaaagaaagctgagtatatagagattttgcttgtgcctcaccatgaacctcatgagactcaatgattaagagtcaagaagaggtggtcagattagggaaggaatgttgctctctgaggatagagttgaggtagtaagaaatgcgttggtaatcattgactccttgaggttatgtcataaagctgatgaagtcttgatataattaatcttcatgcccagacactgatagcggatttcttttttgttgagatggagtctagctctgtcgcccaggctggagtgcagtggcacgatctcggctcactgtaacctctgcctcctgggttcaagtgattctctctcctcagcctcccaagtagctgggatcacagatgccctccgcaacagctggctaatttttgtatttttagtagagacaaggtttcgtcatgttggccaggctagtcttgaactcctgacctcaattgatccaccagccttggcctcccaaagtgctggggttacaggcatgagccaccacaccccgccttactctttattattttaaagtaaatcccatacatcttataactaaaatctggtttattgggggtagaacctagtagaacaatgctttagcaagagtcatgaatcaaaaaagagaaggcacaaataaaataatattagagataaaaaaggtacaatataggcttcaaaatacgtgaatacattgacacccttatgccaatagttttgaaaatttgaaacaaaggtataattttctaggaatatgtaaattaacaacttacccagtttacctaagaaaaaaataaaaatatttatttacattgattatccaaacattaaacatatgatctaaatgttaacatatgtaagataatcatttctggtacatatttatgtgctttaatcagtttcttagcctgtctgtcccatggtattgctgatatttttctgaaaaatatatttttaatacagtgttattttaatttttctcataaaaaattagctgtagccttgtttagagttgcattttatgctgaataaatttgaagttaaatcttcaattcttttcttttttttatttgtttgagtcagagtttcactcttgttgcccaggctggagtgcaatggcaccatctcggcccactgtaacctctgcctcccaggttcaagcaattctcctgcctcagcctcccaagtagctgggattacaggcatgcgccaccatgcctggataatttagtatttttagtagagatggggtttctccattgttggtcaggctggtctcgcctcccaaagtgctgggattacaggcgtgagccaccatgcctggcctagactataatattttttaatgagaaaaatgttaggttctaaggtacttggcaggctcagagcaaattctactagctgggagagtcataatttttaagaatttgttttaattgaaatgggtaaatacttcagcctcagtatttttataggttctgtctttttatctccattcagggtacacttcttcaataatagggtcttcactgtttttaaggacaaaattcatcaagttgtctatgattcttttggatgtttcacagattttaagcctactcttttatttcattctggcacagaacataaattaatacaattaaaaataggagttctatcaaaatattcttcccacaagtcaagatattccaaagtacagttacagaattttaaaatgaaatcattcaccatttcagcttttcatgtacaatttgttcaattcttatttgcttttgtagggataaatttcagtgtcttcctgtgcataagttttgttttcatgaattgcatttcactaaaagcttcaaaagcttaagtttaatgctttgattaaagatgtctgttttcaactaaatgcaactaagatttagaggacttgtttctaataataataataccattattacagtaggacacttaggttgttttacagagtcgctcgctcttcaaaggcttaaagattttaaaaacccaatcactccaagcagagggagaaagtatgtcctgcaatgctagtattttttgtgtatttaattaacatcggtttgtgcgctgctgaggtgggaggattgcttgaggccaggaggtctagtagtttttctgtatatcacattgatttgtgtgcagctgaggtgggaggattgcttgagcccaggtcaagcctgcagtgagccgtggtagggccactgcactccagcctgggcaacaaaaacagaaacaaaacatgtttttttcaaaaattctgttgttcagcaattctagatataaataaaatctgaaaatttgacaagtatggcttcttttttgttggtgtgttatcttgcagctcatttggatagaatcatgaattgtaattccaaattcaagtacttttgtgtttcacagatttcctaatatagtaagaacattgatttttctggctgggtgcagtggcttacgtctgtaattccagcactttggaaagctgaggtaggtgtatcacttgaggtcaagagttcgagaccaggctggccaacatggtgaaaccccatctctatgaaaatacgaaatttagccaggtgtgggtggtgcgtgcctgtaatactagctacttgggaggctgaggcaggagaatcacttgaacctgggaagtggaggttgcagtgacccgagatggtgccactgcactccagcctgagcaacagagcaaggccctgtttcaaaaagaaaaaaaaagaatattgatttttcctacagcactgtagaaaacaataaaattaatatgtagttatttgatacaataaaggataaaaccatttagaagaatgtttagactactctaaaagcacttctttcgcaggactgctgaacgctatttcctgccaaagtttgtatttgtattactgtaaaaattaagaattttatcattagtgttaaacttttcaaataaatttagatagaatccccactgatgtcagatatttcactttcagcagaatgaacttccagaagatttactttgtttccatgaactgaagagtaaactaaactattattggaattaatacgggcgattttctatttaaaactcctgatgacattgatataatacttttatcatttaactgtttgaaagttcttttgctgtctatggccataccaccctgaacgcacctgatctcatctgaaagttcttttgataatggagacaacccattaacagtcacttcactttttatgcttgcaccagaaaacttggaatgaaaaatgaacaaaattattttagaacaactgacatttcttttaatgctgcgctgtccaatacagtagctactagccacatgcagctatgtaggtttaaatcaattaaggttaacttcgttaaaaagtcagtttgtctgtcacattagccacatttcaattgctcagtaccaggtatagaccattttcatcacctcagaaagttgttttggagagcactgagttcttaggaagaatcatgcttcacaagatataaatcaccttctgcaggagtagaatcacagtttttaggcagccttctcaagataactactaacttgaatagatactgatgcttcttcgggacttctttctcttctaattttcttgtggttggtgttatcactatagtatgactgtagccccgtggtaaatgtcaacaaacattttattcaagttatattttcattatcaactttcctgagaagaagaaatttagtatttaatcttttattaaatatgtacttgatatacttttttagctcattaccactgaaagggttgtgttggttttcatttttttcccaaaatttcaaaagcatagcaatcaataaaattaatatgtagttagttatttgatacaataaaggacaaaaccatttagaaaaacattcagactactctaaaagctctttagaagattgcttaactctattttctgcctttatttcttattaattctactatatttcactataattttccattggtcccaccaactggcacctgtaactttgtacgtctcctccagtgcatctgctgatacaccaagaagcccatcggggctgggtgtggtggctcatgcctataatcccagcactttgagaggccgaggtgggtggatcacctgaggtcaggagttcaagaccagcctggccaacatggtggaaccccatctctactaaaaacacaaagattagctgggtgtggtggcgcacgcctgcagtcccagctacttgggaggctgaggcaggagaatcacttgaacccgggaggcagaggttgcagtgagctgtgatagcaccactgcacttcagcctgggcgacagagtgagactgtgtctcaaaaaaaaaaaaaaaaattccattggaacaaaaacgtgaaatacttctctcatcaccattgggactgaaagaagtagctatccctagggtcttacatctgaatccattccgttttttattgaatgcctcacatgttgtccccgaaaggatttgttagtcacattgcatcaggaaagggtaggaaaaggggagatagcttatcactagtcattttacagatttaaccatgtgttatgtgtgttatgttaccaaatgagaccatggcagaagctggaagtacaaagaagaggtctgccaaacccaccctagccttttttttttttttttttttttttttgagacagtgtcatgctgtttcccaggctacagtagtgcgatctcggctcactgcatcctctgcttcctgggttcaaatgattctcatgcctcagcctctggagtagctgggattacaggtgtgcacagcactatgtctgactaatgtttgtatttttagtagactcagggttttgccatgttggtcaggctccaccctagccaattttgatgcaactaatactaatatgttttaaagtgaaaattcctggacaatgccaggccagttggacacataaaccaggagtatctcaggcaaactgagacttatagtcctcctatctactctctatagaagggagcctaaccaccttactctggcattaaggttattctaaataggtgacctagacttcattttcctttttctttcctggcttgtctgctccaggtaaactcccccatgctgtattaactatattttttttcatgtggttttctctggaactgcccttgtcaccagtcttagcatatctagtcctgcttgttctttgacttcccagtgtaaataccatctttcttatgaatctttttgactttctcaggtgagaattaatctttttcttttgaacatccacagctctttatatagattttttttgctgtttattatatgttatttttgtattttattatgtacattatattttgtgtttttatttgcttttttgtatgtgtgtagatagggcacatactaaatgagtaaaagcatttggaagataagtttaaaacaagttatgatagatacagatggttatttgaaacacgtttggatagttgagctcatacatctattcatttattaattcaacaaacatttattaaggtttctgtcagagactgtttggtgctagggatacaatggtggacaaggaagatacggtccctattttattgttgcagattatatacccatctttcttacattcttacaaataaataattttatgctggccaagcatggtgactcatgtctgtaatcccttgactttgggaggtcaagacaggcagatcccttgagcccaggagctcaagaccagcctgggcaacgtagggacaccctgtctctacaaaaaataaattagccaggcatggtggcatgcgcctgtagtcccagcgacctggggagctgaagtggtttgatcacttgagcctgggaggcggagggtttagagagctataatcatgatactgcctaggcaacagaatgagactctgcctcaaaattttataattttatgccaaagaagaactagagtattaaactcatcttttattttatagaaggaaattagcactttatttttaaagtttaagtgtataaaatgagaaaaaatactggctaatgtcttcattttgtgaaaaagtggtaaatatagaagtagcattccaaaaaactaatgtatatgaaactaggtgacttttttttttccttgagatagagtcttgctctgttgcccaggctggagtgcagtggtgccgtcatggttcacttgcagccttgaccttccaggctcaagttatcttcctactgcagcctcccaagtagctggtactacaggtacacataaccatgcctggctaattttttaattttttgtagagactaggtctctctgtattatccaggctagtcttgaactcctggcctcaagcaatcctcccaccttgtactcccaaagtgctagcattataggcatgagacaccatgcccgatgactttaatttgtgtcttttcttcacagttttattgtgacttgtggaagtgatggtgatgtgaggatttgggaagacttggatgatgatgatcctaagttcattaatgttggagaaaaggcatattcatgtgctttgaaggtagtaaaaacagttatatcaattgatatgaaatgatactggcatgtgatttttatgcttgagtgaaaaaatatttttgaatatagatatacctttgtttatctcatgaaataatattttaaaatgtatgataatgccgtaacttgccctaccatttttttttgagatggggtgtgaaaaatatttttgaatatagatatacctttttttaatctcatgaaataatattttaaaatgcatgataatgccataacttgccccaccaattttttttttttttttttttttttgaaacgggatcttgccatgttgctcagaccggtctcaaactcctgggctcaagcagtcctcccagttcagcctcccgggcagctaggactgtaggtgcatgccaccatacctgaccaccccaaaatttgtggtttattaaaagtgattaatggacatgaatggtgaaccaattaaaataaatgcaggaaaataatacttccaagaaaggtttaaatgttcccttttttcctttaagggaaaactcagtggtgtttttagctcactgctatgatttgaatgtgttcccctaaaagcatgtgttggaaacttaatccccaacataacagtggtgggaggtggggtctactgagaagtaatgagaccatgagggctctggcctcatgattggattgatgccaccatctcaggagtgggttcatcataaaagggtgagtttgatcctcttgctctccctctcgccctctctttacctttccaagatgggatgatgcaataagaagacccttgccagatgccaacccctcaatcttgtagtgtccagccttcagaatcatgagacaataaatttctgttcattgtaaattacccagtctgtgggattcttatagcagtacagaacagactaaaacacctactgattcagataacttaaggaattgttctagaaaacgggaatgtttcattaactttcccaatatatattcatatgtgtttctgatgttttgtgtaacgcaaatatgggaatgagatgtaggttacttggagaaagaagacttattcagaaggactttggaaattaattatctataaacccctaagctttttatttgtgatgacttttaacttgagtgtattgtgtttaggtagaaaaatctttccacagaattcatattttttccaaacccaggcgcatttaaggtagataagatgatgtttagatattctttttaaaatgatcatatataattagaaaatgcgttcccagaagaaaaaatgtaaatgaccaacatacattaaatgtaagctaaatcttactagtaagcaaagaaatgcaaattttaaaattggattttttttccccataagattggcaaggatgaaaaatattgctaatcccagtaatagtgagggctttgagaagtaagtattatcatacatagtggctggatacataagtgagaaactttttttttttagagcaaattgataccgtgtattaaaattagaatgtacacagtcatttctggctattttcaagtttatgtggaaaaggatagtaaaagcacaattcataacaatagcaaatgtcggaaacaattgaagggtctttcaattgagaagttagtttataaattttggtggagccatataatggaatactatgcagccattataaaagtagggtatctattttcatcagaaaatatatttataataagttgaaaataagtttacaataagtaaaaaaaatgagattcagaacagttaatatagtgtaatcttatgtttgttaaaataaataaatacatatatatatacacacaaacacacacacgaatataacaaaattaagaagacttaaccccaaaatgttaatggagattaattcataaaataaggaactcaccctctgctcaggatacttttttttttttttttttttttttttgagacagagtttcactcttgttgcctaggctggagtgcaatggcgcagtctcagctcactgcaaccgccgcctcccgggttcaggtgattcttctccctcagcctcccaaacagctggctgcccaccaccatgcctggctaatttttttgtaattttagtagagatggggtttcaccatgttggctaggctggtctcgaactcctgacctcacgtgatccacccgccttggcctcccaaagtgctgggattacaggtgtgaaccaccacacccagccccaatactttcatattgtcatttttttctgttcagtgagcatgtactgcctttgtatatgaagaagactgtaaaggaggaaaaagtaaacatggtcttgtattagtttactaaggctgctgtaacaaattgccacaaagttggtggcttaaaacaacagaaaattatctcacagttcagaaggcaagaagtctgaaatcaaggtgtcgtcatggttggctcttcccaaggctctgagggagaatatgttccattcctgtcttctgggttctggtggtgtggcaatcctcaacattccttgccttgtaggtatatcactgcagtctctggcatggatgctgcatttagactttactctaaaaagacatgtgatgtgtcttttgttgtggaaacatagggcagtggccattgtggccgtgccttctgatgccttctcctcattttgagactagctctgttttctctgaaaagctctcttgagtctccttcctttttataacacttaggatccatagaagtactattcaaacatttttcttaccagaagtaaaagaaaaattagaggctaagagataggctgcttaaggtagaattaatttttctaaagctagcaaatttttcttgctaatgcacattccagcaaagttgtacatttagtgataatttttctcttgatatgaactagatttttaaggttttttgttttttaccggatttttaactatggagagactcccagtcatttggatttgttttgctaatgtttcttaccttaatttttcttttagagtggaaaactggtcactgcagtttctaataatactattcaagtccacacatttcctgaaggagttccagatggtatattgactcgcttcactacaaatgcaaaccatgtggtctttaatggggatggtactaaaattgctgctggatctaggtaaggctctttgacatcagaaaaggaaataatgttagaacaaaaggccttgtttatttgtttcagggtagtgttttcaggaccgtgacttaattttttgttgtttgttgtttcttcatatattcttttatctagtaaaggtttttgaggacaaacttgggcttctttttgaattgaaatatattgctttggccggttgtggtggctcacgcctgtaatcccagcactttgggaggccaaggcaggcagatcacctgagctcaggagttcaagaccagcctggccaacatggcaaaaccccgtctctactaatacaaaaaattagctgggtgtggtggcgggtgcctgtaatcccagctactcgggaagctgaggcaggagaatcacttgaacctaggaggcagaggttgcagtgagccaagatggtgccactgcattccagcctaggcgacagagtgagactctgtctcaaaaaaagaaaaaaaggaaagaaatatactgctctgcagatgggcagatggcctattttataatactgaaagcatagcttgatggaaaatttaaaaaaattattttagggctggcgtcgtggctcatgcctgtaatcccagccctttgggaggccaaggtgggcagatcacctgaggtcaggagttcaagaccagcctggccaacacagtgaaacctcgtctctattaaaaatacaaaaatgagctgggcatagtagcgggtgcctataatcccggctacttgggaggctgaggcaggagaattgcttgaacccgggagacagaggttgcgtgagctgagatcacgccattgcgttccagcctgggcaacaagagtgaaactctgtctcaaaaaaaaaaaaaaaattattttacttagaacttgggctgtacagtcagaatattttggagtttctcttgatgcttctttgtcataggaaaacaatatagttggttgaattgctgaggtgaagtgaaaggtatagtacttttaaaaatggttgtagctataattagattagcaaataatagaagcttaagatgtaactaaagaagccatttaggaagtgtttgtattttagcataatgggaaatcttgacttgtgttttcaacatatttatagagcaaaactaaaaggtaagccattaaatttgggtgccaaattttataagttgccataaagattttgtgattttaaaatacttggacaggcgtagtggctcatgcctgtaatcccagcactttgggaggctgaggtgggcggatcacaaggtcgggagttcaagaccagcctgaccaacatggtgaaaccccatctctactaaaaatacaaaaattagctgggcatggtggtgcacacctgtaatcccagctactcgggaggctgaggcaggagaatcgcttgaacctgggaggcggaggttgcagttgagatcgcaccactgcactccagcctgggtgacagagtgagactccgtctcaaaaagaaaaaaaaaaaaaaagaaatatttggatcatagcttttaggagaggcctttgtgttagcatttattcatttgcgttactctttttgttcttagtgattttctagtcaaaattgtggatgtgatggatagcagccaacagaaaacatttcgaggacatgatgcccctgttttaagtctttcctttgatcctaaggacatctttctggtaattattttttccttctctttttgtgtttttcctgaatatgtttaaaaatatatttcctactaactctctaaaaaattttctgctaactcaacttttcaacctttgttttattcagtaagagagttagcaggaaatttcacccagttgataaaagggctttttgatttaattaattgaaccactttccatgtagtattatggctatgactatagagaaatgtattgtttattcctgcaggcatcagctagttgtgatggatctgtcagagtgtggcaaatttcagatcaggtaaactcagcaatttaaatttaaagttttttgcccatttctgtaataaattgttatatgtcgtattactgggccaaattaataattgcttttctttggaatttgtttctttggtaccattaaatactgtttttgtgatcaaagtccacagtattctagtgccaaataaatacgttgaagactaattgcatttttacctaatcacaaggggaatgataatcttatatttaactttttaagttttgtaaatgaagggaataaattcagttattttatatttacaatgtaatgaccatgcgttgggccttgggttagatggttggggataaaaaattatgggtcacatttgatttggagagtcacatatacagtttattcaaatgcagcctaataaaggttttaaaggaggtacgaaataaggtgttctccagattggcagagggaacagttaagtctgcccaaggcaatccaagatggcttggcatttctagagagaatatgaatgtaattgactagagaaatatcctccacaaatatgccttaatatccacagttccttcccttcattcttgagctatttaaaagaagcgactttgacactttaacattttatagtagaccattgaagttttatttttgtagtcattctaagaatttcacgtattggggttttgtgtatgtgtgtatgattattcaatgagtatatcatttgtttattctgcacagaaaatactctagttatttaagatttgtactcatcatacctttgaaggacttaaagcagtttaggtatatcaggtattattataattaaggtgcattaagttgcatttttctgagatatatattgatttgaagaacctttaaatatattcagttctgcatatattttgggggggattttcataaaggaaagaaattttctttttttaccaattagacatgtgctattagttggccactgctacaaaaatgcaacgatgtgataaatgcaaaatcaatctgcagacttgcttggcagccaaaaagtgggaaggtaagtgattcttatttttcttttcttttcttttttttttttttttttattagagatggagtctcactctgtctcccatgctggagtgcagtggtgcaatctcggctcactgcaacctctgcctcccaggttctagcaattctcctgcctcagcctcccgagtagctgggattacaggtgcacactgccatgcccagctaattttttgtatttttagtagagaggaggtttcatcgtgttgcccaggctggtctcgaactcctgagctcaggcaatccacgcacctcagcctcacaaaatgctagtattacaggcgtgagccaccgtgcctggcatgattcttatttttaacctttgttttattcagtccttttcaactttgagtgtaaaaatagtttttttaattactttttaaaaatttggattataaattttagagtaccaagccaaataattagtattgaaatgctttaagaaacatttgaactttttcaagattcattttgaagtataaattttgcatgaatgaattaattttatatttttgttcacattcatgcttaatggaacaactctggagacagtcttattatgtccattctcaccattagtacctaacattttggaggtactaactgatacagttagacaacagaaagatatgagaaatttgaaaggaagaaagagaatgttcattatttgcaaaggaaatgtttgtatatgagtaaatcccaagaaaatcaactggggaagaaaatcattactactaataagaaaatttagtaaggtaactggaagcaaaattgtttgtatacaggattgttatacaaatacaggattgttatcctgtatacaaacaatagccatttagaaagcatgtaggaaaaataatgcatttacttttaaattgaaaaagatacagtaacaggttaaatgtacaagaaatgtgaaagatctatataaagaaacttttaacatgctaccaagagaagtaaaagaagacttggataaatagaaacatatattcttagaaaggaattatttgatataaataaagatgtcagttcttccctaaattaatctatagttttgataacattcacatataaaacaacagcctatgtgtggtggctcacacctataatcccagcactttgggaggctgaggcaggaggaccgcttgagctcaggagtttgacaccagcctgggcaacatagcaagacctcgtctccacaaaaaaatgaaaattagccaggtgtggtggcatattcctgtagtcccatctacttgggagactgaggcaggagtatcacttgagcccaggagattaaggctgcagtgggctatgatcttgtcactgtactccagcctaggcaacaaagcaaaaccctgccttaaaaataaaatgtctcatctgaaggctctaaggaaaaaaaaaagaaaacaaagtaaaataaagtaccaataagatgtctaggaggaccaaattgagctgattctaaagcccatgagggctttctgcactacccagagaaggatccttatgatgttgttctggattcccatcgtaacttaaagggaaactttcacaatgtctagaacctctatgtcctgcaaatgaaggaggaggatgtccttaagttccttgcaggaggaacccacttaggtagcaccagctttgtcttccagatgggacagtacatctataaaaggaaaagtgttggcatctacatcataaatctgaagaggacctgggagaagcttctcctgggagcttgtgccattgttgctgttgaaaactctttcaatgtcagtgtcatatcatccaggaatactggtccgaaggccatgctgaagtttgctgctgccactggagtcactccagttgctggctgcttcactcctggaactttcattaaccagatccaggcagccttttaggagccacagcttcttatggtgactaatcccagtgctgatcaccagcctctcacagaggcatcttatgttaacgtacctaccattgctctgtgtcacacagattttcctctgtgctatgtggacactaccatcccatgcaacagcaagggagctcactcagtgggattgatgtggtggatgccgatccaggaagttcgcatgtgtggcaccatttcctgtgggaggtcatgcctgatctctacttctacagtgttcctgaggagattgaaaaagaagagcagcctgctgctgaaaaggctgtgaccaaggaggaatttcagggtgaatggactactccagctcctgagttcggtgctcctcaacctgaggttgcagactggtctgatggtgtgcaggtgccctctgtgcctatttagcagttccctcctgaaaactggagtgctcagcctgccacagaagactggtctgcggctccccactgctcagaccactgaatgcataggaacaaccactgagtgatcttaagctgttcttgcacaggctcttaagcaacatggaaataaggttgatgaaaaataaacattgggtcgggctcgctggctcacgcccataatcccagcactttgggaggctgagacaggtggatcagttgaggccacgagttcaagaccagcctgggaaacatggcgaaaccctgtctctactaaaaatatagaaattagctgggcatggtggcacatgcctgtaatcccagctacttgggagtctcaggcataagaattgcttgaacccaggaggcggaggttgcagtgagccaagatcacaatactgcactctagctcaggtgatagagcgagactctatctcaaaaaaagaaaataaacattggttgctaaaaaaaaagggaaagtccatgtggaaaatgaaaagttttgaaaaagaaaagtgatgcaaataattcagttagataataaaacataaagttatgagaattataagtttgctattgagttatgaatagacacatacctgttaaagagataaatagaaccaaatgtatatggaaagttagtgtatataaaggtagagaaaaggagatttagcaaatgtattagcacaaggatatgaataccaggaagtggagtgggaatctttgaggaccatcttggaagcttgcttctacatgatgagtctatatataggtatttactatattattatttcaacttttctattcttttgaaatttttcaggaaataaaattaataaagtagattgtataaaaagtaaatagttttgcatggtacaaaatattagtcacagtacaaatgacaaactggggaagaaaatttgaaacaataaaacagagctaatttccatagtgtgcaaagtattcttacaaatcaatagaaacccattagaaagatgagcaaagacatgagcagacagtgtacataaaaaatatacagttggtagctgggcacagtggctcacgcctataatcccagcactttgggaggctgaggcgagtggatcccctgaggtcaggagttcgagaccagcctggccaacatgataagaccccgtctctactgaaaatacaaaaattagccaggcgtggtggtgtgcgcctgtagtcccagctgctcgggaggctgaggcaggagaattgcttgaacctgggaggcagaggttgcagtgagccaagatggcactacttctctccagcctgggcaactatatatatatagttcgtttttctttcttttttatacatatatacacaattggcttttaaaattattttttctttccttttttttgagacatggtctcactctgttgcccaggctggagtgcagtggcatgatcacgattcactgcaacctctgcctcccggactcagttcatcctcccacctcagcccccaacccgagtagctgggactagaggcacgcgcccacaatggctggctaatttttttattttttgtagagacagggtctcattatgttgctcaggctagtctcaaactcctgagctctagtgatctgcctgtctcagcctcccaaagtgctgagattataggcctgagctaccacacccagcccatgtgaacttttaacaatgtacattctagatttaagtgataattgagctcaaggaaatgtagtatgtattttttttctttgcttacaaaaaaacctaatttaaaaattttttaaaataaagtttttattatatgttactaatccttttttggataatcatggaaagaatacacagttttattttttctactaatcagtttcttcagaataatgcataagaagatacatttcttgtttttcaagatatttgaaggattctgtctttattttcctcaaacaaatgggaggaatttttatatcagaaggacctagattccttaagaagtagtattgaaggtcaggcatggtgtctcacgctgtaatctcagcactttgggaggctgaggcaggaggatcacttgaggccagagttcagtatcagcttgagcaacacagtgagaccccatctctacaaaaaaacaggaaaaaaattagttgggctgtagtcctagctatttgggaggctgaagcaggaggatcctttgaccccaggagtttgaggctcagtaagctgtgatcacaccactgcactccagcctgggtgacagagcaagactgtctcttgggggaaaaaaaagtaatcatatttaaagtactagtaattacaagttctccattttttgggtgcaagcaatagagtgatcacctttatttttttctcttcccatgacaaattatcacctattttttgcttattgaagttttaagtaatgttctgagtttcattagttgccaattaaaatacagatttgcgcctggcacagtggtgtatgcctgtagtcccagctacttaggaggctgagccaggaagatcccttgaacccaggagttagagaccaacctgggcaacatagtgagacaccgtctcttaaaaacagaaacaataaaaactaatttgcttttatgtcttgtaaatatatctgaatgaattttgtgcctttttccttcttcaaattcaatttaatgtaaacttttgtttacgttgtttatcttttctaatagttactggcaattcctgtggaaaaatctgttaagctatatagaagagaatcttggagtcatcaatttgatctttcagataatttcatctctcaggtaggttttacaaagtgacactttcagtgggctataaggagcagttaatgcgtagtttgcctgaatacagttgcagttaaatattattggaatggaaaacaactcctggctgttgtatgtggtccatcttctaacagctcatcctttcttcatttgatcaataactggatactaaataggtctttgttataagaagtcagatttaacccttgcatagtattagaacaagttgttctaaaatgatcagtagttagcctttattgttaagtgagtttcactgagacttgtgatcatggactctgaaattttagaggaagaaaggttgttggtctgttttctctgtctcttacatgcgtagatatttacagttaaggaaacataagcccagtaggtcagcaatggcttactaaagttcacttcacttactagttttcttcatcttgattgtgaatgctaagaggatgtcttgaattgtctctctttctaggataataacattttttaggttttgctttgaaaattgtgccagtggctgggcacagtggctcatgcctgtaatcccagcactttgagaggctgaggcaggaggattgcttgaggccaggaatccgaaaccaacttgggcaacaaaagaagactccatctctacaaaaaatactaaaaaattagccatgtgtggtggtgcatgcctgtagccctagctacctgggaggctgaggcaggaggattgcttgagcttcagagttgaaagttgcagtgagtaatgatggtgccactgcactgcagcctaggtggcagagcaagaccctgactctaaaaataaaataaaatggtgccagtataatttttttcatgataaagtaatagctggtagtgatacttgaatgttattgaaaagtgaggttagaaaataagcaaactttgtcttgtatcgaatataattagaaataatatagaacagggatataaaaatttgaatttggttgattcccctccaaattcttgaaaaaaaatgaaaagaaaattgaatttggtaataaaatgagtatttagtttgaaattttacaaaatcattatttattaactgtttttctttacagaccctcaatatagtaacctggtctccctgtgggcaatatttagctgcaggtagtattaatggtctaatcatagtttggaatgtggaaaccaaagactgcatggaaaggtatgatttagtgtatcttttgtctcttctttgctcatctctattagttttgtatttgttttattttgaaacatttcaaatttgccatcagattgtcagaatgaaagtataattaaatttatattatttataaattattgtcaaaagtcatttattctttcctaactaaaatttacctaaagaaatgtacaatttatatttttcttgacagtatttttagaacctactttttaatttttagggtgaaacatgagaaaggttatgcaatttgtggtctggcatggcatcctacttgtggtcgaatatcgtatactgatgcggaaggaaatctagggcttctagagaatgtttgtgaccccagtggaaagacatcaagcagtaaggtaaaagggagtatggtacaacagtttcttcaaaatgtttctgtgatcatatggatttggaagacaccacaaactgccttactttcttggaaaattacctttcatgttactatagtagatgctgagtagtaatctatagtaagaaaacttcttacttgttcaacctgatgtctcccaagtgtattttactaagaaacttttttctctccatataatgcctttccaaggaatacctttcattaaatactattttgtatcaggtctcagtttggcctgcaaactgtttctactctgaattagccttaactcttagaactacctatacacctcctctgcttagtcaaacagctttactgagcaactttaaacaggcaccttgttttataccttcttgcttttgttcattattcaccctgcctggcagatgtacctatttatattcaagtcttagtttagacttctggttacagattgcagacttaatacatgcatttatagctgtccctcctgaaacccccacaaaaactatactaaaggcattttcttaaatgcataatcccataaggttaaagaagtcagttgaagggatgattataaaaataattttgagctctgctgcagtgactcacacctgtaatcccaacactttgggaggattgcttgagcccaggagtttgagatcagcctgggcaacatggtgggaccccatctctacaaaaaattaaaaaataaaaattaggcaagtgtggtggtgtgtgcctgtagtttcatgctcctactcagaaggctgaggtgggaggatcactagagcccaggaggttgaggctacagcaagccgtgattgtgccactgcactccagcctggatgacagtgataccccatctaaaaaataaaaataaaaaagtggaggctagaaaatagaaggatgatgagaaactcacttcagcttctcaaaaagttgaattctaaaactgtagtttctggaagttgaggtgctactcagtttgcctcactgaatccccagagattcagaatttggtagcactaggtgcttctagaagtggggctgaaaacaggagaggtgatttaataagcacatagagtgttctagtctcaacatctgtgttcaaagctgggtacctgccctcccccatcttcacatgcattctggcagaatgttggagatttgtttttttagaaaagatgaaatagactgtccttggtctagggacactggttacagttgagtggtcttgggtaagggggaaatactgtactgaaaacagaggattaaatgaaagattagatacttgaatgttgaaatgatcatctcacttctagtaggttcccagaacattgtcagccattcttatgcatttcaggcaggagattggaaaaatcatctttggggaatttgtctaagagaaaagacgtaaagagagagtttcttaactccagggaagacaaaaagttgtaaaagaaaggaacagtgatcataatatactgtatgtgtaaaaagataggaataatgccaaccacttggggttattgggaggattaagtgaattatgtatagttagaacagtgtctagcacacttcataagtttggcatactttataagtgttggctattatttttattattcagccatgaatagcatttacatgatcttaataacctaaatactgtatattgattgaaccacaaggaggatatatctatctatattgggagaattggggtcggagagtagtgtacatgcaagcatggcggttggggtggttgtgaaagggtaccagatcctcatctgccatagatggaagttaataggatctgttaaacacaatgattaaaagtgaaaaaaaaaaattctactagaatatgatttacaggtatggaagaagtagcaaagaaacaactaaaagagctggaaggatttattctgtagagaagtaaattggggctgtggagaggactgttttcatagcacgccttgtaaaactgcctaactaatatatatgcatgtgtaacattggtaaaaacaaaaagtgaattaagaaaaaaaattttggctgggcacggtggctcacggctgtaatcccagcactttgggaggccgaggccggtggatcacctgaggtcaggagttcaagaccagcctggccaacatgacgaaaccccgtctctactaaaaatacaaaaattagctgggctaatttcacatctgtgaacattttatcgccttcatcataaatatgaggcacagtcctccattaaaaatttttttttttctttgaggcaaagtctccttctgttgcccaggctggagtgcaatggtggctccctgcaacctccgcctcctgggttgaagcgattctcctgcctcagcctcccaagtacctaggataacaggcacccaccaccacgccctgctaattttttgtatttttagtagagacagggtttcaccatgttagccaggctggtcttgaattcctgacctcaggtgatccacccaccgcagccccccaaagtgctagggttacagacatgggccaccgtgcctggcctccccattttttttttttgagacggagttccgctcttgttgcccaagctggagtgcaatggcgcgatctcggctcactgcaacctctgcttcccgggttcaagtgattctcctgcctcagcctcctgagtagctgggattacaggcttgtgcccccacgcctggctaatttttgcatttttagtagagacggggtttcactgtgttagccaggatggtctcgatctcctgacctcgtgatctgcccacctcggcctcccaaagtgctgggattacaggcatgagacaccatgcccggcctccccattttttttaattagaaaatccaaaaacaattttttgtcagcttgagtacacaaacttttaggactataaatggaatggttgaatatcttcttatagcacttagttattaatttactcatatcaagtatttttcaatgtatggatttagaaacactttttcatctcattttattaaacatcagttttcagagcacagttatgtttacttccatttaaaaggtttatgagggtctgggtacggtggctaacgcctacaatcccagaacttttggaggccgaggtgggtttatcacctgaggtcaggagttcaagaatagcctggccaacatggggaaaccccgtctctactgaaaatacaaaaattagccaggtgtggttgtgtaggcctgtaaacccaggtactcaggaagctgaggcaggaaaatcacttgagcctgggagatgaagtttgcagtgagccaagatcacgccactgcactccagcctgggtgacagggtgagactctgtgtcaaaaaaaaaaaaaaaaaaaaaaaaggctgggcgctgtggctcacgcctgtaatcccagcactttgggagtctgaggcgggtggatcacgaggtcaagagatcaagaccatcctggccaacatggtgaaaccccatctctactaaaaatacaaaaattagctgggcatggtggcatgcgcctgtagtcccagctacttgggagactgaggcaggagaatcgcttgaacccgggaggcggaggttgcagtgagccgagatcacgccactgcactccagcctggcgacagagcgagactccactctgtcaaaaaataaataaatgaaaataaaaagtttatgatgtaatactttttaatctgttaatggtgttctcattagacttataccaaactataaatttccattggcttaacatttgtagtttttatgcatcctataggagtaacttgggatctttgcagtgtatctgcttaccatttcactttttgaaatgatctaaaaatttatttattttgagacagggtctcactctgtcacccaggctggagtgcagtggtgagatcatggctcactgcagccctgaccttccaggttcaggtgaccctcctacctcagcctcgcaggtagctgggactatagacacatgccaccatgcctggctaattttttgtggagatgaggtttcatcatgttgtccaggctggtctcgaactcctgagctcaaggcatccacctgcttcggcttcccaaagtgctgagattacaggtgtgagccaccatgctggggctttatgtagaatttctttgccttctttgtttttctattggttctatcactttatttttataagtatcaaaacactaactttaactgagataatataaagaaaatgtatcttatgcagtattttgttcaaaataaaagtaaatgagagactgtcttacaatatgacagactttatagggactttatcatattaatatcacttcttttctagggaatgacttctgaggaataaaatcttattttatattttggcatatacagtatttgtttacatgtcagtccctatactcccatcccatccccagactacaaggcatttgaaataaggactgggtcttattgtgtaaatataaatacaattctcataaatacatttactaattattcttatctgttcagtgagtttgctgcttggtagaatttataggtgcatattaaaagtttacctttttagtaattgagtttttctaaatcattcacttttactttataatttgtattaatttgttcaaggtatctagcagagtggaaaaggattataatgatctttttgatggagatgatatgagtaatgctggtgattttctaaatgacaatgcagttgagatcccttctttttcaaaagggattataaatgatgatgaggatgatgaagacctcatgatggcttcaggtcgtcctagacagcgaagtcacatcctagaagatgatgaaaactcagttggtaagaatttgactttgtgcatgtgattaccctgttgattaatattttagattttttattaacactattaaagtcattattgaatttgtagaatgtagctaagtggtgcttagaggaaattttatagcattaaatgactttgttaaaaaaggtttcaaatctataatccaagcttctgctatggcagactagaaaaagagaaaactaaaccccaagcaaatggaaggaaataatacagagcaaaattcaataaaattgacaacagaaaacctatagagaaagtcaatgagaccaaaagctggttctttgacaagatcaataaggccgggcacggtggctcacgtctataatcccagcactttgggaggctgaaatgggcagatcacttgaggtcaggagttcaagaccagcctggccaacatggtaaaaccctgtctctacaaaaatacaaaaattagctgggtgtggtggcacgtgcctgtaatcccagctactcaggagactgaggcaggaaactcacttgaacccaggaggtggaggttgcagtgagccgagatcgcgtcaactgcatgccagcatgggcaacagagcaagactccatctccaaagaaaagaaaagatcaataaaattaataaatatctatcgtggttgatcaataaagagaagacacaaattactaacatagagaatgaaagagaggtgggccatcactatagatctgtagatttgtgctatccaatatatagtagccactagccacatgtagctgttgagcacttgaaatgtggttagttcaaactgagatatgttatgagtgcaaccggattttttttttttttttgaggcggagtctcactctgtcacccaggctggagtgcggtggtgtgattttggctcactgcaacctccgcctcctggattcaagtgattcttgtgcctcagcctcctgagtagctgggattacaggcatgcgccaccacgcctggctaatttttgtatttttagtagagatggggtttcaccatggagtgcaaccagattttgaagacaatatgaaaaaaagaatgtaaaaatcttgggaaattttttatattgagtacatgttgaaatgataatatgtattttaaatgcactatattattaagattatggctgtttctttttactctttaaactttagaaatattagaaaatttaaaattacagctgtaactcacattatatgtctgtatggcagtgctact

SEQ ID NO: 147 - DNA, 32744 bp, Homo sapiens
  source 1..32744: mol_type = other DNA
agcaaaccaatcgcaagcctcgttgagtggaaggggtgggatcttccccggaagtgttggttaaagcccctccaatcagcggctcggtgcggcaagtttgaatttcgtggaggctcgggttgtgagggttcctgcttcggagtcggcggtggtcgtccagaccgagtgttctttactttttgtttggttgaggtttcacgctagaaggtggctcaggtaggtgggtgctggagagctggacggagaacactggcccgcttccgttgaaggtctagaagggtctgaggaccgggggctgcgagcgggagcaagtcagaggcaggctcctttaggaccgtgttacctgcccttcccgaagctgataatgcgagcctttagaagagtccatatgtttgccctgacctctgtaatagtcagcgtttcaccaccggggcgtaattgacctttggggtgaaactgttcttcactagctccgacattaaattcccgtagctcttcccaggtcccatggcaactaaaaacgcccggttgagaacctctagtcaagcaagattaacgcattctggactttcaagctggaggaaacgccactcagccaaacaaaatttaggtgtgtgtggagccagggctgccttgcttgggatcccagcttcaccaccttttagatatgctaatgtgagcagttaattgacctcatctgtatgagagcgataatagttaactacctttcagggttattctgataattgtacctttaatgttgtcctcgctcgctctttctcttgctgtggatagtgctatcctgtatttaatacataagtcttaatttttcttcaatctttagcgaattaatattgcaggagataaatagtagaagacagttctttatgaaaagcacagtccattgtcactttccttgggtcttagaggagaatgttattagcatgcaggtcagacagattctcgttttttatattttgttgattgcttagaatcatgtaacaatgtattgcattacttgtgccaatttttctattatctggagttttctagtggatttagttaattcttgttgaagaatataccatagtgtgtctatcacagagcctcccccttacctttttttgtttttgttttttaactgccaagacttctgagaatcagtatcctttctccagtttggcttggtagttctctataccagctacacaggtgaccccctcaaactttctaattttctttgttctccctagttggatctactgacgtcgtctttattgtcctcttttgttttgcttgaatacattctcaaagatctttccaagaaaaaggcatgtgccaattaaactatatgattttgtgcgtgtgtgtgtgtgtgtgtgtgtgtgtatggcttttcttttttaaaatttatagagacggggtcgtgttatgttgcccaggctggtctcaaactcctgggctcaagcagtcctgcctcgacctcccaaagtggtaggattacaggcctaagccaccgtgccggcctaaactgtatgatttcttgtatggatgaaaataatggagcaaactgatagggttattgtgaactatatatttggtcttgttctgttttctggcaaacaactactaaaatccttggagtcttcaaagtggtacctttttgtatgctaatgattgactgatagctggatgcctctaaatagcttcaggattggggctggtcactagacagaccaaggcaggatttctcgagagttggcattttcagccccacctcacaacctctggggaggggagaggagctgaaggttgacttgatcaccagtggtcaatgatttaatcactcatgcttatgtaatgaagctgccataaaaaccaaaaaaaaacacctgtgtttggagagcttcttaggtgaatacatgaaggttcctaaacagtggtgctacctgagagagcatggaagctccttgttcctttccacatactttgccctgtgcctctctatccaactctatctgtatccggttgcctattgattatccctatatgactaataggtacctggtgtggggtttttgtttgtttttggttttcttttggctttagaagaaatgttagactacctgcattcctcatcatgggtaaggaaacccttgtgtacatggtccttcacttaacctattttcacctttatttcacgcttttctttttgcagtgttctctgtggtaagcccagagcctcttttattctggactatcacttactggctttctcttcactggtcaagcaagttcctatttaaaacccccaaataggtagcttcttattctctgataatcttcttctcacttttcagtgttacatatttatttcattgcacattttatatttttatttcagaaggccctgaagtgggacaggaaatgaactgtaatcttaattttttaaataatgaaaattcatgtaagttgggttttgtccttttccttgacaggatgtcttcatcacattttgccagtcgacacaggaaggatataagtactgaaatgattagaactaaaattgctcataggaaatcactgtctcagaaagaaaatagacataaggaatacgaacgaaatagacactttggtttgaaagatgtaaacattccaaccttggaaggtagaattcttgttgaattagatgagacatctcaagggcttgttccagaaaagaccaatgttaagccaagtaagtaaaggtctgttgtaattttaagtactttgaagagtgaataatagttggtttaatgcctgtgtgagtaaaaaactctggccagaagagttttgaaataccattctataaataactttcctttttggtctttttccttttttttttttttttttttttaaattacaagagacagggtctcactgtgtcacccaggcgggagtgcagtggtgtgctcactgtaacctcaaattcctgggctcaaggaattatcttgcctcagcctcccaaagtgtggggattacaggtgtgagccaccgcgcctggccccttaataacctgttatctacaactaactactgtctttaaggcaaaagcctttacctgtggagtattataacactttattatctatattgcttcatagaaatcctaaagttcttacggagcttgggtaggataagtgttgacaagataaattgataagaaatgtaaaaatagaataattaaagaatccatgaaatgagagtactttgtcaatggaaacattagtaagaaaagagcaaagaattcatccttgcagtttgcccagaaggattgggaccattaggatggaaagaaccaactaaagaagaaaggaataatctcagaaaaagatgaaaatagagcatcttagaaggcaaaggatgctacagaaaagagaaagcaaactgagaaatgacttgtgtttagtcaggagtcaccctactcctatttgttgtgttcatatagcaggcgttaggagctagatggcattgaaataatgctaggataaatagggaatggcagaaagaaccaaacattttttatctgagaaagggtggttcctttctcatcttgtcctctcaaatgctccatttcttaaccaaaaatctttcaaattaaagtctaactatctcagtatgctattaaaatatcctttatttcccgtttgcaaaggcttagaggtaggagtgtgcctgatatgttttagtgaatgcaagtaggtaactgggtagaaaagaatgagcaagggagatagattacatagaatcctaaggaccatcattataaggacattggcttttactctgaaatgagaggccattaatgggtgtttatgtaatctgattcatgttttaaaaggatcgctttggagtcaggcctgtagccctagctactccagaggctgaggcaggaaatcttgagctcaggagtttgaagcttcagtgtgctacaatggtgcctgtgaaaagtcactgcactctggcctcggccacacatggagatcctgtctcctaaaaaaaaaaaaaagaaaaggatcaggtcgggcacagtggctcatgcctgtaatcccagcactttgggaggccaaggcgggtggatggcgaggtcaagagttcgaaaccagcctgaccaacatggtgaaaccccatctctactaaaaataaaaaaattagctgggtgtggtgacacacacctgtaatcccacctactcaggaggccgaggcaggagaatcgcttgaacccaggaggtggacgttgcagttagctgagatcacgctattgtactccagcctgggcaacagagcgagactccatctcaaaaaaaaaaaaaaaaaaggatcactttggctgctgtgttgagaatagattatagggtggtatgtatgacatcagggagagcagtaagtagactactgcaataacttagttgatactaaagtattaaaagacaaggggccagatgcggtggctcatacctataatcccagtaccccaggctaaggtgagtggatcacgaggtcaagagatcaagaccattctggccaacatggtgaaaccccatctctactaaaaatacaaaaatcagctgggtgtggcgcgtgcctgtagtcccagctacttgggcggctgaggcaggagaatcacctgaacccaggaggtggaggttgcagtgagccaatcacaccactgcactccagcctgggcaacaaagtgagactccgtctcaaaaaaaagacaagggaaaactagtaaagaaccaaggaacaatgcaaagtaatgtaagaggataaccagaagaacgtgctatcctagaaaccgagtagaaaagtgcatatcgaggagagactgattaactatgttagtcagtactgcttgttagatcaagtataatagaggtgagaatttggacttcaccactgtggaggtcactggtgatcttgaatagttttggtggagtgaggttcagggagtgaaagattggaatggatgagtataatcaaacccttagatataatttgtagtctgtagaaaacatggagcctggaggaatgagtaaataaacaaatacagcttgcaaagacattcaataggaaaactgactaccttttgtcagtaagacaatggcatgaaaagaagagtggggaggaggatctgttttagatgaagagatttaaaaagacattcaaataaaacgtgttgctcttacttggttcttgatttaagtaaacagatggtttaaaagacctctttgaaacaaatagagacgtttaaatctggaccctgtaatagataacaaggaattactgctgattttgttaagtgtgatgatgatatcgtggctatgaaaggaaatgtctttattttattttatttttattttttgagacggagttttgctcttcttgcccaggctggagtgcaatggcacgatctcggctcaccgcaacctctgcctcccgggttcaagtgattctcctgcctcagccttcctgagtagctgggattacaggcatgcaccaccacgcctggctaattttgtatttttagtagagacagggtttctccatgttggtcaggctggtctcaaactcccaacctcagatgaaccgcccacctcagtctcccaaagtgctaggagtacaggcgtgagctatcgcacccttccagaaatgtctttattttttagaagtatatactaaagtatttagagatgaaatcttctaagcataatttgttttaaacaactgcagcaaaatgttcataattattgaatcttggtaataggtatatggggttcattataattgtgtgtatattagaagtttttcataattttgaaaagagagggaatgtaaagagtgttggaaataggctgggcttggtggctcacacctgtaattccagcactttgggatgccaaggtgggtggatcacctgaggtcaggagttcaagaccagcctgtccaacatggtgaaaccccatctctactcaaaatacaaaaattagccaggcgcagtggcgcatgcctgtaatcctagctactagggaggctgaggcagaattgcttgaactcaggaggtggaggttgcagtgagccaagattgcgccactgcactccaacctgggcgacagagtgagactctgtctcaaaaaaggccaggcgtggtggctcacacctgtactcccagcactttgggaggccgaggtgggtgaatcatgaggtcaggagttcgagaccaccctggccaaaatggtgaaactccgtctctactaaaaatgcaaaaaattagctgggcatggtggtgggcgcctgtaatcccagctactcgggaggctgaggcagtagaatcgcttgaacccgggaggccgaggatgcattgagccgagatcacgccgctgcattccagccaaggcgacagtgcgagactctgcctcaaataaataaataaataaaagtgttgatagtagagatacaggtaactctcttgaagaattttgccttaaatgggactagaaaaataagtgctagatgaggatgtaggttgggagaaattaccgcatgcttgtaacttcataatggcaacaattcagtagaggaaaaaatagatgagtaagaggataagttgctggaagaatgtccttgagtaggtgagaagaaatagagtacatctattataataaatagcacctataattgtattagttatcccaaaacttagcagcttaaaacaataaatattgattatttcatacaatttttgtgggtcaggaacttgggtatggctgagctgggtgattctgaagatagcagccaagatgtcatccagagatatatctgaagccttaactgagactggaggatctgcctccaagatgactgactcacatgaacagcaagttgatgctggcttttggaaggaggctgtagttctttgtcatgtggacatctccataggactgcttgagtcttcttaaggccccacatggcacctggcttctcccagagcaagcgacgcttcaagagagagcaaggcaaacactaccctagttttagaagtcatattccattattcctgtaatactctcttggtcacacaagtcagccctattcagtgtgaggggatgacacagggcaagactaccaggaagtgaggatcagtagagggcagcttggatgctggctatcatacaagttaattaatttaaaagtgaagtaataaatgcctattacatagcaagcagttaatatttgaacacatgaaggcaaaatgaatacaaattttaaaagactaggggttgaaataacttgtggttagagtgctaaagaattaacaagaaatattaaaagcatttccctttgtgcggagaggtcttgctttgttactcaagctgaacttgaactcctgggctcaaatgatccttccacctcagccttcccagtagatgggactacaggtgtgttactgtgcctggcttattgaaagcctttttttttttcttgagacggagtcttgctctgttgcttaggctggagtgcaggggcgcaatcttggctcactgcaacctccatctcctgggttcaagcaattctcctacctcaacctcccgaatagctgggattacaggtgaccgccaccacacccagctaatttttgaatttttagtagagatgggatttcaccacgttggccaggctggtctcaaactcctgacctcagatgatccgccctcctcagcctcccaaagtgctgggattacaggcgtgagccaccgtgcctggcctgaaagcattttttagcagcagttgaaatgacacaaaaataattgtttatacatttgcataacttttcatctgaaatgttttatatactgtgtggttttggttttttttctgcctaggggcaatgaaaactattctaggtgatcaacgaaaacagatgctccaaaaatacaaagaagaaaagcaacttcaaaaattgaaagagcagagagagaaagctaaacgaggaatatttaaagtgggtcgttatagacctgatatgccttgttttcttttatcaaaccagaatgctgtgaaagctgagccaaaaaaggtaaatttagtgtcttaatataaaggaatagtttcttttatttggtattttcttcaagacattaagtgactaacccctttcccttagtctcattattaactggttggtagaaggtgggaatgacataatagtagctcagaagaatgaaaatcaggtctcttaagatagctgtaggtaagttgagataggataaaactaggaaaattggtagaatcaggctgaacaatgttatgcaaaggatttggtgtttatcctgtaggttttgcagaatcaggagaagtttataaataagggtagtgccgttgtcaaattaataattcaggaaaataccatagccctaaagattttagtctggaaagggaagcatttatagatagggagaccaattgtgagactattgtaatagaatagatggaaaggggcagtgggttttaaaaggaaaaaataggtgtaagacatctaaataaaggcatttgacaggactggtggccaagtagatggtgaggggtaaaggaaattgaaaaagcagagagaagctctgctgctaaaagagataaggaagataaggaacaagcttaagtgggtgcatgttaataacctttttaaaaatcttaaacttgtgtgggccacctagatattagtaaaaatttggaaagaaggatggaaattggtgctaagatgtcgatttaggatataatattgggaatatggatgagtgtttaagctgtaggactaaatgagaccattccaataaggatatataaaattatgaaaaagtgggctctagagagcacttttaggtaggcagaagccaggtaccaggctgaggactggtcagagaggcaggagaactaagagaggatagaagctcatattaatgatgattccaatacctggaaaatacggtttgaaatttctttctcactgagaaatgtgagtaatttttgaagttactaacttaatttaaatcaagctagaaccagaaaaaggaatttaagtatctttttgctataagagattaaggataaaatttaactttaaaatgggaactttattttgtaataagatatggaagtaaacctttaccagttcatattttaagttcatcttcttttgactgttctaaggctattccatcttctgtacggattacaaggtcaaaggccaaagaccaaatggagcagactaaggtatagttgatagtagataattgttactaaaatgataaattgcacttttttagtaagtaaattcattttaaatctagtatcagattcaaacataatgattaatttactagagttaacaggtaccaaagtcactgtttttagtatggtgatgtagagcaatttcacttaaaatatttgctccaacattccgtatgagatccatggcaaactgtctttgtgtcacactcttgttttgtttagtgggctcctattatgcattccaagttacctgcatgaaatgcatatggggaggaaagcacacagggtaggtgttataaacttacgggtcttcaaaatactgtaatagagatatcaggagggttactaaaacaaagtgaagtgggcaagaagggaaataatatgcctctttatcaggtgaggaagctaagttccacgtatgcatatatattttgcattgctatgatgttcctggtgttgtaggcttttggatataataaactaaattctctttgtggaacttacatgtaaggcatttaaaaaaatacataatatgccagaagatgataagtattatggaagagattttaaaaaggggagatggggtgtactagaaataggtatggggtagaattttgattgggcagttaaggaaggcctccctgagatgaaagccttttgagtgaagtcattatggaagtggagaagagaaccatgggaaagcgctttttatccaggagaagtattttctaggcaaaattaaaaggtcttgaagtgaaagtatgtctaggagtgtttaaggaccttcagaaggcaagttatagtgagctgtttttaatagcttgggttattagcattttccaaattctgtgattgtgaaaaaggatgtaagcttttttggaagcttaatggaaagcttttctttatctcattttatttggggtagttttttgttgttgttgttgggtcatttacgatgatcagatttcatatgaggaatcaatttacagattaaaaatatgatggtctgattcattatgcaattaaatcacatagcacctaatctcttaaatagattgataacgagagtgatgttcgagcaatccgacctggtccaagacaaacttctgaaaagaaagtgtcagacaaagagaaaaaaggtaggaatattagcaattactataaatcctctgaggctaccacagccataattttttttaagtgtcttgaaggtcaactggaatttgttcgtttgtttgtgacagagtcttgctctgttgcccaggttggagtgcagtggcacaatcatagctcactggagcctccacctcctgggctcaagtgatcctcccacctcagcctcctgagtagctgcaactacagacttgccaccatgcccagctgatttttatattttttgtagagacggggtctcactatgttgcctaggctggtttcgaactcctgggctgaagtaatcctcctgcctcccaagtagctgggactacaggcattgcactaccatgcctggcttcacagcaataatttcataactacaagggacatttgatgtagttatttttttttcccacagttgtgcagcctgtaatgcccacgtcgttgagaatgactcgatcagctactcaagcagcaaagcaggttcccagaacagtctcatctaccacagcaagaaagccagtcacaagagctgctaatggtgagaactattccttgatcagtgactgaactagaatgtttggtccttgaggtttttgtgttccgtttcaaaaatcaacaagtacttctttgagtaggagagaaggaaacaggaaattctaatacctgaaaatagattctgtgccctgacatctggttagcacacaatgggtgcccaatcattgaagaccttaattagtataagcagtgtttcaaagtgaaaaattaatggtccgagtaaatcacagttcatttatttggtgcaatacaacgtagccattaagaataatattattaaagaacacttaatgacatggttcatgatatattaagtgggcaaagaaaagcaggtcaaactctgaacagtaggatcgcagttctaaaaagcattatgggaatatgtggacataggactggaaaaccataccctgaagtgacagctgagtaatggaatcctgggtgatttgtcattattgttctttgtagttttctgttatttttctaattgtctgtaataaatatgtacaggctgagcaaccctaatcaaaacatccaaaattctgagcattgacatgaagttcaaaggtcatcctcaaaggaaatgctcttggagcatttcagattttagatatttgtatcaagtatgctgaacctgtaagtataatgtaaatattccaaaatctggaatctaaaatatctctggtcccaagcattttggataagggatactcaatctgtatttggtattcagatgaaaagggtaaaacactctggttttgaaaagagatggtttgtatttggcaggaaattccataaccctttttataatatggcttttaataaaaaaatccttcaagacatatattcctactgttgcttcttttcctttcccaagttacctagtattttcatgtagcatttctatctagtaaaataaatattttattgttgttttagaaaacgaaccagaaggaaaggtgccaagtaaaggaagacctgccaaaaatgtagaaacaaaacccgacaaggtagagaataaacatctttttaattctagatgctttgaaaatctcattgctactttcataaagttgaaattaaacataaagaactgcttcaaaaggttaacctacatgtgtgttaaaacttcctgaaccataagaaagcatcaagaggatttactcttgttatttttcaggtatcttattttcagagctttataggtagagaaagcataattttgttagaagatggagaaaaataataaaaacacagctgagagaaacctgtatgtgggaattagccaagacatagggtgaagtggggtgaaatgcattgactttggattcatttaggcctgggtttgaatactctctctgcttccaattagttgcataaccctgggcaagttatgtagtttatgagcttcttttcttattcctaacatggaatacctgcatagagtagttgtaagaattaaataaactaaaatttctgcctgcatctagcatggtttctaataaggtcttcaaaaaagatgccccatttgaggacccaaccccttggcctataatctatgatatagtttattttcttttattttattttttgagacagagtctcactctgtcgcccaggctcgagtgcaatggcgcgatcttggctcactgcaccttccgctccccgggttcaagtgattctcctgcctcagcctcccgagtagttgggattacagacgtgcaccaccacgcccatctgatttttgtatttttagtagagacgaggtttcaccatgttggccaggctggtcttgaactcccgacctcaggtgatccacctacttcggcctcccaaagtgctgggattacaggcgtgagccaccacgcctggccagtataatttcttaatttaaaaaaagtaccaaagattaagtaacctggctagattcttagtaaaaaatcaaacacagatcaagaaaggaaacacacagtgaatcttcacagataaagcagctggaccttataggtccccccttaagattaacccttaaggattatcactagtttttgctttgactgccatgctggcttcaacagtgttaccacttaaactcttgtccaggttgaaatacctgggtttgagttcatatcttattaaaaatcagaaacctggaaacctctagaaattatttaaataccaagtaacaaattgacttgaaatagtaaatatgctttgtattttatatggttaatcttttgtgtcacattgaaagtattgctcttgtgttaaggttatttataatctaaggttatttaacttaagaatttggtccttaatgatagtcattccataatgttagatttctgattttaaaccattgtaattatcaacataattttttttttgagacagagtctcgctctgtcgcccaggctgaagtgcagtgacacgatctcggctcactgcaagctccacctcccggtttctcaccattctcctgcctcagcctcccaagtagctgggactataggcgcctgccaccacgccccaataattttttgtatttttagcaaagacggggttttgctgtgttagccaggatggtctcgatctcccgaccttgtgatccgcccgcctcagcctcccaaagtgctgggattacaggcatgagccaccgtgcctggccgtaattatcaacataatttaagtaaaaagatacgtatttgttgaataagtttttccatattaattttccattatcttttaatttgttgtaatacccaaaaggtattagttagtctttaaataagaattggttcggggtgggtgcggtggctcccgcctgtaatcccagcactttgggaggcctaggcgggcggatgacgaggtcaggagattgagaccatcctggctaacacagcgaaaccccgtctccactaaaaatacaaaaaattagccgggcgtggtggcgggcgtctgtagtcccagctacttgggaggctgaggcaggagaatggcgtgaacccgggaggcggagcttgcagggagccgagatcgcgcgactgcactccagcctgggcgacggagggctactccgtatcaaaaaaaaaaaaaagattctattcccgggtaatagcaatggatttagcgtaactggtcttctgattccatgtatacacttaattgtatctgtttttgtctctcaaattatgtacatagaacatatatttctgttgtcatattttcagacctataaaaattggttgaatatatcctcagaagagagaaatcttactctactttgttaactcacatcctagggtatttcttgtaaagtcgatagtgaagaaaatactttgaattcacaaactaatgcaacaagtggaatgaatccagatggagtcttatcaaaaatggaaaacttacctgagataaatactgcaaaaataaaagggaagaattcctttgcacctaaggattttatgtttcagccactggatggtctgaagacctatcaagtaacacctatgactcccagaagtgccaatgcttttttgacacccagttacacctggactcctttaaaaacagaagtgtaagaatatgatcttaataataagtctcttgctaagatgggtaataaatgcctttcttttttttttttttttttttttttttttcagacggagttcgctctgtcgcccaggctggagtgcagtggcgtgatctcccctcactgtaagctccgccacccgggttcacgccattcttctgcctcagcctctcaagtagctgggactacaggcgcccgtcaccacgcccggctaattttttgtatctttagtagagacggggtttcaccatgttagccaggatggtctcgatctcctgacctcgtgatccgcccgcctcggcctcccaaagtgctgggattacaggcgtgagccaccgcgcccggccaaatgtctttcttatatttggtctatgctcttaaaaagttattattagtgaactgtgttaattaggaatcatgcaatttttttctttaaaaaaaattcttcagaaggtacaataatgtaattgacagtttttatatttcctatgcattgttattttcactatacaatttgggttttttgtttttaataaatgacttaattataacacatacatttttcaaaagaagaaaattgctatactgctttagctcagatacgactttttcctcattttcttctggcttagtatttagaaaaactggccctgaagacaaaaatgattaatttgcaaaacaagggaaaaatcagttggaacctttaaaagaaaaggcaagatcattttgcaaagactggctggcagcaaatatactaaaaactgctcagcagcatctaagactgttaagtgtttatgttccattaagaaatcttcaaaatctttgaatctgattacaattaattagtaaaaatggacattcacactataggtgtttacattttctcccctccagaatacacattttaaaaaaatagaaacatttctattttagcccagatctacaagtgacacaattttgaaaccctttatattagatatatggagttcatgtttcatgaagtatatttttgctattgtttttagtgatgagtctcaagcaacaaaagaaattttggcacaaaaatgtaaaacttactctaccaagacaatacagcaagattcaaataaattgccatgtcctttgggtcctctaactgtttggcatgaaggtatagtatttaattaatttattcattttttagaataatgttaatacaaaaaatattttgctttcaggtatagtaattacatttttacttttctggattattacttgtcagatttgtttggagctctttttcaccatatcatttggggatgtgaactcagggtcagaaaagacgggaaagcatgggtaaagatatctgaagagaatattggaatgaagaatacagacagaagaggggaaataaatgtaaatttaaagaaaaaatattgagagctactttagaggaaatgtgaagtgattgaggcagaaataaaattttaaaattaaacattgaaaaggatttttaaaatgtctttttaggggctgtcattttaggaattgttgctttgaaatttatatgtaagattttctttaatttatagaacatgttttaaataaaaatgaagctactactaaaaatttaaatggccttccaataaaagaagtcccatcacttgaaagaaatgaaggtcgaattgctcagccccaccatggtgtgccatatttcaggtatgtctgtgtgtttctagtgtaagaattttgtattaatatctagacatttaaaaccaaaactaaaaatttttaaccttaatatagtgggggaaaactggtgttaggtgattttcacgtttaaattttaattatttttttgataactagtacattcatgtggttcctaattcaaagggtaggaaaaggtacaagtgagaagacttcttctcagcactgtgacccaaccacatagtttgaacctttcatgaaggcaagtgttactcatttcttgtgaatacttccatggatagttcatgcatatgtagacaaatataacatgtacatttttttcttttttaaaaaatatggacaataggctgggcgcggtggctcacgcctgtaatcccagcactttgggaggccgaggtgggtggatcacaaggtcaagaaatcgagaccatcctgtctaacatggtgaaaccccatctctactaaaactgtaaaaattatccgggcgtggtggtgcacgcctgtagtcccagctactcatgaggctaaggcaggagaattgcttgaacctgggaggcggaggttgcagttagccaagattgcaccactgcactccagcctggcaacagagtgagactccatctcaaaatatatatatatctatatacatatatatatcggggaatctgccctgatattcacgtaggttcttttctgttttccttaagcattggccagcttgagaagtaaagggacagagtacaaaaagaaattttaaagctgggcatccgggggagacatcacatgtcggtaggttccgtgatgccccacaagctgcaaaaaccagcaagtttttattagggattttcaaaaggggagggagtgtgcgaataggtgtgggtcacagacatcaagtactttacaaggtaatagaatatcacaaggcaagtggaggcagggtgagatcacgggaccagggcgaaattaaaattgctaaatgaagtttcgggcaccattgtcattgataacatcttatcaggagacagggttttgagatcaaccagtctgaccaaaatttattaggcgggaatttcctcttcctaataagcctgggagcgctatgggagactggggtctatttcacccctgcagtttcgacagtaagagacggccacgcccagggggccagttaagagacccacccccaggtgcgcattctctttctcagggatgttccttgctgagaaaaagaattcagtgatatttctcccatttgcttttgaaagaagagaaatatggctctgttccgcccggctcaccggcggccagagtttaaggttatctctcttattccctgaacaatcgctgttatcctgttttttcaaggtgcccacatttcatattgctcaaacacacatgctgtacaatttgtgcagttaatacagttattacagggtcctgaggtgacatacatcctcctcagctgacaggattaagagattaaagtaagtaaagacaggcataggaaatcacaagggtattgactggggaagtgataagtgtccatgaaatctttacaatttatatttagagattgcagtaaagacaggcataagatattacaaaagtattaatttggggaactaataaatgtccatgaaatcttcataatccacgttcttctgccatggcttcagccagtccctccgtttggggtccctgacttcctgcaacatgtatatatatatatagagagagagagagagacaacatatatctatagagagagacaatatcatacaatacacactattctgtttgcaaatcaaatagatgagaagtaagtatctcattatagttttactattcatttgttctattataaatatactttttgagagtgacttcatttctttcttttcttttgttttgaaatggttgcactctgttgcccaggctggagtacagtgatgtgatctcagctcaccgcagcctctctgtcctgagctcaagccatcctcctgccagtgggtggctaattttggtgtgtgtgtgtttttttttttgtttttttttttttttgtagagacgggggtcttatgatattgcccaagctggtctcgaactcacaggctcaagcgatccttttgcctcagcctcccatactgttaggattacaggcatgagccactatgtccagcttaatttcttttttagagcactgggttttagaattataagggattttagaggtagctaatccattgtgtcattccactgagttattgaaatattaagcaatctacctaactagataatgtcagaactaaaccatttctgctatctcttctttttttttttttttttttttttgagacggagtctcgctctgttgcccaggccggagtgcaatggcgcgatcttggctctttgcaacctctgcctcccaggttcaagcaattctcaggcctcagcctcctgagtagccaggattacaggcgtgtgccaccacacccagctaatgtttatatttttagtagagacggggtttcaccatgttggtcaagctggtctcgaactcctgaccttgtgatccgcttgcctcagcctcccaaagtgctggtattacaggcgagagccaccgtgcccgaccctctgcctccttattaatcgtcatgttgtgtcattgaatatgaacaactcaaattttttgtttttgtttctgttttttgagacagggtctcactctgtcacccaggctggagtgcagtgtctcgctcttggctcactgcagccttgacttcccgacctcccacctcagcctcctgaggagctgggactatgtctgtttctagcgtaagaattttgtatttaaaaaaaataaaaataaagaattttgtactaatatctagacatttaaaaccaaaactaaaatatttataaccttaatacagtggagggaaactgatgttaggtgattttcatttatcttttaaatacttttttttttttttgtatttttttttttaagtagagattggttttcgccatgtttcccaggctggtctggaactcctaggctcaagtgatctgcctgcctcagcctcacaaagtgctggctggaattacaggcatgagccactgagtctggccctaaatttttttttttttttttaaagaaacaaaacctgccgggttcggtggctcccacctgtaatcccagcactttgggaggctgaggcttgcagatcacctgaggtcaggagttcaggactagtagcctggccaacttggtgaaaccccatctctactaaaaatacaaaaattatctgggcgtggtggtaggtgcctgaaactctgtacctactaaaaaataactccccattcctcagccattccctcctagcccctggtaaataccattctactttctgtctctgattttgactctgctaagtatcttatttaagtagaattatgtagtatttgtcttgttttactggcttatttcacttagcataatgtcctcaaggttcattcattgtagcatgtgtcagactttcctttttaaggccgaataatatttcattgtatgtatataccacattttgcttatccctttgtctgtcagtggacacttgggttgcttccatgttttaactgttgtgaacagctatgaacatgggtgtacaaatacctctttgagaccctgctctaaattatcttgggtgtatacccagaagtagaattgctgggttgtgtggtaagtctatttttaattttttgaggagctgccatactgttttctacagtggctttgccgttttacattcccatcaacagcatacaagggttccagtttctctacatgctaggatactttttccatagacacaaattaaacttcttttaggcctgggtttctcaatcttagcattattgacattttagattgtatacttgttgtgggtatatatcctatacatcgtaggatgttttgtagcatccctggccagtagcactcctccagtcatgacaatcaaaaatatttccaaacaccaccaaatgttccctagaatggggcaaaattgacccagttgagaaccactacctttaagcaagcaaagcctaataattaggatctgtgaggccccatcactataatcctgggattaacagtttttagctttaatttactcttgacagttgagttggctttagtttcatagacaatgctgagaatctgatgcacatttaggaatgtctgactttgatcaacctctgaaaaagaacagaacaaactagaaatgttagcttaaaaagtaggttcttggtattatccagccacataagttttaggtataaaaggatgtacatacaaagggtatcaacttgtatttatggattttaatatatcacagtttataaataattcagtatcaactttgggaaaatattgtggctcccttttataacttcctaatgttatgtatcatgatgttatgctaatacttagctactagtgtaaaaaccacttgtagaactgaaatgtatgtcataattttagaaatatcctccagtcagaaactgagaaattaacttcacattgcttcgagtgggacaggaaacttgaattggacattccagatgatggtgaggcaacatttgtattttttgtttgctttgtttcttttactatggttacgtttatctgaaacataaaaatatagcattgcctaactttattgtttcattatcattcaaagtagcaagaattttttcttttttaacttgatgtctacaataaagtagcaagtgtttttcatatctcaacatatgttccctaacatctgtgctaaaatggtatataacttaaaagatgtaagtaattagaatattgactgtcgttcctttgacttagacatttttctaaccaaccaagcaagtaacagtgaatattattagctttttaaatatgactttatgggtgatatcaattgatatctgatattgtttacacaaaaatatactctgaatgaaaattacctaaatcaatatggaaaagattttctgaagagtttcttaatctgatttatttgggaagctgtttagaaaaaattatgtgctgtcagtatgaagtccttcttagataattatttgcagtgagttgtttgacgttgagttttttttttttaatttatttattattattattattttaagatgagtgttgctcttgttgcccaggctggagtgcaatggcgccatatcggctccctgcaacctctgcctcctgggttcaagcgattctcctgcctcagcctcccaagtggctgggattataggtgcctgccaccaggcccagctgatttttgtatttttagtagggatggggtttcaccatgttggccaggctggtctcgaactcctgacctcaggtgagccgcccaccttggcctcccaaagtgctgggattgtaggcatgagccaccgcgcccgcaggcatgagccaccacaccggctgacgttgagttcttataaagtacaacaagaagtagaatgctatttagtatatagcaatatgtatgagaaaatattgttaattttgagcaggaattgaagcaaatagttagtactcagtatttgtatgacaaagttttgtggtagatattttttgttttgcttaacaacctgtaggccctaggatgtttggagtgaagtcttatcagtgggctgacttgcaatgaatgtcccgttttgtcctttaattttaaaaaatctcttatttccttcagctaaagatcttattcgcacagcagttggtcaaacaagactccttatgaaggaaaggtttaaacagtttgaaggactggttgatgattgtgaatataaacgaggtataaaggagactacctgtacagatctggatggattttgggatatggttagttttcaggtatgtggttcaatatttcaaatatattaacttagggcttttttttttttttttttaagtagcaggagtaaaatggggtaatagtagctgcttatgtacctgtaatattaaataagatgttataaagcactttgataaactgtaaaacatgatctaaattttatgactgatgtcctcttctcccatatattctcaggataattttttttttttttttttttttgagacggagtctcactctgtcacccaggctggagtgcagtggtgtgatctcggctcactgctgtctctgccccccaggttcacaccattctcttgcctcagcctcccgagtagctgggactacaggcgcctgccacctcatctggctaattttttgtatttttagtagagacggagtttcaccgtgttagccaggatggtctcgatcttctgacctcgtgatccacccacctcggcctcccaaagtgctaggattacaggcatgagccaccgcgcccggccaggataatttctatataggttgaaaactgaaattattttcaactctttaatagtctataatgattcgacctgtgagaaatgagtcaactggcctttggtagttgagttcagctaacagttactgagttcctgttgtgtgcccgtattgtattaatctcttattgtgttaggagtattgtattaggagttgataaaatagtgcattccctgtcccagaggagtttgtaatttgattagtgactgagatacaaaatataattctaacatataaattgctgtgatagaagaagttactaggaagatcagtaaaggtatgggggaagatgactctagcgttttgaacttattttagaaataagcatataaaatagcatttcaagaaccaacagccaacaatagacattgaaaaaagcttcaaacctaaaagaaaaaggccaaagcaaacatctaggaagagagctatttggatggacttttaaatgcaagtattcatattctcaaagagaccagacgtttcatctgtcaagtaaaaatacctgttagaaaaagaacattcagagaataaatagctctttgaagttaagcaatatgagaacagaaatgtaagatacaataggtagaatatgaagttaaggaaatctcagccaggcacagtggctcaagcctgtaatcctagcactttgggaggctgagatgggaggatcacttgagcccaggagttcaagaccagcctgcgcaacatagtgagagcccatctctacagaaaataaacttagccaggcatggttgcacatgcctgtagtacaagctgtaagacagaagagattagataagaaaattacatggaccagtccaggaaatatagccaaattataggaattccagaaaaagagaacagaaaaaaaaattggggagcaagtgaacaatgaaggagcctgttgagtgtttagcactgagtagacccacagcaacttacataattagatactgttatgtaactctgggataaagagggtaggctaaagcatccagggaaagaaaacaaattttatacaaagcatcaatggttagagtagcattgatctctcaacagcaatattatgaactagaacaatactctgaaaattctgagggaaattaacttccaacctggatttctataccgaaccaatcaagcatgagggtggaaaggcaattttcagacacacaagatctcaaagttcacctccttccatgtaccctttctcaggaaaatgagaatgtccttcacaaagatgagagagttacccaagaaaagaggagagtgggctccattcccagaaagaggcgagaccctgtctcaaccaaaccaaaaccctgagcaaacaaaaagcaaaacaattattaagtctaaagaaaacgttgtgaggaaggaaatggaatctcagcagctgtatggcccagacatgaatagtgtttagtcataattaagcattactttatgatgagtttttatatatttaccagttttcataatagttggttcactagcacccttcaattctgattgttagattctgtggtgatttttgtatcattattagttgcagatttaaaagtatgatatgtttacattgtttatagtcttttttttttttttttgagatggagtcttgctttgtcacccaggctggagagcggtggcgtgatcttggctcactgtaacctctgcctcctgggttcaagcgattctcctgcctctgcctcccgagtagctgggattacagatgcccaccaccacgccaggctaatttttgtatttttagtagagatggggttcgccatgttggtcaggcttgtcttaaactcctgacctcaagtgacctgcctgcctcggcccccaaagtgctgggattacaggtgtgagccactgtgcctggcctatagtcattatcttgactgatgctcatttcccagctttggcttagtgggagccacttcaagttggccattggggcacttttttttttttttttaaacacaaaagagctatatgaggtataatttacatatgataaaattcattcatttgaaatgtacagttcaatcatttttagtaaatttacagagttatgcaaccatcaccacaatccaaatttagaatatatatatgtatttttttttttgagatggagtttcactcttgttgcccagactggagtgcaatggcacaatctcagtttactgcaacctgtgcctcctgagttcaagcgattctcctgcctcagtctcccaagtagctgggattacagtcatgtgccaccgtgcctgtctaattttgtatttttagtagagacggggtttcaccatgttggtcaggctggtcttaaactcctgacctcaagtgatccacccgcctcggcctcccaaagtgctgggattacaggtgtgagccagtacacccagccagaacattttcatcagtataaaaagatgcctcctgcctgtttgcagtcaatccccatttctactcctagacctaggcaaccactaatctacttactgtctctgtagatttgcctttttttgggatatttcatataaatagaatcataccttatggtggtcttttgcatctggcttctttcacttagcatctttctgagttttatccatattgtagcttgccttgtgtacttcacacctttttactgctgagtggttttccattgtatggatatatcactattcaccaattgatggtcatttaaattgcttccactttttggtgattatgaataacctgtgaatatttccacacaaatcttagtgtggatgtatctttttaaatttctcttgggcagatgcctagatattggtaggtcatattgtaaatttatgtttaactttttaagaaactgcccaaactattttccaaagtgattataccattttacagtcccaccaacaatgtatgagtgttctgtttttcgacatcctcactaatacttattgtcttttttattatagtagcccccccttatcagcagtcttgctttctgtggttttagttacctgaggtatagtacaataagatatttggcagggaggagagaccacattcatataacttattacggaatattgttataattgttctattttattgttgattgatgtctatgcttaatttataaatgaaactttatcataggtatgtatgaataggaaaaaacatatatatagggttcagtactatctgcatttcaggcatcccctgggggtcttggaacagattctttgaagataagggggaattgttgcatagccatcctagtgggtatgaggtatctcattgtagggtttttttggggtttttttttttgttttttaagtcagggtctcgctctgtcaacccaggctggagtgcattggcacaatctcacctcactgcaacctccacttcctgggctcaaacaaccctcctgcttcagcctcccaagttgctgagactacaggcatgtgccaccacgactggctaatttttatatttttttgtagaggtggggtgtcatcatgttacccaggtggccaggtcttactcctgagctcaagcgatccacccttctcagcctcccaaaatgctaggattacaggtgtcaccatgcctgacctcattgtagttttgatttgaatttctctaatgagtaatgatattaagtatctttttgtgagcttattcgccattcatgtatcttttactgagatgtctgtgtaaatcttttgcacccatttttaaatttcattgtctttattattgagttttaagtattctttatgtattctggataaaagtcccttatgagaaatattatttgcaaatattctttgagtttgtagcttgacttttaatcctcttaatggcatgttttgaagtgcaaatatttttattttaaagttaaatttatcaaatttctcttttttttttttttttgagacagagtctcactctgtcgcccaggctagagtgcagtggcatgatctcggctcactgcagcctctgccttccgggttcaagcaattctcatgcctcagcctcccgaatagctgggattacaggtgcatgccaccatgcctggctaatttttgtatttttagtagagatgaggtttcactacgttggccgggctggtcttgaactcctgacctcaagtgatccacctgcctctgcctcccaaagtcctgggattacaggggtgtgccactgcacccggccattttttttttcttttatgttgtgattttgacaccacatctaagaactcttacctaaccacaagtcacaaagattttctcctgtgttttctcctaacagtcttacggttttagtacttacagttaagtctatgatccatttggttagtttttgtgtatggtatgagattgtgagtctaaattcatctttttgcttatggataaccaattttcccagcactgtttgttgaaaagactgtcttttccccgctgaattgtattggcacctttgttgaaaatcagttggtcatgagtgtaattctgagtcattttgacatttacttttttttttcctttgagatggagtcttgccttgttgcccaggctagtctcgaccttctcggttcaagcaatccccctgcctcagcctaccaagtagcttggattataggcatatgccacagtgcccagagacatttacatatttttgagggagagcaaagctaagaggatatgtgtgtataagtgcatagcatggagactaaaagcatggttaccaaactgttgtcagtggcgtaactcttcgtaggagactggaagtatcagaaagatggggattatatttccatcctattaaatacacttgtatcttttaaaatgagattatgtcaagaaaatgagaagacaaggcacagattcggagaaatatttgcaaaagatgtatctgataaaagactgttatccaaaagatacaaagagctcttaaaacccagcaagaaggaaacgaacaacccaattaaaaatgggcaaaagacctgaacagttacctcaccatagaagatatacagatggcaaatacgcatatgaaaagatgctcaacatcatatgtcattagtgaactacaaatcaaaacaacagtgagatactaccacatacctactagggaacagtgaaaattcaaaacactgccaacagcaagtgctggggagggtatggagcaatacgaactttccattcattgcctatgggaatgcaaaatgttatatccactttagaagacagtttggcagtcactcgcaaaactaaacatactcctaccatacgatctagcaattgcgctccaaatgagttgaaaacttatgtccatataaaaacctgcacacggatgtttttagcaatatagcagctttattcataattgccaaaacatggaagcaaccaagatgtccttcagtggaggaatggataaataaaaaaaaaattagattgtgttcacattgtgtaatttaagaaacaacatttaggatatcttttctaccattttagcattttagtcaaaaataatctaggagagttattcatgtatgatattctttatgtagattttggaggtttgtaagacgaaagataatgaaaaactttaccataaaaattatttgaacactaaattgagaatgactcagtccagttttaataactcatcatttctgaatcactatttttaatttttttttagtcttcagctcattcgtttataactttaatatggctagcattaatctggtaaacttgtgctttattaacagatagaagatgtaatccacaaattcaacaatctgatcaaacttgaggaatctgggtggcaagtcaataataatatgaatcataatatgaacaaaaatgtctttagggtaagtttgtgggttttatatccaatttttttttttttagttaaggaactgttatacatacatccaaatttctaatatagattcttctacttcttgtttttaagttttaaaaacatttaggtttagatttctcattattttacaaagttaagtctttatactacttagagtgtacttgattgcctttgaagaaagagcaaggaaatcgatcaacataaaatttaggatagttatgtctagagagaagaaaggaggggctgtgattgaattggggtacccagagggcttctaagttaccacatactggatatatgagtgttggttttattcttcttcttctttttttttttttgagatggaatcccgctctatcaccaaggctgcagtacagtggcgtgatctcagctcactgccagctccgcctcccgggttcacgccattctcctgcctcagcctcccaagtagctgggaatacaggcgccagccaccacacccggctaattttttgtatttttagtagagacggggtttcactgtgttagccaggatggtctccatctgctgacctcatgatccacccacctcggcctcccaaagtgctgggattacaggcatgagccaccgtgcccggcctaaaggttttattctttaaactgtacttacacattttgttataatagtaatagtagtaggtaacttatataatgcttagtatgtgtcaaatattattccaattactttatatatattaatccttacaacagtcgtatgaaatggatgctgttattcttgtgctttgttaacatgacagattttgttcttgtttctagtaattatctttctagtaatgtttttgaattcaaagtttttggtttgggtggacacttttcaaactaagcattgtcagtttttctttatgatatgagaaaaatgcctgtagttataaactcaggttgtctagattggtattttattatactatgtaatccaaataaaaactgtcttaaatcctatcttaagagtttaacttgttaaagtattgttttttaaaccttatttttaaaaaattcttttttttttttttttttttttttttgagacagagtttggctctttttgcccaggctggagtgcagtggcgtgaccttggttcaccacaacctctgactcctgagttcaagtgattctcctgcctcagcctccaaagtgctgggattacaggcatgagccactgcgctcggccttaaaaaatattttactaggccaggcacagtggttcacgtctataatcccagcactttgggcggctgaggcgggcagatcacctgaggtcgggagttcgagaccagcctgaccatcgtggagaaaccccgtctctactaaaaatacaaaaattagctgggcgaggtggcgcatgcctgtaatcccagctactcaggaggctgaggcaggagaatcacttgatcctgggaggcagaggttgtggtgagctgagatcacgccattgcattccagcctgggcaacgagcaaaactcagtctcaaaaaaaaaaaaaaaaaaaattttttttttactaataaagtctcatgacaaggaccctgaggacagtgactaaattgattgaatggatttcaaaactactaaatagtgaaggatgctacttcattattaaagctactgtgggtatttcttattaaggatttagtcctggaaatattaatatcatcagtgatgcagatcatggctatgtcctatagagatttgtaattctgcctgttatcaccaggtgtctctctcctactttattttataggctacctttaagattatcaaacaaagctaatcttttatactatacttggataccactccctactacctcttatttattaatccctcattccatcagttagtcttgttttcctttcctcccttttttccatcagtctttaaacatgtttaagtgtcttatcattgtttacattaaaacaaacctgtggtgtctgcttctccctttaattacttgtacacccccattttttctttctatccagtcactgacaagcatcctaaaatgttttctatactctattatttttgttcctttatttctccaactcattgcaattcagttttacccccctataactttagaatagttatctaaattattaatccactagttgcttaagttattaggcacttaattttaaattctaactcttctaggccaggcgtggtggcttaagcctgtaatcccagcactttgggaggctgaggcaggcagatcacctgaggtcagttcaagaccagcctggccagcatggtgtaccctgtctctactaaaaataaaaaattagccaggcatggtggcgggcgcctgtaatcccagctactcaggaggctggggtaggagaatcacttgaacccgggaggcagaggttacattgaaccgagatcatgccactgcactccagcctgggcgacacatcaagactctctcaaaaataacaaaaagtagtaaataaatctaacctttctgcagtattaaatatggtctactttttttttttttttatatagagtcttgctgtgttgcccaggctggagtacagtggcgccatctcggctcactgcaacctctgcctcccaggttcaagctgttctcatgtctcagcctcccaagtagctgggattacaggcgtgtgccaccacgcccagctaactttttttcttgtatttttatttttgtattttatttattttttgagatagagtctaggtgtgtggcccaggctggagtgcagtggcacaatcttggctcactgtaacctcagcctcccaggttcaagcaatctcccacctcagcctcctgagtagctgggactacaggcatgtgccaccttgcccagctaattttttgtatttttagtggagctggtgtttctccatgttggccaggctggtctggaactcctggcctcaagtgatcctcctgcctcagcctcccaaagtgcggggattacagttgtgagccactgtacctggcctacttccttgtttttgaaattatatttccttcttctttgcctattcttcagtcatatttgcatatttgttttccatttatcccttaaatgtttttgttatttagaattcctacctctactctcttctttccttccgtaattttcctgtgcaatcttacccaacctgtgatgattctcaagtctgtattgcagaccacacttactaagctctaattctatatatcatgactcaatataccttaaaaatcaatatatcccaaactgacagcatctccacacacaccaatgttgccctgtctcataatgctgttaccatcccaccaggtgttcaagatagaagtctcaatatctcttttgagatatccttttgagcgataccctttgcttgctttatttcaccatctccaccccacacacatccaatagatgagtaagtcctctcaattctacctttcaaatatctcttgaatctgtccacttttttcatctcttactccttagtctgagtgatctttctaaaacaccagcttgatgttaatcttctgcttaaaaattaccaataactctctgttcccttgtcctctgtgtaaatgtgactttcttaagaccattacatgcaggtgatttttattataatctagctattgtttaaatccacttttctttgtttcatttctggctttggaaacatctctctagcacttgcctcaccccatcttttagtttgatgaaatatggtttcagcataggtgctacttcctacaacctttcctgatgcctgaagattggtttaggtgtcatccttatttattttcttttaatgttttactttttttttatttactttttttgctttttcttttttatggggggggggtgtcatggttataatctaaaggatgtcccctaaatttatttctaacaggacatttatccttcttactattcttcccagatcttctactaagctgcaaactccttgaggg

SEQ ID NO: 148 - DNA, 32744 bp, Homo sapiens
  source 1..32744: mol_type = other DNA
aagccgcccgtttcctgccgagcggcgcgacggcacctgagcgactgcggcggcggcggcggcggcggcggcgcctcggagcgggcggcccgggctgtagtgccggcgccgccgcgtcttcccggtctcctttcccggccgcacagggtgagggagagcaggccgcaccgggacgggcgccggcggcggggagcgcggggggaggcggcgccggccgcggggtcctggggcaggcgggagggccgcgccgggcgggggggcgcggccgcggggcccggacgccgcccgctgggtaggcctcgggcatccggttgccgccgcggggctcttgttggggccgggacgccgcagggggcgggctcggagggacctcctcggcctcgcggggccgctctgggcccgaccccggctctgtcgcggcacccggggcgcggccgagggacaccccccaccctccccaaggacgactctcccgaaggcgaggtcgacccgagcgggccctggggtgaccgaggcacctatttttagccaagcctgagggcccccgggagggaaggcggattaccgcctcctcggccggtggacggaggcagcgcgtctccggcggcgtccccgggccggagctgggccacacttacgccatgctggagttccagtcctcgccgctgcctccggcggtctgggcgctcgcccccttccccggcgcccctcccgctgccctttgcgagtccccaggtcagggcgggaggcggttgggcacggaaagcagcatgaggggggactttggaaaaatccatggaccactctcgacaccggcgaagttatcccttcctgtccccgaggggtgtgtcctagcgattcggcctgaccccttcagtttccaaaagtgagatttttggccttggggacctcgccggaaaactacgcgggaagtctagagaagtcgtctggctctcagccatacgtctggtgtgggatgtgcagccccgcatgctggcggtgaaggcgctgggtgcactagatgtgggcagccccggacgcgggcagcggcgtcccagccggccccagttgcaccttgactaggttaggttgaaagtaagctgttcagtgttggcccttctttcctgtgggaggaaggaggaatctaaattcagaactgtgttggcaaacggattccttagccgctatttaagttagtagtgcttaaagagctacggttgaagttaactgttaaggtgtgtgtgtgtgtgtgagtgtgtgtgtgtgatgactttgtggaaagccttgagtaaagagctacggttgaagttaactgttaaggtgtgtgtgtgtgtgatgactttgtggaaagccttgagaaatgtagacactcatggccagcccagctaaagataagcatcttcggtgaactaaaggttctgaattgtataggagttgacttaaagttagaatttttgctaaattaggttgcatttgttttccttagcttacctagcaggctaatggcaacagtgtctccagtttggtccgaagcaattgctggtgagacttgggataatgatcccaagctggtgagacttgggataatgatcccaagaataacactaaattactcttgagtattttgggtagacatgccttgcagtagactttcatatttgatgtgctgcctgataaaaaaggctctttttttttttcctttttcctttttttttagtttaaggatctaacctgaaatagctgggtctgttcatgagtttccctcccaccccaacattgagtttcaaatgtctcttctaattttgtagccttcatcagacataacaataccttatcaagtgagcttagagaataaggtgttctacttgatttacttgaggctgataatgaatttgaaaatataacaagatctattgaaaaattttcttaatacttgaaaattataaagaatatcaagtatttaactcttaatgattcagcgtcagcattatgaagagacatttacgattttgtttccaatttagatctttctgtattcttttaataccagtagtctcttctgtttgatgttgtgtttgtccctaaaaatgcctcacttcagtctcccttctagtttataggctttaatctgcttttggtagggagatcgttttaataattatatttttaatatcagtcaatatggctttttaaaagagcctaagacgtgaaaacctttttgagacttctaaagaacccatattaagattgtcactgttcttaagttcttaacttgaatgttaagttatggttaaaagttcttaatcagcctgtcatggttaagatgacacgtagaatactgaatcataattgtttttttaaaagttgaatgtgtcttatacatttcctatgtgtaagttaatttcttaacttgaatggaacatgtgtttttaattgtatgcctataatttttatagcaaatgaagttttaacctgaaagatctccaatactttgttaaaatattaaattgttaatgaacttaagtggttctaggaaggttttggttctcttgggaatctgacctaatatgtaataaggaaatgagaaaaatcgtgctttgcaagatcgttcatatatttgagaatacaccttatgacctgcttgttctctgtactgtttttagtgactttgaaggtaaatccagagtatacttagaggatacaagcaagtaactatttctctagaagtgacattggtgatcactcatgctcaaagagaattgcatttcattgcttcctctttcagttcctgtgaacatgactttgtcccaatcaaaaaatgtaatttattttcaaatcactgggaaaatattggtctagatgagaatataagcctttttccctcctctataaatagaaaattaaacattaaggggaagaaccttatgtgctgtgaactaaggggtttaatttaaccttctgtatctgaggtctagagaaagagaaataatgacagtttacaactgtgtgccgagctgttgtgcttaaatgtgtttttgacagaggtggcagtgaaaactaggctatttttcttttttaaaaaatggtacaagcttttaattggttttatgtaaaagaaaataggcaagatatacttttaattctaacaatagttttagtagatactctgataggaaatataatattcctcggaaatgtagaagacataccctaaaaaaagttatgatttagtattttacgaatcgtcctagctactacagggagattaagaactcttccgtaacttaaatctggtttcagcaaagtgatttgtacactaaatgtaatttgtttgcactcttcttccaggacattctgctttttgggctttctccttcctaattgctttgttcattctatcttacatcttctactcttaaacttgacatgctcagtccttgtttcacttttctttttatattcctctgacaatcttatccagtgtcatggttttaaatacctatatgctgatggctcccatatttatatctccaacccagactttccacatgtgctgttaggcctatccacttggatgtgcagtagtcaactccaactaaatttccgtatttttcctcaaacatgtttgatgtttgatgtttccatcaaacattcaggtaaaaaaacgttggagtcatccctgacttatttctttcacacttggcattctgtgctctgtcttatcttgaaaatataaccagaatccaatcagtacttactgcttccactgctcaccagcctggtgcaagccattcttatctcttacctagatttctgcaattagcctcctaactgatctccctgcctctgccctaactccctgcagtctttccaacacaacaactggatcatattacttatcttctcagaatgctacagtgactttctctatgcacagtgaaagctgaagttcttatgtccttaaggccatgcagaatctggacacttccactctcctcattcccccttacctctaaggttagctactatcatccctctgcttacttctctctggctccaatggttttcctaagggcagctacatatcagacactgccctaaacgcttaggctccatcaataaacaaaacagacgaaaagctctgccctgatagaagttgtgtaatagtgtatgtttgagggcaaggggaagagataataaacacaatcaatgaggaaattatatactgtttacttctcctggcaagaaggtgacaagtgccatggaggaaacagagctgttttttacactggctgttaccctgtagatacatgcatggcttgttgtctccgtccagtctttgctttttaaatgtcagtttcttaaaaagatgtgcctattttatttaaaactgcactcccctacgtctgattcttgtaccttgctccgttttctttatagcatttgtcaccttctgtcatactatataatttcctggttgtgtttattgtctcttccacataaccctcaaacacagtattacatagcttctatgagggtaggctttttgtctgttttattgatgactctttaagagttcagagcagtgtctagcacatagcaggtcctcaataagaatttgttgaacacaataattaaatcctggctgggtgtgatgacccacatctgtaatgccagcactttgggaggccaaggtgtgtggattgcttgagcccagcagtttgggaccagcctgggcaacgtggcaaaaccccatctttaaaaagaatataaaaatagccaggcatggtagcgtgtgcctgtggtcccggcttcttgggaggctgaggtgggaggattgcttgagccagggaggtggaggttgcagtgagctgagatggtgcgactgcactccagcctgggtgacagagtgagactgtgtctcaaaaaaaaaaaaaaaaaaaaaaaaatctcacattccttcctttgatggataactcattattggatacatgtagttttcagtttgctcctttcctctttcagggatggtcagagagtggaagaaagtggcatggagcctttgggagctgcttggtggaaggaatgatgttagagtgtggtggagaccctcttacatactccacatgattaggaccatttgttagttaattcaaaaagttggttaaagcaaggaatcaaaatatatgtgcaccttaaatgttttcacttaaaatatttgattttacttttatttgcctttttatttttactgatttcttttcttaaaataaaggttatcctgattttcctttcatagattgtactctaaaagcattatctatgatttctagtattggtttctttaaagtggaatgaaaagataggcactgggaaactctccaagtacaaaatctttatagatttttccagttattcatcaaggccttccaaaggatttaatgtcatttttatagaaataacaccttttgactctattttcatgtttgatagatatatagaaataagtgagtaggagagtaattgctagccagaaacagctttctgaagacaccagcccatgtatttttacaaaggaggagaatgtcagttaatccagtgagagatcctgtaagacagcttccactttgaataggttccataggggccgtaggatcatagcagcctataattactagaagagaatgttatttacccttatttctttattttgactctgagtaacatctacaattagttttcagaacttatgtgaattcaagtaagtgtacattgtctatcaggagacatgatgttacactgcattttcgctggaaaatgtgggacaattattattcttatgcatgagtcattgagttgttaaggaaacaatctggtctggtataataagctggaagtcactagttaggagacctacaggtcttagaccttattaactctaaggttttatgcaagttctttattgtccagttctttaattacataatgttctgtggggtagtggaaacagcttgggcactagggagcctgaagaccttgggcttgaatttagttttgctagtcagtaccacttactgcatgtgtgatcttaacctatattaacctgcctaaggctcattaaggaattatcttacctcagtagttgcctcataagtgatagctaacattggagtacatatttgctgtcaaactctaaatgctttaggtgcattatcatatcatatcatatttaatcttctcaacaaccttatgaggtaggtactatttggtgaaaactagggagacaaataatttgttcaaagacacaaatatctttaggaggagcctgaattttaactgaggcattctgacttagagcccattcttacccgttgagctgttttataagaatgctttctgaagaaaacaaaacgctgtccatgtgcagctgtctaatgttaggcattacaaagctaaattaaggttataaggatccccctcccccccataggaattagaagattaattcttaaaactagtgatttaaatttaaagacttgaagtttttcaagtggagaaaacagtaaaagctacttaaaccacatgctataaaatgttttagttatatggaaagcagtagatagaatgtcgtccttttgtttccaagaaacttttctgtttcatttcctgcatatgttcattataagttactcttgtgtgatcttatagacatttcttaatggttacctcgaaaacgccaactctgaccctacctaaaaatgcataccctccctattctttgtcacagccttatttttattcattgcattatcagtcacaacctgatgttataatacgcttatttctttcttggtatctgcctcacctacaagaatataaataatgtgaggcagggactgtcttgttcatcgctgtgaactatatgtctgacacctagctagtgctcaatttgaatgaatggatggtctgatgcttgaaaatgattgggactcattgagtcttttgctttacttgccatcctttattagcatggctaactgagtggtatttggtatgccatataaagtgaaactctaagaataagggttttaggtttactcttgggagagtggaatggaaaacaatttgaaacatgaatttcagcaaaatgggtgtgcttagtcccagttaatcttgttcatcagtaatgtaagtgttctgagtggaatctgtacataaataatttagtgaatgcttgtgtttagatctaattaccttttgaaataaatttggacaagctaagctgtgcactgaaaactccctagtgttctgaatgctatgttgcagaacgttgaagatgttgccttaaatctgtaatatccacacaggttgaattcacttacgtgccaccaacctgtacttgcctactttattgggaagtcatgttcatttgaaatgtttccgtaattactttacgtagttttcataatctgggtctcttgaggttggctgaatgtcatgatttctgtaaagggaattcctcaagcttgtatttagtgctcttatttctgggtacagtttcaggtgctgtgctggataatctttgtgcttggtactctattgctggagaatcatttcttaaatagcttccagtttgactagatgtttgctgtaattttaagtttaaattgaatccttttgtaaaagtggcttaattctttcactcttttttttcttttagtctaaataattggatttagttttaacttgaagtatttctgagcttgaaaattctggagcacttttcaagtaaaaaatacagctgacctttggacaatgtgggaattaggggcactagcaccctgtacagtcagaaatgtttgtataacttttgactctccagaaacttaactactagtaccctacttttgactggaaaccttaccaattacataaatagtcaattaacatgtatattgtacgttatatgtattatatactgtattcttataataaagctaaagaaaagaaaatgctactaagaaaatcataagagactgtgtatttacaatactgtactgtttattgataccataagtttatatcatctgtaagatgaatcatctgtctgaaacagtgagcaactgtaactgcagacctcagtctaagtacatatcaagtaattcaacttttccttgtcatgacttttctctgcttctcgggagcacttccagcattactagtggcacttggcatgggtctcatggtgttattcagggtttacagtgttgtgctaaaaatgatgaaaaatatgcgagaactatgatcactttttactgtgatactgttactggaaggacagaatgctcatgtggagataattagagtcatggataggagtcagggatacttcagacacttgagctcacagtaataccaacaggaggtggccacaaaattattacagtggtacagtatgtactgcagttaattttatgcagttgtgatttggtactgtatcttgacctttgtttacatttccatctattgcaaatggcaccatgtacagtaaccatatagggtctggtttgtgtaagttttgataaattttaactttattatttgtgtatattttatggtagtaaattatgaaatagactgggatctacatatattttatgcattcatgacatttttcttaatttttttcaatatttctaggctgtggtttccctgtgagtttttttcatattgttgcagtctccaaaaaattttccaatatagttaccgaaaaaaaaatctgcatgaagtggacccacacagtttaaacccatagtgttcaaaggtcagttatacattcaagattagccttggaattatacataaaatacagccgaggcatttaccttgtctgaggttttggggagaaaagaagtaattcataaatataagttagttgtaaagtgatgaaagccgaatttttgtctgctcttttaggattaattacctggcataaattggtagttatatttcatatcctttcagtgttatgtaaccttcatttaagcagaaagtcctggcagcattcaaaataacatactacttttggtataaagagattcttttttttgaaacggcgtctcgctctgtcacccaggctggagtgcagtggtacaatcttggctcactgcaacctctgactcactgcaacctctgcctcctgggctcaagcgattctactgcctcctgagtagctgggattacaggcacctgccaccaaatctcgctaatatttgtatttttagtagagatggggtttcatcttgttggccaagctggtctcgaactcctgaaatcaagtgatccacctgccttagcctcccaaagtgctgagattacaggcatgagccaccatgctgggccagagattctttaattattattcttggttactatattcatctgatttcttttttttttttttttttttgagatggagtgtctctctgtcgcccaggctggagtgcagtggcacgatctctgctcactgcaacctccgcctcccaggttcaagtgattctcctgcctcaacctcttgagtagctgggactacaggcatgcatcaccacgcccagctaatttttgtatttttagtagaaacggggtttcaccatgttggccaggatggtctcgatctcttgaccttgtgatctgcccacctcagcctcctaaagtgctgggattacaggtgtgagccactgcacccagccttatttatctgatttcttaaggtagctttgtaataagtaaaaacaaaacaaaacaaaaaaaaccacacatacaaacctagatattttctgtaaacatttttaatagatttcttattttaaaggacttttctttttggggaaaatttcttccaaagtaggaataactttctacaattattcagtgcttttattgtaattgtataagttaagaagcagggaagcttatgcctgtttgcttgtttgttttgatttacatttatctcttcctacttgtctttttattgttttattgaaagttgaaaccactattaaatgattcagacatataagaatgtataatgtatatgtacagtttaaagattaaatataaaatgaacatctgtgtactgaacacctgtgtacctttctctcagctttaaattttttcttttaaaataaaatacgtatgagataatattttaagagtacgtgtaagatataaagacataatgaacagccttgtatctaatacccagtttgagaacataatcctttttatttctttatgtcccttcccacactctaaccactacctttcttacctttgcttttcttttagttttgccagatctagttgtatccctattttgttgttttgttggtttttgaactctaaatggaatccttctgtatgagtttatttgtaacttcctgtttcccctcaaccttgttatcaggatattcttttttttttttttgagatggagtctcgctctgttgcccaggctggagtgcagtggcgcgatcttggctgactgcaaccgctgcctcctaggttcaagcgattttcctgcatcagcctcttgagtagctgggattacaggcatgcaccaccacgtccagctaatttttatatttttagtagagacggggtttcaccatgttggcaaggctggtctcgatctcctgaccttgtgatccacccgccttggcctcccaaagtgctgggattacaggcatgagccaccatgcccggcccaggatattctttcaccatgttgtatgtagctctaactcatttggctacttcatgtatgaatattttacaacctgtttcctgttggacattgggtttctaggtatttttgttgttagtatacacagtgctgctatgaacaccttgaatagcataggtctatttgttgcacttgtgtctctaggatagtgttttttttcaaactttttgttaccactcacaataagaaacacattttaaattatgactcagtatattatcaggtatactattccatgctgttctgtttcattaaaactaaaaacgctagtcaagacctaagttttatgctaatcgctagtgagttgagactagagtgtagatagttttggggcttatgactagctagaaatagaattgctggattgtaggagacaagacattttcaactttactagttagtgtaaattgttttctttccaatataaatgtgccagtttattcctgtcaccagtgtatatgtgtgatggctccacattcttccctatacatgataatggcaaaaaccagttagcctattgtgtgtgaattgatacattgtatgtcttgcatttctttctttctctctttcttttttttttttttttttttttttgagacggaattttgctcttgtcgcccaggctggagtgcaatgatgcgatctctgctcactgcaacctctgcctcccaggttcaagcgattctcctgcctcagctgggattacaggcatgcaccaccacacctggctaattttgtatttttagtagagatagggtttctccatgttgctcaggctggtctcggactcccgacctcaggtgatccgcccgcctcggccacccaaaatgctgtgattacaggcgtgagccactgcacctggccttgcatttctgattaatgagagaaaacatattttcagagtttgctgggcactagtttccttttctctgaaatgactgttcatttttctgttgggtttatctttttgggtggcaagatttcttcatatgttctgaatactaattatttgccaattatgtgttataaatgtcttcctactttgtggcttgtcttctgactttcttatggtgtctctattaaaagttaaaaattttaatgtagttgaatttatcagtgttttccttttataatttgtactttgtgtctagtttaagaaattcttctctacctcacggttatgaagatgttcttgcatgttgtcttaaaaagttttatgttgtctcacagttctttccctggaattgatttttgtttcttcccctttatgctgttttcttttttccaagatttccactgcttaccatttcagtttttaagggctaaaatgtgtttatttatagatgctttgaaataatactttgacagtatggagttgtttcgaggattgcatctacaacttacttttagagtcataagaaaataattgcagttgacccttgaacaacatgggtttgaactgcacgggtccacttatacatggagcaggatggtgaaacctgagtagatgggctatgggacttgactatgggagattttggtgtacctgtgtgtgtccttaaaccaatttttggcgcatactgagggatgactgtatgtaggagtgttttgaaaaagaaactttggatagttattcaataaactttgaagtccctcctccagtccctatttgacatcctaagtgttttgtaaatatttcacagtgatgccagtgtttgcatgtggttttcttaaattgttttgcacatatattgtgaagtagatctttgtgcttggtattttgaatatgtatggacaaacttctatgtatacagcttgtacttagagtatacttacagtatgaggaatcaaatctttaattttgaaaaattctcacctctttaaatattgcttcttttattttcacttttctcttttgctagacctgtcttggaggctaagtttatcccgtgtttttaattgttctatcatttttttctcttttctgtgcttcatactaggtgaattcattactgtctagcaatttaccattttatttttctattttgtctagagtgtattgtatctgttgagtctatatgccagtatctataattttcatattttaaatttggaattgctttttcataatcacctgtttcaattctctttgtttggcaacccttttgctacttagaaaacctctatctccttctttaacatgttcaaatttaaaaatctttgtcagaccatttcataaaacatctggtgtgaattcgtgtttttatatgattgttttttctcattaaatttcttgctatgttttggattaaaaaaactggttttaatgttggacagactcattattttgacaactcttgcattcaaatcaaaactctgaaatttaatcttatttttgaatttactaattgatcagaaatagacaccccccccccaaaaaaaaaaaaagaaaacttgttaaacactgtgagggtactatcaacaaaattcacactgggaaacgcgctaggactagctgcttggttttttttcccttcccaactaaaagttctaagaattgtaagaaactgaaaaataaagagataggtatagtacgtgaaaggagacaagaaatataccagtcaaggaataacaaaatacttgcaaagcacttggggaacgtgaacgaacactagctttgcattaaggaattactaatttttaatttgctatgacattggatgttttgttgtcttttttttttctccaggcttggagcttctgtaaagttatagctctggatttgcagtgtcattgtttttctcccctctcctcccctctctttttttacctttttatttttttgaaacctctctttttacaagctgtgcaaatcttgaccccttggtgtcaggcgatgaaccttgttctgttttgttgctgttacctttaggaactgaactatccagccatcttcctggttccttcttccctctactgcacttaagatatgggttactgttttgaatttttattgcatttctcacccagtacgatgtttatcttagttttgagtttagccatatcttttaaatttccttttatattcgtgcaaaaggttggtgcaaaagtaatatttcacactattactaagtatttggaggaggatccttattggaagtcgttatcttcatttctacctatcttaggcttacttgttttttgaatcccagcttatgtatcctgagtagtattcacagtgtatcctgagtgctctagttcagtgatctgttcccttcctttgcacaaatcttttaatcttgttgaatattattcagctctacagaacacatctgatattagcatcacactaatttatgattatataataattagttagactctttaagcattgaaatgtgattcttgcttttgctgcttgatctcactcatcctgtgtttcttcgttctgttttggagttgctgttcccactcaagcagagtagagttttttttttttttttttcatttttgagtttggactggtatccattgttgtgtgaaatatttttgcttgttgtctccaacttgaaaatcaaatatccaatgttttgaattcattcttgaaaaccctgctgctaatttaaaagctattaaatgaaagcctatttccattaattttagtagggaattatgatgcggtatttcatcccaaacagttttcacacgtaggtaaatattaatctaacaatgaagacaaatttgtgtaggtataaacaagttgaaagtaaatacactttatacataaaatataatgtagtataatgaaggctaattgtatttgccaaaggagaaagaagatttgatagtggatggtagtgtagttggtagagtgtcactttttgggaagtctgtttcttctgtactgtgttttttcaccaattcaagctttctggagttcagagttaccttgcattcagtctgcacttaagttgtctgcacagaaaagcaccactagggcaataacaaacacaagttgttcacaacacgggaaatagaacacatgcagaaaagacggagttgtaggagctggaagctcattgactttcttgctctgcatatgtacacgaagcatatctaggttcatccagtgtactgtatgtacagtatagatctgttccatatgatttacgctgatgggaaataattacgttgaataaaacattgagtctgaaatcataaatgttgaaatttcactctatagaatattttgtgtgtgcttaggtaaacagtcactaataccaaaaaaggtcattgcttgaaaagtggtaattttcaagagccattttgatgaaaaccagttaaatgaacagctcattatgtggttaagtctgtagtagacttagtaatgtggtgttccagcttatctgaactagttgtcagaatttctgctattctaaccaggtaactcagagtaacacaggataatacaaatcttacgttctgaaacctttaattggtttgccctttgttctcatcctcatattcaacacatttgtaaactggcaagattatctttaattgattaaaatgttagtaaggtcaggcttagttttttggtacattgttaagatactttctaaaccattaattgtcaactttgggatattattgtttaaccttttaaatattcttcaatttatgccagtattcagccatgttcaggatttatcaatcttgtctccaaggatagcttgtttactttattgactgttctgacaaaatcagacattccataatgtgtattgggttttcctgatttagtaacccttttatttaaaaaggtatcggagtgattttttttaatagtgactggtttggcggctgggcgcggtggctcacgcctgtaatcccaatactttgggaggccgaggtgggcggatcatgaggtcaggagatcaagaccatcctggctaacatggtgaaaccccgtctctaccaaaaatacaaaaaaattagctgggtgtggtggcaggcgcctgtagtcccagctactcaggaggctgaagcaggagaatggtgtgaacctgggaggcggagcttacagtgagctgagatcgtgccactgcactccagcatgggcgacagagcaagactcaatagcaaaaaaaaaaaaaaaaaaagtaaaaataaaataaataaatggtttatagtggatggcttttgatgtgcctatattttttagtaacattgtctggatttacctaaaataaattcatcaattttaatttgactactttctatttttagtacatgatatttaatagcttttacttttttccccctaactcttaggcattttctaatagtgaggaaagcagaagcctttcatggaacttgaaatgtaggatcatggcagctgtgtctgttgaaggcaacatctgtctttgcatggctgttgaggtgattgtgttgtaaacatggattctaaggatgaccataggataggagcctctacttgtggctatattttaggttctgataactgatcatctttcatcctcttacctcatatttctgttgtctggaaggcagtctttgcaatcacaaattttgaaggttcatggtgtgctgtgttttaattatgttaattacataattgacatacttaaaccaactttcagttggtgaaatcacaaggactactttttcttggcgttagctccctaaggttcttagtaagatcgggtctctcactaattttttgcttaggtttcctattattgcgagtgatgtcaaaagaatagaacctttttttttttttgacaaagttttttttgccactgtagacttaaactttgttaatatatcaaagctacacttatttccaattcaaggtaattatatctgtactttttgatgttttttctgtcatagactctttttgcagcttcaagaatagaacgttatggtgaagtccatatcatgataaaacatccttgattttgtgtttcagagtaccagtgaacacaaataggattagtatatactgtatatatgaaggattattttgaaaaaaaaaatccaaagggaagaactcacaaggaccacctatataaagttatttatgttcagagaagtaaatatttgacaacattgtgcgttggactctgtgttgggctcccagatagatgggagaacatgtatttgaaaaggggagttactcatttggcttacactttttgagtagtataagctaaactttgtgtaataagtgagtaaaagtcttcagggaatgttttcttaagccatagttcttaaggtacaatttcagagaatgataaacacataagattgtgaatgtattaaagcaaatgcctcttaatttcagtgaatcagaatgaacatttcttaagtttatcggattcttcatttgtacttgtttttagattgtgtgtaagattttgctgtttattcacaattttgctgtttgcgtagatgtcgaatctctttgctgtttcttaaatagcaatgataggaatttccctgtggaatatgaacattaaaattgaaatgtagaagggctggcatggtggttcatacctgtaatcccagcactttgggaggccgaggcgggcagatcacttgaggtcaggagtttgagaacagcctggccgacatggtgaaaccccatctctactaaaaatacaaaaattaacaaggcatggtggcgggcacctgtaatctcagctacttgggaggctgaggccagagaatcatttgagcccgggagggggaggatgcagtgagctgagatcgtgccactgcattccagtctaggcgacagtcagaccctatctcaaaaaaaaaaagtagaaatgtaggttgtaggaatgtagaaattaaaatgtagactacagaatagattgtaaggtttagaaaaaaaaattcaggctttcaccatttaattggtgtacttaactatctgtgaaaatttgtcctaatttcatatggctttgtatacggaagcttggagtaattgaggggccagagagggaaaactctttgctagcactcttctttgtgcattcctgaaaagtttattagagaaaagcaaaggtcagctgtaatccctagtgaaataataagaatattgctttctcggcagggcgcggtggctcacgcctgtaatcccagcactttgggaggccgaagcgggcggatcacgaggtcaggagattgagaccatcctggctaacatggtgaaaccccgtctctactaaatatacaaaaaattagccgggcgtgttggcgggcgcctgtagtcccagctactctggaggcagaggcaggagaatggcgggagcccaggaggcggagcttgcagtgagccgagaacccgccactgcactccagcctcggcgacagagcgagactccatctcaaaaaaaaaaaaaaaaagaatattggttcctcaatcagtcatactctggttggaaagaggtactgttcattaaaaaaaaaaattacattctggattagtaaatttcatataaagtctgaattaatttttactaattatttactaatgttgatcagttttgtttgttgcagagctgacagacttattgcttctaaaaactaatattccagtgttcagcagggtctagaattctgtggcaattaatggtcattgtttctatggagattttattacattattctttggcttctattgctaagtactatgtaagtctaaatttttcggtactcttttctgtattggtttcaagacttgtttgagttacacaacgttacaacaaatgtttaaatatcttttattctgttcaaattttgttgcctttcctgaattggaagatccatagctttcaacagtttttgaaaattctcagccactgtgtttctttgttctttcctctccttgaattcccattggatttattggacattctcatgtatcctttatgtctgttaatttttctttcatattttcccttatgtataattttttgtggtacattgtcagttttttaatcgtctgtcttgtttgataattcaactttatatagttatcaggccatttagcttttaattgctgggtgtttgtatgtctgtgtacatatgtatgtacacataatttataaaattcaagttctaatttttctgtttttttatgagtgttttctgtgtttctgatttcttttataactctcatggctgaaatttttgttttaatagtctttcacattctgttatcagttttttgggatctactccctgtttgtatgtgctactcttgtttattttgactggaagttcacctctggcaggagtatatctgcaaatactatactgtacggactagattggacagaggtagtttttttccagagagatttttccttcccaagagtttttcctgagtcccagggcttttgtggccattgagccattttttttttcttttttttgagacagagtctcgttctgttgcccagggcggagtgcagtggcgcaatcttggctcactgccaacctctgccgcacagaagcacagattcaaagcgattctcctgcctcagcctccggagtagctgggattaacaggctcccgccaccacgctcggctaattttttgtagttttagtagagacggggtttcgccatgttggccaggtggttctcggaactcctgacctcaggtgatccgtgagccatttttatgtcaatatttgtggtaggaagggggcagtagggggaattggcagaaactgtagatgagaatttaaggttgtacaatcttaatggagacttctggcctttggaaaagcaaacaagctttctcttgtgtctttttctcttttgtgtcaatactacttattaaatctatttttttaacttagtgatttgaaatggcactgtgataatataccaaactttttgtgtgtatatgggctattttgcctttaattgggtgttcttggacaagaattaaaaattcttatttacataagcaaaactttttcagtagtcatttttgatagtatttgatgttctaatttacatttcatgttcagtttgtgagatgttttaggtattatgtctcttctggggataagcaagaatatccccagaagagacataatacctaaaacatctgatcattttagtacttccattgttgagtgacctaaggtgatacacctaagagttattttattaatattttattaattaacccattatgttcaactttaataccctagctaaacttttccaaaggatgataaatttttgtgaatgataaattttgaagtaagtttttctatttgctgctaaatttaatttcattaagtttaagcatcagttattaagactaccctgtggtagtgggattggacagatttgttatggttagggtagagctaggaccactgggagaagttataggatgatgtgattttggatcaaaactaaaaagaacttgtctttccaaagaataaaaggggtttatgggaggtattcatccctgcttttcaaacataggctggctgcctgttgagctgggtctaatctctgagtggctagttggattagatggccctttcttactcagaaatcttatgaaaggaaaagcaggtcaagatggtagattttaaggggaggaaagcttctgtacatggtgtagctgttttacggtatgaatttcatgttgtagtgttaatttttgaacagttttgatgacatgttcttttgtcttcaaaaactgattttatgtgatttgaaaactgatttgaaagactattttaaaaagttattacttttttggtattaaagctttcagtttgtctaattataaattagatttttttttttaccgaataaacttttaaccagattatttcccatggaagtgtttttaaatgagcagtgccttttcctgagaaaatgggctggtttgggcatgatgagtaagcaaaagtctaaaagatactttcagcagctatgacctctgcaattccttttcagtttcttgggaaagctgttcaaatggattgatctattctcatattaaagggaaaaaagtttgattaaaaaatagaagtctcatttgttgtgacatgatacctaatggagaaattaaatttcattactcatttctggcattagttgtattcatttcacattgggttagcagtactttagaatggatattgctgaagtaagtggtgtgttaataagatgtgagtcatagaaataactgtgttgcagtttaaaaggagaaattgtaccatagctttgaaattttagtgtggtctataaagttaatcttagaaaagatactgtaaatgggattcccatgttggggaattccaatgtttggatttcctggattgttttgtcttttgcttgctttgaatgtttttcctcttattttaaaagataattgtataattgcgttgtgcactccggggccattatacttttggtgtagtgactgagtaggacaataggaatttagatgagtttttgcgttttgatggccgtttcaggaaatggttaatgctttgtctatttttctcattgaattttttgttttttcaaaatgatttgtagagtcatttatttttaaaaattcttactgcaaatggaatatacttacaaacatttaaacatatagaactatgtaaaatgagcctattttcttgtgttttgaagtgctttatattttttctttttttcaggtagattttcgttccgtcacccaggctggagtgcagtggtgtgaccttggcttgctgcaaccctttgcctcctgggttcaagtgattctcattgcctcagcctcctaagtagctgggattacaggtgcgtgccaccgcacccagctaagttttgtatttcggtagagacagggttttatcatgttggccaggctggtcttaaactcctgcctcaagtgatccacccgctgtggcctctgaaggtgctgggagtacaggtgtgagccaccacgcccggccctcaagtgctttatattttttcttatgtttgaaactttatttggatgtttttagttgatttgaatgatacagccttctactgattagaaataacttagagcaaactaaatttttgtatgtatttagatttgttttagattttgagttcaattttattttctttatcacactgcagtatgttgctgccttgctatattagttgaaaccatttactgtctcatagaattatatgcatgtctgtgtaaatagagaataagtgctctggaactttaggaggagaactagctgtagacatggtacttgagctggaagagtagaaccatatggaggctcaagttaggatttttgctctagttaggtttgtagatactatatacttcctttcgcagtgagattataaattcatttaaagtcggcaaatttatttgtgaacactgtcaaataccctgcattcaaaaacttcagtggaagattaaagtgagtgcaacttacaaagaatgaaaactacagcaataattaaaatgtgttttataagaccttcaacactgtcttttttttttttttgagagagggtctccctctgtcgcccatgttagagtgcagaggtgaaatcatggcttactatagccttgagcttctgtgctcaagcgatctttctgccttattcttccaagcagctgggactacaggtgcatgccaccacgtctagctaattttttattgtttgtagagacagggttctgctatgttgcccaggatggtcttgaactctgggctcaagcagtcctttctccttggcctcccagagtgctaggattacaggcatgagccaccgtgcctggccaccatcttttttccacttattctctgcttatgactttgcttctcatttcgtaaagagaatagtagcattaggaacagaattttcacaaatgtctataccgtctacctcctttcctgtcctgggtctgtgcttttatattcttcctttatgtttctacagatgaactggctgtgctaccatctaaggccagtcactctatctacttgtccaaattctgtcttttcttgctatttgaaaacattgcctctcactcctgcatcattgttctttccctttttactggatcatttttttttttgtcagcatattatcatgctgtaatttctcccatctttaaaaaccaaactgttaacctcatattctcctccaagttccatcttatttctctgcatcctttcataggaaagctgcttcaaagagttgtccacacttgctagagttcttctaacttttaaattcatttcaatcaggttttgatcaccactactctactgctttggtcaaagtcaccagtaacgtctgtgttgctaaattcagaagtcaattactagttttcattgtattttacttaccaaccccatttgacaaaattggtccgtctctcctccttaatagactttattcatctggcgtccgggacagcaaactcctagttttctttatagctctcctcagtctcccttgagagttcttcattttcctgttgttgaatttcagtgcttcagtcttgagacctggtctctatttatacccatttgtttgggattttatccaagtttatggctttaaatatagtccatttgctgaatacttccaaatttatatctccagccttcacttgtcatgtgacaactcttatttagctgtctcctggacatctccacttacctaaaacctaactccttatctccagccttaaccatgtccctgccacttttcccctatctcagtaaagggcagctcctttgtttttggcctagtctaaaagctttggaattgcctttggctttgtttattctctcgtaccccacatccagtccatcaacaaatcatcttggctctacctttataaagtatcaaaaatttgaccatctcacctgctaccatcatctctaaattatttcagttgtcacctaacagttctccctgatttcactttctccctacacccttccctagtcagacccctccagtagttttcccatattactgagagtgttagccacaatccttttcctgtaagaaactacatgaattgttaaccacatcccctctccctttcaaattctctttgacctcatcagtttatccttttgttcattctacccgaaccacgttgtccttactgctcttgctcatatatagcaggtatgttactgtctcatgatctttgtgcttgctcttccctcattcactgtattttgctcttcacttagatatggatagcaccatggctctatctttaacttacttcaggtctttattgagatgtcattttttaaaaatgagataatctctgatcattctactctaaattttaaccattaggagtttgagaccagcctgggcaacatggcaaaaccctgtctctatattaaataattaaaaaaaattaaataaaatttaatgactgtccacatcttcctgtgctccctatttctcttccctccttatcactattcttgctacttgttaccctttcatatactgcatactaattgttggtctgtcttaccacttagtagaatgttagctctgtgagtgcagggtttgtggcccttttactgctgtttactcagaatgtcctagagcagtcctgacatatggtcagtgctaaataacaaatgaataataaagactattgtggaagagagttgaaattacatattcataggtttgatttaagctgggttttgaaggataggtggagatttcatacaaaggacatggcaaagatttttagatttgattgcagggataaggtgaagtgctttaaatggaactttagaaggtgtttcctttggttgcctgatttagaatccatagtagcctcttactgctgatttttcccacttggttgactgctgatcttttctagctggtcgtcccatattttcttcaaaatctgatctagaactcccagataggaacctattcctatattcttaatcttgtcaaggggtttcctcatttatggaaccttccaggcatgacatgttggaattgtcttattagtgtcctcactcactttcagatagttgcgttttcttattagttgttccacccaagtatttctgtgttgaaattgatttattgtcattagatctacttaaactactgaaagtcattttaattggtctccttgcaactatttttaacctatccatttggttttatttatttagttagttatttgagacggagtattgctctgtcgcccaggctggagtgcagttggagatctaattctttagctcgtttctgctgcctcttgttcatgatggcttatcacgtgttctgttattttgcgttgtgggcttatatctggataataatttttaaaaaccttaaggagcctggcttggggaaggagtccaccaaagaggttatgcatttgtttctgccacgggtactctgggcaccaccagctgggggccacttaaattttttggctgacatatccaagatcatgcaagtagtttgggccctaaagccatgtgagaagaaactcatggataaaaatttttaagtaagactctgagtgaaggccaaattgggactaaaagccaagactcttgccttccattttactgcctcattatattgctattcactaatcttaaaataatttacttttgctcaggatatatctgcaatataacacgcatactgtatttgaaggttatcaactacatgatggctaatatttacttttagcaggaggagttcattgtatctaaaccttttgcagaatggaaatctaattaaatgatacttggctaccaatagtaaactttttatcactgtagagtacttaccataaatcatttttcttaaaaaaagattaacttgtctgtttaaaaaaaaataagatagtaatgtgggtttaaagaaaggtaaacatggtatgaagagtgtggcacgtttggaatgccaagtatttagattcagtgtgatcagattacagatagttttttttgttgttttttgttttttttaacctatgaacattatttttacaaataacctataataatagctttcagcttaggcctcacagctacttctgtaatattttaactgtattcaaataatgaaataaagctcttataggctactctggaagcctgtatatcttaaaggtgtattcatttagttgtccagacattgatttatactggaatttttatgaaattatgcattcctgtgttgaaaattacctttccctcaacttactgtttttgtttttttcaaatgtgtctgcttgcttagtatgttttgtggtggaaaaagattttcactgtgttcagatttcagtcttgaattttgatttgttaagtttttgctaatggtttttttgagccaccccagctgataaaattgtgtcagttgaaggacagaaatattgataaaattagtttttttgtgtcatttgttttcattgtttttaatgtgaagaaaaggatagcagaagcaagagcaactgaaacactatagtaaaaaatataattcaaaattgttgtattacttgaaatttaatagtatacttatcaaactgcctcagttttttctcataatgttaacaattcttatgtttatgtatttaagcttttaaaagtttagtactgtgcattcagtttggttacttaaattattgtttcaatgtgcaattttaaaagttgaacaattaaccaaacagtaaaatgtttgtaataatctcccttcaaaaaatgtaatgattctcattttttaggtatcatctatgagtgtatataatactcaacacaaaacttttagtctttctgctgtgtaatgtattttgctgcattacaatcttaattattttaaatggttgtgtgatgtgtcttcacatgtcccacactgaaacagtttcattgttttattatatagacagtgtggtgtgtcttgtatatacataaatatattatcctttttggttaagcagctctattgaaattctaataattgccgccagatttttatatcacttaaaattttaggtttcacttctttgttatattaatataaattgggtcattgtgccttctgagaagtttgtaaaatttaactcagtgatgtgtctcaggttttgtatgaacaaatgtaagttataggagagcgagtaaatagaattttaaaactatttgattagtatttgtaatacgtactctgacgaaacacgacttacatattatgcgtgttaacttattataatttttttttagttcttttaagatagggcaggaatgaaaactctcaatatagagcaggattttaaacctggggcccgtgcatattcttcagggaatccagaaacctggagattatatgtaaaacttagtgagtgtggatactttttttctttgagaaagcgggtcagtatctttatcagtttcttgaaagatttatgtccgagtgaaagataaaagacaatggtgtggaatgtggttttaaaatagtttggacttgctttcctattgttccatggatatttctctcctggttctcttgacagagaaatcctatttgccaccactggctgtttattgcattcagattggaatctattatgacttatgtgtgatgaggttaaagaggtaactaatattagaaagggtaagccaggctaggtggtacatgcctgtagtgtagttccagccacttgggaggctgaagtgggaagacctctggagtttgatgctgcaatgcgctatcatagggattgtgaatagccaatgtggtccagcctgagcagtgtatatatagagaccccatttcttaaatgtgtaaaaatactacacattttttgtgaaaactcgggttgtgagttagcaaaaatcaccagtgttatttcttccatgtgtgaaagaacaacatgagcgtctacatgtctccatgtttttcaactcaacaaacatgtattgaattgtatactgtggacttagaaaattttaatgacctggttcttattacccagagctaaattaactttgtctcaacctctttacttttatttttcagttttgcctccctgcttttaaaactttgtctttgttcttccctgaattttcctgtttcattctcagttcctttttgtctcctcttttttcctcctcatgtaattctgatgctcatgggtaaaatgtgaatttgaggtatatttattggtattgtagtatttattcaataaacactcatgttttgcctttttaaaataatattttatgaatttatcataaacaaagtttaaaactagagtattaaggcaaatgagactgtccccatgattctggcacaactccttagtactgaacttgcatacataaaatgttttgatcatataattacatatgattttgactttttagcagcattgaattgaatttaacaaagttttagtgttcatggttttaatacctatactttgagttgatatttgctgattgaaatcattctgattttgaatgttttatttcttagtttttatgtaatattgctgtgaactttttttttttttttttgagacagagtctcgccctgttgcccaggctggagtgcagtggcgcgatctcagcttactgtcactgcaacctctgcctcctgggttcaagtgattcttttgcatcagcctcctgagtagctgggattacaggcgcgtaccaccacgcccggctgatttttgaatttttagtagagacggggtttcaccatgttgatcagactgctctcgaattcctgacctcaagtgatccgcctgcctcggcctcccaaagtgctgggattacaggcatgagccaccatgcccagcctgtgaacatctttctatatgtttttttcttgcaaataaattcctagggataaagaattgggattgttgggttaaaggaatgcaaacattttcttcttttttattcttctaaaaaaaaaaaaacaggatacatgtggagaacgtgcaggtttattacataggtatatgtgtgtcatggtggtttgctgcacctactgacccatcctgtacgttccctcctctcagcccccacccgcaacaggccctggtgtgtgttgttcccctctctgtgtccatatgttctcagtgttccactccgacttatgagtgagaacatgtggtgtttggtgttctgttcctgtggtagtttgctgaggatgatggcttccaccttcatccatgtccctgccgaggacatgatctcattcctttttatggctgcagcaaacattttcttgattcttcatctcttggtgtctagttaggttcctctaaatgcatagtgagactcaggtgagctcaagtgaaggtgaattgaattgtgtgaagagagactcccgtgaaaatccagagacagaaagcttgattccttcacgcctatatatgggacctgggaaaggaaactagaaaatcattaaaacatttgaagaatcagtgtttcagaattcttgtggtctcataccctctcttcttgaacatttgctactttttctttctatacaggtgaatttgctgtgcttgatcataatttctgctttcctaaaacctaggtttgtacagggctgcagcttattcattaggcctttttgacttttaccccttttttcagcttctattactgctgctaagtgccttagcgtctcttcttcaccaaagcaaaaactcgaagcattccaactcattgttttgtgttttttctccctcgactgcccagcttttgttgaataggctgtgtattctatggatgctatgtttaaaaaaaaattctgggctcttttaaagcattcctggttgacgaatcacacttaatggaggcacagtgaaatgtgtctaattttaaaacctggatagttcatgttaatttgaattatcagggaaacaattctgtatggagtttcttttagtattttgttagcacatgattccttttcccccttaacttgttaaaaccttgtcttagtaaatctagggtataactaatactattaaaaaattgcttatggaagtatgaaatgttacttcagtcatatagattaatagcatgcctgttgaacaaacgacagtcattccttggtatatgcaggagattggcttcaggacccctgtgtatacctaaatctaagcatgctggaagtcctggagtactgtggaacctgagtatacaaagttgaccctccatatacttgggtttcacgtccagcaaatacgtattttcagtaacaattggttaaaaaaaaaattcatgtgtaagtgtacctgtgcagttcaaacccgtgttgttacagttctggcaaagtcttatattcaataaactcacatttatccaatttaaaatcaggtattttcttaggtgtaaaataattcttagaataagttacccgtttaggtagaatttggtttctttatctaatcatgacatatcaagactctccaaattgataatttaaaaacttaaaaaattctcagatttatttttacattaaaagtgtagcaattaactttaatttgctttatcctaaacatgtcctgatgtttaattatatctgtattatataccttgtctttttctacaacacatttgagatgaataagaatacaagtcacttttatgtggcttatgcatgtttgtaaggagcatcaatatctagaatctcaacatcagaatcatttatactttgagatttaattttagcagaaactacccttcacgtaagtgatatgtatattcaaggcagatgttggtagtcaaattacatcgccacccgcccccttcccgccccgggcgtacttactgagtccatctaaaagtagggctgatgttctgttgatgaggcaaagccttttatttagcaatttcggtaggatgttgatggcagcctcgcttttgctgtataacttgttttgtgcagtatggggtgcctttaaaaaactgagataagttcctaacttgtaatttatttcactattttatttttttgagacagagacttgctctgttgcccaggcttggagtgcagtggcagagtcacaggtcactgaagcctcgacttcaaaggctcaggtgatcctctcacctcagcctgcaagtagctgggactacaggctcacttaactacgcccagctaattttcttgtctttttttttttttttttttgtaaaggcagggtttcgccatgttgcccagggtagactggaactcctaggctcaagtgatccgtctgcctcagcctcctaaagtggtgggattcaggcatgagccactgcgcttggtctgtaatttattttaatgcaaaatgccacatcctaacatttcaattttaattttattagatttttatatccttgatagatcccactgcatcatgaggctgatagtcactggtgtaaagatgcaagcagttggtgactggtcttaatctgtaaataaaccacctctttttgcgtgtgtgtgcatttcagaatatgacacttttaatgaatgtccattgagttggtaatagtacctccttattttcacgtgtagtagttatcaacactgtacaataaacaaaaaagttaactactaataaagtaccaaaagtggatatttcgggaaaagaaagtaatgaatatttaaattttttctcttcaattaggatattttcacatgatttagaaatggaaggatgttttctactccttctagttaccacttgtcttatttttcatagtatatatgaattgtagttggcaaataaatcaagaatgtgatttaaagaactaacctgtttagatttgtaggtcaggttagatttgaaatgccacttgaaagagcagcagttttgactttaatttttatgagactgacaggttctttttttttttttgtccccaccttcttccctatttaggttttataggatcacattgacaaaagtaccatggagttttatgagtcagcatattttattgttcttattccttcaatagttattacagtaattttcctcttcttctggcttttcatgaaagaaacattatatgatgaagttcttgcaaaacagaaaagagaacaaaagcttattcctaccaaaacagataaaaagaaagcagaaaagaaaaagaataaaaagaaagaaatccagaatggaaacctccatgaatccgactctgagagtgtacctcgagactttaaattatcagatgctttggcagtagaagatgatcaagttgcacctgttccattgaatgtcgttgaaacttcaagtagtgttagggaaagaaaaaagaaggaaaagaaacaaaagcctgtgcttgaagagcaggtcatcaaagaaagtgacgcatcaaagattcctggcaaaaaagtagaacctgtcccagttactaaacagcccacccctccctctgaagcagctgcctcgaagaagaaaccagggcagaagaagtctaaaaatggaagcggtattgtaatctatttaatctatttaattttattgtatgatttggagcttggaattgagatattctgttaggtacatacacagaatgtttaatattgaatttgaaaccatgattattcatttcattatgtgtttgcttcattaacattaattgctggtagaaattagtattgatcataaaatagcactttaaacttcagggcctgatgcagtggctcatgcctgtaatcctagcacattgggaggctgaagtgggaggaccccttgagcccaggtgtttgagaccagcctgggcaacaaagtgagacctcatctctacaagaaattaaaagaaaaaaaaaaaaccccatacatcttataaatatccaactttggctattt

SEQ ID NO: 149 - DNA, 27204 bp, Homo sapiens
  source 1..27204: mol_type = other DNA
ttattggttggcagttcagccaatgagcgggcctgttactagtttgcggcatcctgtggtataggggaagcgctccgggcctggaatccctacgcgtccctttgggtttagcacgatgagctcaatcggcactggggtgagttcgctgtctgtcggtgtaatagtttaacctaaggattggggttgaagggaactcggacagaccacatggggttcgcggacccggggtgctctgagaccgccttcggctgggtgggccatttgcagctgtttggagaccggtcgtctttatcccctatatgctaggcctgcgtctcaggtgaccgtgactcctgaagcttttcagcgcaggtgtagccggcttggcgtcgccgcagtgaggtttggagccgctttggattgctgagtcactttcttcagccacttagggaaaccgaaagtggaaactcgtggggcttgaaatagtgtgttctcttgagaaccaccgaggcagtgagatttgggattccggggtctggagatcgtgctttttgtggactgcgtttgcagttcctagggtgctgctgattcacaggccttctctgtctttaagtgtgcagatcattgaccgctcagtttaagagtcactggaaatcctgtcggaacagaactaataaaaatggtctgaaaaacaatctgatgaatccttcagtttttcctttctcgtttttcctatacaaattacctaacagcgcttgtaggcatttattccgtaaacgtttaaatggttacttaggaacttaacagcttcagacttttcatagactgttgaggattttgcagtgggacttgttaacttgtttggctttcctttgttaaacgtattgcatatgtgcagtcagtttactccttttatgtacttctctatatagaaaatacagtttctaaaagatttattggttatttgcactagagttattgaataatgagtttctcagttcctcaatttctacttcttaacaagattctcatgctcagccttaagttcaagtaccggtgttctaaatttgataataggcaacttatgtctggaatggtttaatccattcagttatgaatgctaaagttctgccatacttttcttggataagtaaatgctcaatattaaatcttgtagcaaactgactttgcaattatattaatattaccttgaattaatagtatttcattctacaaaccttttaaagaatacttgataatgtaaccatgtgggatattttagtaacaatggtagggttaatgatctgggtttaacagatcaggaaacagactcagaaagtaccactgctgaaggcttttcttctgtcttcatttctcccaagaactccagatacgaatatttgtttgtctgcttgacatgtctgttcacttgatcgtttaatagtcatttcgtactgcatgtgaaagtagagctctgggttttctcctcaccttgccattttgcatctactacagtcttcagctcagtgaatggtcatatgaaaaaatctgttattcatctttaattcctttttttactttactcccagaaccaacgctttagcaagtttatttttttatttttattttgtttgagacggagtcttgctctgttgccaggctggagtgcagtggcacgatcttggctcactgcaacctgtgcctcccaggttcaagcaattctcctgtctcagcctcccgaagagctgggactacaggtgcgcaccaccacgcccagctaatttttgtatttttcgtagagatgaggtttcaccatgttggccaggatggtctccatctcttgaccttgtgatcagcccgcctcaccctcccaaagtgctgggattacaggcatgagccatcacgcctggcctagcaagtttatttttattatttttatattttactctactctcaaaaaatattcccttctacctcttctctcgtctaagctactaccgctatctttggaacaccttatctttgcttctgttgttctctctacagcttattttccgcataaagccagaatgatgtttttaaaaatatagatgataccactccccctgcttaaatttctcattgcatttagaataaaatacagagtcctttttccatcctggaagacacaacataatctggccctcagctacctcactaacacagtttactcttctttctgctgcttacagtgcttgggacacagtgaccttatttctgtttcttgactgtgctagccttatttctaccctaagatctttgtgccaaatgtcaagaagacttttccttcatatcttaaatggctagctccttgtcatttaggtttgactcagcctaaatataactgcccagaaggccttccctgatgatgtagtctgtagtagttcattgctttactcttttattttcatcttagtgccttttctgatttactgctgtacctctagcacctagattcatgtctgatgtgaaactgaaggacttaatgaatgagtatacctttgtattccgtatagtaacataatagatactcattaactgcttggtgaatgccgaatgatttgtttgaagtcttttagtttgttaatggcagagttatcgttacaaatttaaatgttcgaactccagtgctggttctactgccccatattaatctttttcaaaaatgagttttgtagtctgggtgaaaagtgttctgacttcacctgggacctgtatccattactcttcaatagctgaaatcgaaggtatatagctttatcttagctactgttgctgctctgacaagtttccctttcctctcttgaaagcaaggtctttgttgggatataacaggttcctgatgtttcagccatttagaggggaagaaactgtatggtcattactgccaaagatacaagcttactgttgcccttttctccttaagtatgacctgtcagcctctacattctctcctgacggaagagtttttcaagttgaatatgctatgaaggctgtggaaaatagtaggtaagaaacatttaaccaggtattacatgtctccttttattttatatatttttggcgattaggctttgttatgttactttggtacaaattagtatatgtccccaaatctcaatttattcatttccagatctctttctaggccagatgctttccatgagccccagtcctatatttctcgttgattccaggattatccacttagattttccatgttgcagagtgtataaatcacattcattatcatctttttgttttccattttcaaattcttgatttgtatcataggcttcctcagccattaggtttgtgaccttgttattttttatttctcatacatcttgtgttttaaatgtcttatgcaattagtcacatgttcgattcagcaaagattttttctatgtctgtttctgttttgagacctgagtctcactctgtcacctaggctagagtgcagtggcacgatcttggctcactgcaacctccgcctcctgggttcaagtgattctcttgcctcagcctccccagtagctgggattacaggcatgtgccaccatgcccggataatttttgcatttttagtagagacggggttttgccacgttggccaggctggtctcaaacccctggcctcaagtgatccgctcacctcggactcccagagagtagccccagtcctatatttctcgttgattacaaagagctgggattataggcgtgagtcactgtggccagcctaaatacgattttaaaaagtcagatttatgcaaatatgaggaaatatctttaaaaaattgaaaccttaaaaacgaatgtgttttttcctgaatgaagaaaaaatgcagccgggcgtggtggctcacgcctgtaatcccagcactttgggaggctgaggcgggcggatcacctgaggtcaggagtttgagaccagcctggccaacatggtaaaaccctgtctctactaaaaaataacaaaatacaaaaattagccgggtgtgatggcacacgtcgtagtttcagctacttgggaggctgaggcaggagaatcacttgaacctggcaggtggacgttgcagtgagccaagattgcaccactgcactccagcctaagcaacagagactctgtctcagaaaaagctaggattttaaaaatgagacgtagtttcactcttgttgcccaggctggagtgcaatggcacaatgttggctcaccgcaacctctgcctcccaggttcaagcaattctctcagcctcccaagtagctgggattacagacatgcaccaccatggcccgctaattttgtatttttagtagagacagggtttctccatgttggtcaggctggtctcgaactcctgacctcaggtgatccgcctgcctcagcctcccaaagtgctgggattacaggcatgagccacggcgcccggcctaaaagttcttctttttaaagatgtattaacctgtcctttgatactacacccaaagtgaacaaatgctagtttcttattttaaaaaaaaatgtttatttattttaaaaaagaggcatggtctcactcactatgttgcctcggctggtcttgaacttttgggctcaagtaatcctcctgccttggcctcccaaagtgatgggattacaggtgtgagtcactgcgcctggcttattattccttttttttaaaaaaaactttttttgggggcaggacataggatctcgctttgtcacccaggctggagtgcagtggtgtgattacagcttactgcagactcgacctcctggtctcgagctattctcctccctcagccccacaaggtagttgggactacaggcatgtgccaccacgcctggcaaattttttgtagagacagggtttcaccatgtggcccaggctggtctcaaactcctgagcccaagtgatccgcctgcttaggcttcccaaagtgctggtattataggtgtgagccaccgcacccagccgaagtctttgaattcttatgaaaataattttgacctcgaagactgcctgaaaggatttcagagatttccagattttcaagaatgttttaaacagtgtggaagatgttgagttgagataattaagacaggcttcctgctgggcgtgagccacgcctgtaatcctagcactttgggaggctgaggcaggtgtattgcttgagctcaggagttcgagaccagcctgggcaacatggtgaaatcccgtctctactgaaaatacaaaaaattagccgggcatggcagtgcgcgcctgtaatcccagctacttgggaggttgagacaggagaatcacttgaacccgggagatggaggttgcagtgagccaagatcacgccactgtactccagctggggcaacagagcgagactccatctccaaaaaaaaaaaaaaaatagggacagagtttcaaaatgttggcctggctggtcttgaactcctggcctcaggcaagcctttcacttgggccttccaaagtcctgaggttacattctgacctgtactgcttgagttcaactaagtttgcaaaccttttggggaaattcatttaaataggcagtagtgaagaggaaatgtattctagcatccaggataacctcaaagacatggaatcaaaaatgaacatgaggtttttgaaggttgacagtgaggtaaccagtagagtacagaatttataacaggaaattgaatatgctcagggggttctgccagacccttaggagtttaaacttgcaaggggagccatggaagacacctaaagtgttggggaaggagtgtcagaaattcttagaaaatttgttgtgtgcatctgttgttcatttttctgggaggaaatgccatagtttcatcagattttaagaggcctgtgaataacacaattcccctgctttttagattgtggatccctttttagattctgactatggcaaaatgaaacacagctaggaattaggctggtcttagattaaacggattagagaagtagaaaagatggtgtagtaatctaggcctgaaattataaggatcccaatgctggtataattattgtaaagaagtggacatgaaggaaattttgaagaaaaaaattaatagtaaatagaagctcaacatggaggatgtagagcttggtgatgctattatccaaaacagagaagttgtgccggtagtcccagctactgaggctgaggtgagaggattacttgagcctcagacttcaattcaatcttgggcagcatggcaagactccatttctttaaaattaaaaaaaagaagaaagagaaagttgagataattttaccagaaaactgtacaatcaagcattgcttattttgtctctattgtttccgatcagaactacctttatcaaaaaggaatagaagaataaagtgtaacacattttcatcttgaaatggcaacaagtaatttctccacattttacttgaggttgtgtgtgtgtgtgtttgagacagggtctcactctgttgcacagactggtgtgcagtggtgcaatcttggctcactgcagccaccacctaactgggctcaagcaatctctcacctcagcctcccaggtagctgggactacaggcgtgtaccaccatgcctggctaagccaggtttcgccatgttgcccaggctcgtcttggactcctgggcttaaaagatcctcctgcctcagcatcccaaagtgctgagattacaggtgtgagccaccatgcctggtcttaagaggttattttaagatctttttattttaaacagttgtagcagaacatatattttatttttatatacgtattagaagcaatatgtttattatggaaaaattggaagaaagagatgagcaaaaggaagaataaatcataatccttctacccagagcagtcactgttaactttttagtttgtatctaaccttttatgtctgttatgtaccatttttaatggacatgaatttatgtcaacatttgtttataacatgattatcataagccagacactgagccatattgtgtttcgttagcatcatttttatacttacatattaatatatttttagtcaaatgatgtactagattctggagggagggtcacatgatatttatatggatttaatgtatttattacactttagtgtgttttctcttcctggttttcaaatgttttaaggtatttggcatgccttaaatgttacttattttgtttttttgttaaacttaagtttatgaagtttcttttattttcagttaaaaaactgattttcttctccttgtttcagtacagctattggaatcagatgcaaagatggtgttgtctttggggtagaaaaattagtcctttctaaactttatgaagaaggttccaacaaaagactttttaatgttgatcggcatgttggaatggtaaggtcatgtttaaaatgttcctttttgtcttgtccaatttcttttgaagtaactgattggaatagatcactgtgcagtcacaaaagtaatcagagcaagttactgcatttgtccagttcactgtccagtagaaaggcagcattctcataaccttattagtgatgggggaaaaaccaagttgctgaaagaagagcaggtgagggagagggctggggagtatgcgtagaaatgagatcttggcagcacacattactaatgaaggtatatgcttgagaggtgaagaatctttagctttctgtatctcttgtggggatcactgtcaaagtaaagatgccatcagatagcgaacacctttatataaggtggaacatcaggaaaggatgtttaatgaaaaggaaaagtgaacacatccataatagtttcatagggcatcactgaaattaagttattcatgcagctggtatctaagttatgagtgactaaattgcaagccaagccatagatacatgactggtatatactaaagttaccctacatagatggcagacttggcttagtgagaaccactactgaaagaaaaaaaaaaaaaagaatcaaatgattctaaccctgccacctgaaaaggaaaggaagaaaggagaatatctctatattaggttttatgctgggagctctttacataaattaccttgtttaatcttgacaacccagtgaaggttatatcaatgtcattttcttttttttttttttttggtttgagacagagtctggctctgtcacccaggccggagtgcagtggcgccatctcagcttattgcagcctctgcctcctgggttcaagcgattctcctacctcagcctcccaagtagctgggactacaggtgcccactaccatgcccagctaatttttatatttttagtaaaggcagggtttcaccatgttggccaggctggtctcgaactcctgacctcaagtgatccatctgcccgcctcagcctcccaaagtgctgggattataggcgtgagccactgcgcccggcctaatgccattttcacaggtgaaaaaacagatgcacagcaagtaaagaaaagctgggattcaaacttgggtctgcatgttactcaagagccctttctaaatgaaaagacaccttatatgacccacatcgttcagctgatagctttcttatatctaaatgagatttaatgttacacacaaacacaaaaagtactggtaaagtataaccagtaaaccataaagctaatttttttcttcttcaaagattattttatctcaacaatatgtttctcctgaacagatttttttattttgctgcaaatgacaggattttattttattttttgagatggagtctcactctgtcatccaggaaggagtgcaatggcgcgatctcagctcactgcaacctctgcctcccgggttcaagcaattctcctgcctcagactctcaagtagctgggattacagacatacgccgccacacccagctaatttttgtatttttagtagagacggggtttcaccatgttggtcaggctggtctcggactcctgaactccagtgatctacccgccttggcctcccaaagtgctgggattataggcgtgagccagcgtgcccagcctagcattttattctttttaaaggatgaatagtattccattgtgtatatatacattttctttttactgtttttttgttgttgttgttgtacagatttttctcgtcacccaggtactaagcctaggacccaatagttattttttctgatcctcttcctcctcccaccctccaccctcaagtaggccccattgtctgttgttcctgtctttgtatccatgaattctcatcatttagcttccacttataagagagaacatgtggtttttggttttctcttcttgtattagtttgctaagaataatgctgaacagatttattattgccagtgaaactgatatgttttgatgaaacttgctacattgtaacctagctagtaggaggtgatcttgtattcttttatgtactagcaaaagttaatattttgaaaaaaattatgcatgcatatatatatgtatgtacacacacacagaggtcttgctctgttgcccaggcttgagtgcagtggcatgatcatagctcactgcagccttgcgctcctgggctcaagtgattcttctgcctcagcctcccaaatagctgtgactacaagtgtgccatcacacctggctaattttttagtttttttaagagatatgatcttgctgtgttgctcaggctggtcttgaactcctgggctcaagcgatcctcccgcctcagcttcttgagttgctgagattacaggcatgagccaatgtgccctgtcaacattagacattgaagagggctggagaaaattaagacttaatatcctccctccttccacagttgtcatcttcaagtgatttgagaattatatgactttacagtaagctttctctaaagcaacagaagattctttaagtgatgtaacttactggcatgggttaccttggggaagctattctaaacacgcgtttccttgtctgcaaaacaagagtgataatagtacttggcacatacagttgttgtgaggttaaaaattattatgcaaaatgcttaacatgtaatgagtgctcagtatctcttagtaattatcattattactattactgggtagcgtaggaaaaaaaggctattaaagattgtgataccacttttaaattctgtaactgtcctgggctagagggtttcaaaaacttggttggtttatggtaccttaagtgtctcagtagtttttctcatggcttccctaggccgaaaatacctaatggtttcatttattaagtatttagatccaaagaacttagtgtttacatcctaaaaacttagtagccgttttttttttttaaatacacacatagtgaaaaatatttttatttaaaaattaaaatgttttattttaagcaaccaaaatttctagtatatacactgcacaacctcccaaatttggatgtggccactgtcatttcctgttccacactgatttttgcacagtacttactttttttcacagcaaccactaacagccaagcttctcaaagatgtggtggcattgaaaggaatgtagtaaaacgatctaatgttcaaacggaactacttggacatttttctccaaacttagaatgtgccacactaggccaggtgcagtggctcacacctgtaatcccagcactttcggaggccaaggcgggcggatcacctgaggtcgaaagttcaagaccagcctgaccaacatggagaaaccctgtctctactaaaaacacaaaaattagccgggcgtggtggcgcatgcctgtactcccagctactcgggaggctgaggcaggagaatcccttgaacctgggaggtggaggttgcggtgagccgcgattgcaccactgtgctctagcctgggcaacaagagcaaaactccatctcaaaaaaaaagatatgccacactaacatgtgatttcactgcagtgcctgaggacctctcggcacatacatagtaactgcaattctgtttttgtttttgtttttgttttgagacaaagtctcattctgttgctcaggctggagtgtagtggcgtgatctcggctcactgcagcctccgcctcccgagttcaagtgattcttgtggctcagccttgggagtaggtaggattataggtgcccgccaccaaacctgactaatttttgtatttttagtaggggtttcaccatgttgtccaggctggtttcaaactcctgacctcaggtgatccccctgcctcggcctcccaaagtgctgggatcacaggcatgagccaccgtgcccggcctagtaactgcagttctaagccgcaaatcttgaaagaggaatggtttatcattgtagtttattcagccaataggctgaaaaaagatttgcgattgtgccttttagaacaaaacagttacaggttgagtatctctcgtctaaaatgcttgggaccagcagtatatcggatatttttcgattttggaatatctgcattatatactcatcagctgagcatccttaatctgaaaattcaaaatccaaaaagctctactgagcatttccttttttttttttttttgagatggagtctcgctctgttgcccaggatggagtgcagtggcgcgatctcggctcactgcaacttccgcctcccaggttcaagcaattctctgcctcggcctcccaagtaactgggattacaggtgcctgcaaccacgcctggctaatttttgtatttttagtagagacggcatttcaccatcttggccaggctggtcttgaactcgtgaccttgtgatccacctgcctcagcctcccaaagtgctgggattacaggtgtgagccaccaggtccggcctgagcatttcctttgagtgtcatgttggcactcaaaaagtttcagattctgaagcgttttaaatttcagatttttggattagatatcctcaacctgtaataactttagagaaaagaacaaatttgggccgggcacggcggctcacacccataatcccaacattttgggaggctgaggcaggctgatcacctgaggtcaggagttcaagaccagcctggccaacatgacaaaaccaaaccctgtctctactaaaaatataaaaattagccaatcccagctactggggaggctgaggcaggagaatcccttgaacctgagaggcaaaggttgaagtgagcccagatggtgccattgtgctccagcctaggtgacacagtgagactctgtctcaaaaaaaaaaaaaaaaaaaaatctgaccaagacccatggtttttattcgttataatgaggtagtggtagtaaatcaggggaagaggatttatgatagaagtagtcctgaatattggccgggcacggtggctcacgcctgtaatcccagcactttaggaggctgaggcaggcagatcacgaggtcaggagatcaagaccgtcctggctgacatggtgaaaccccatctctactaaaaatacaaaaaaattagccgggcgtggtggcaggcgcctgtagtcccagctactcaggaggctgaggcaggagaatggcatgaacccaggaggcagagtgtgaagtgagcggagatcatgccactgtactccagccctggtgacagagcgagaccccgtatcaaaaaaaaaaaaggaaatgtcctgaatatgaacattggacaaagcaatgaagttatacttactaaatttctaaattataatttcatactcaagcatcaaaatgccttgtagagagacctttaagccaaaaaagtttattttgaatggtaatacttgttaaaaaaatgtttaataagtctttattaattgcagactttgatttgtgataggaatgtgttcctctagtaaattggtgcttttttttcaggcagtagcaggtttgttggcagatgctcgttctttagcagacatagcaagagaagaagcttccaacttcagatctaactttggctacaacattccactaaaagtaagttgataacatattgaggaaccttttggacagtaatagaagtttattaataagctcttctgcttccctccatagcatcttgcagacagagtggccatgtatgtgcatgcatatacactctacagtgctgttagaccttttggctgcaggtaagaaattttgtgaattattcaaaaggcagatctgtactatagatatttattatgttccccagcatcttagccttttacatacttaaaaatagaaactcgtcgataagtattagggcaatgattaaataaaacagtgtacatagaaactacttgaggctgggtgccatggctcaagcctgtaatcccagtactttgggaggttgaggtgggaggatccctcgcgcccaggagtatgagaccagcctggccaacgcagtgagaacctatctctacaaaaaaaatttaaaatttagccaggtgcagtatcacatgcctgtagtcacagctacttaggagctgcttgagaggatcatttgagcccaggagttgaaggctggaatgagctgtggccataccactgtactctagctggcgcaatagagactctgcctctttaaaaaaaaaaaaaaaaaaaaaaaaaaggtttcaatagtgaaaaggactatatagatctgaagtgattataaaacaaggaactgataacaatgactttaatctgattataataagctctcggtgttagtccctgatattcttaggtaattttaaaaattacgtctcacaattcccattaggcacggtttctctttctgttgaagtgctgatattttattgtggggtaaagtggagattcagctgcataaagacctggaataggtataaatattcaaatttggcttcacagagaagacttgtgactagatttttctaaaatgaaaagacatgtttggcttatgacttaaaacagtcaaacatgtttggtcaaaataatacatatactaacatctgagtgctcagctgtagtcctacctttgagttgtttatcatcagtcatatttaattactaagatattaaagaaaacttgagttttattctattggtaatattacattagggttttgtttttactttttgagacagttactgtcacctgagctggagtgcagtggtgccatcatggctgactgcagctttgacctggctcaagcgatgctcctacctcagcctcccaagtagctgggaccacaggcatgggccaccatgcctggctaattaacaaaatttttttttgtagagacggggtctcaccatgctgcccaggctgacattagtcattcttaagcttctcagttaaattacattatgaaacactttgttttcagaccatgtaaaatacctttcaactgagctctgagttcatcagttaacttctctactctttttaagggagtaagaatagtagagataactttttttcataactttttttttgtttgttttgttttgttttgagatggagtctcgctctgtcgcccaggctggaatgcagtggcacgatctcaggtcactgcaacctctgcctcccgggttcaagctattctcctgcctcaacctcctgagtagcagggattacaagcacctgccaccacgcccggctaatttttttatttttagtacagtcagggtttcgccatgttggccaggctggtctcaaactcctgacctcaagtgatccacctcagcctcccaaagtgctgggattacaggcgtgagccaccgcactgggccagagagaacttttttagtaaacatctattgggcactgagttagtcataaatgtggagacacaggtgtgaagtcacattgataaaatattagtgatatgataaagggacaacaattagggaacggactctttctggacaggaggcaaggaagagtgtgagatgtagggagacttggtagttgcaagcacaggaactggtatgaaaatacgtgcgccagagagagttaagtatgcttggtgtgtagagtatgaggtttagagatgatactgatgtaggaaggggtccagtcatataaaagtctgtgctccatgctgattttcttcaaagaaatgttgaaaggctttaaaatagtgacaatgagctatatatcctgaaggataagtctcatatcggtagaaaatggaaggaaatgacggtagggatgggaattgaatagttaaaatattccgcatataagatgatgtgtaagatgctgctgatttcttttctactctaaggcaaatatagttgtcccttggtatttgtgggggattggttttaggacctcccatgaataccaaaatccaaggttgctgaagtccctgatataaaatggttaagtatttgcatataacctgtgcatatcctcctgtatgttgtcatctctagattacttgcaatacctaacacagtgtaaatagctgttacactgtattgtttagggaataatgacaagaaaatcacagttgttcagtacagaagcaatgttttttgaaagttttctatctgtggtttgttgaatccacagatgcagaactcatggaaacagtgcccactgtatgtcacaatttcagaaaatcagtatttcatacaatcagctaatagcctaatttgttgagcacagaaaaatacactgaaccaattctgattattgcagagaaatgattggcaggatattgggaaatagaatgaagggtggaaagaatttcacatggattcagtatactctccgtcaggaattttgttcccttgatctttttgtgtttatgccttatttattgggccctctcatagttgtggttttcatctatcgttactcctttccctgtactgctagactttccaggagaccttcatcagaaagattaatactaaacaaacaaaagctacatgaattttgaataatctcatgtaatagttttaattaattgaaaccactgtttcaaagtacttactgagttatatgtgtattagtaatttatctcagaaagaaaatataactgcattttaaaataattttttcacaaatacttttatgttattgccatggtttaagctgtttgtatactttcatgcagtttcatgttagggtcttacagtgtgaatgacggtgcgcaactctacatgattgacccatcaggtgtttcatacgtgagtaattttgaatcatttgaaattctattttagtttaatggtatttcattagcatttaagtctcattataagattatatgaaattaaaaaaaaactcattcaaggaaagtaatttttcttttttttttttttacaacaacctcttgtccaacagaatttttttttttttcctttttgggggaacagggtctcactgtggcccaggctggagcacagtggtgtgatcacagctcactgcaacctctgcctcccaggttcaaacagttcttctgcctcagcctcccgggtagctgggattacaggtgtgcaccacctggctaattttttttatttttagtagaaacaggcctttgccatgttggccagactggtcttgaattccagtcctcaagagatctacccacctgggtctcccaaagtgcgagtattacaggtgtgagccaccaggcccagccatgttttcttatcattaataactgatacgaggcagaggaaagattttttttcagtatgttatttatagaaactgtatagtgcatatagtattttgaatatgtgattttcctttattactataaacactgtcttaaaactgtatttaatgtcttttttcctcattcttgcccaggctggagtgcagtgacacaatcatagctcacttcagcctctcaactcctgggctcaggcgatcctcctacctaagcctcccaagtagctgggactacaggctcatgccaccatgcctagctaatttttgtatttttttggtgtctatagagacaaggtctttccacgttcccagggctggtctcaaactcctggccttaagcagtcctcctgccttggactcccaaaatgctgggactacaggcgtgagcatcgatgtccagccatgtcatcccttttattttatttatttataagatggagtgtcactctgtctcccaggctggagtgcagtggctcgatcttggttcactgcaacctcttccgcctcctaggttcaagcaattctcctgtctcagcctcctgattagctgggattacaggcatgtactaccatgcctggttaatttttgtatttttagtacagatggggttttgccatgttggccagctggtctccaactcctgacctcaggtggtctgcccaccccggcctgccaaagtgcaaggattacaggcgtgagccacagtgccggacctaattttgtttcagacagcgtctcgctctgtcacccagactggagtgcagtggcgccaaacctccacctccccagttcaagcaattctgcctcagcctcccgagtaggctgggattagaagcatgcatcaccacacccggctaatttttgtattttcagtagagacgaggtttcaccatgttagccaggctggtctcgaactcctgatctcaagtaatccgcccaccttggtctcccaaaatgctgggattataggtgtgagccaccttgccctgccttcccttttaaagagaaggtttaaatgtgatttctaagagctttccctaaattattaccatttttttttttttttgagacagagtcttgctcagttgcccaggctggactgcagtggtgcaatcttggctcactgtaacctctgcctcccggattcaagggattcttgtgcctcagcctctcaagtagctgggattacaggcctgtaccatcacacctggctaatttttgtatttttagtagagacagactttcaccatgttgcccaggctggtctggaactcctggcctcaagtgatccacgtgcctcagattcccaaagtgctgggattacaagcactttgtgtgagccactgcacccggcctgttaccgtttcttaactgttttcttatccttacatttttgtcgtttttactaattgaagaaaatgaagattcttaaatatattttgctgtaacagaagtatatatgtgtacatcctttttttttttttttttgatggagtctcactctgttgcccaggctggagtgcagtggcgcggtctcagctcactgcaacctctgcctcccagattcaagcgattctcctgcctcagcctctggagtagctggcattacaggcacctgccaccacacctagctaatttttttgtatttttagtagagacagggttttacaatgttggccaggccggtctccaactcctgacctgaggtgatctgcccaccttggccttccatagtgctgggattacaggcatgacccaccacacccagctgtgcatccttatctttaaaaaaatttacaaaataataaaattgggggtttagagtactgaactcataggaattaactttatttctgtctctcaggaatatataatttcatttttcattgtcatagtgctaaaatcttttccgttcctgttccccaaaatgtcttaaagtgtatatgattacataatttacatatttttggatatacctttattaaaaatacaggttgttttggaattgtttggtattttagtatttttgagccctttggcattcatcagaatgtgtttgactatatttttctatacttgcttttaaaagtcatttagcatcctttcactaggttatagaaacattagtagtcattaattacatatgatagtgtactaattcagtgattatatatatttttttctaaatagggttattggggctgtgccatcggcaaagccaggcaagctgcaaagacggaaatagagaagcttcaggtaataattaatgcttgaatttttactatgtcgtcatcctaatgcagtgaaattttatcaccacagacatttcagtctaaggcagggatgtccaatcatttggcttccctgggccacacataaaatacaccaacactaatgatagctgatgagcttaaaaaaaaatctcatcatgtgttaagaaagtttacgaatttgtgtttggccccatgtggcctgtggctggggaagctcggtgtaaggatatagtgtggtttgatgttgagagtttatgaagctgctaagtcactgaatgggaaagctggtaacatattatctgtagagttgtgttatacatccctttatagattctgaataactgctataaagcctcaatctagaaaaacacaacttttgatatgatttcacaaaatccttgaaacctatttatgaatctctgtgagctctagtttgaaaattttgtttaaaattttgagttaataaaaagttatatttttcctatattctttctttggaacacagcttttatgtctggctgtgctccaccggttctcttagctttgctcctagccaggtaaggcataaagcctacactcttacgactacccactttttctttcacaaaattcagctattagtgtgaaaaagttttcttaaaaacttggttttccttttagccatgcgttgatcaacttaaagacttcatggatactgtttcaatattattgattacctgtcagaaacttgcctaaaaagcaggcataccatttatcagtgttttggtaaactgaagtgagatacaatttcacatacatttaatgttaatgctgtactagaaccctgctcaactaattactcattcaacttatttaagaccagcttctagaaaatacttattagtgcttggcatttatacaatgctaagttctagaaccccctataaaacctaatttgtttcgtattttagtaaagctgacaaaaggatcttagaggtcatttagcccaagctcaactgcagattaaacacactgcataggaccacagaatcagctggttctgaacagtatccagaccttatgagtcttagacctatgttcttttccattgcacacttactagtatgatgctaggttcctatcttctactcttttccttttgttttcatctctccatactattatatggaaatttgaaaattagaatatttatgtcagttgagggggattacccctgtaatcctaccagtttggtaggccaagttgggaggactgcttgagcccagtagttccaagaccaggctgggcaaaagagtaagaccctatctcccaaaacaaaatgttagcgaggtgaggtggtgcgtgcctgtagtcccagctacttgggaggctgaggcaggaggactgtttgagccccagccaggagttgggggctacagtgagctatgatcacgccactgcactccagccagggcaacagagcgacaccttatctcaaaaaaataaaggaaattagaatatttagagcagttactatctgtctttctgtagttaaatcctagcaaggaatgggaaaaacaataaatcccagagaaaaatcaagaaaaaaaaatcactttaattgaggaacactttcagtttgtgacaaaattatgctgtgaatcaggtgttgcaaattatggcccactgcctgcttttgtgtaagttttattggaacacagctacattcagtccatggctgcttttagaatacaacagtagactttaacatttggaacagggaacagaaaccagagccatacagctaataaacttgaaaatatttacaagttgatgctttacaaaatccatctgctgacccctgctctgtaccattgttctcttctgatggtctgtttactaaaaaataaaaacttcacaaacatgtaaaaaatagatttgccatttaaaatgtgcttttcaagtttgactttttaggatgcaattaattcactaaatacagaacttaactaaggacaaaaatttaaagatcagcattctttcccttcccatcacgctcaacttaacatgaagaactgtaaacatcctaagcttacaacaaacctatctagttagacttcagttaaccacttacacatccccctcccccatgaactatttggaaaaagctgcaggcgtaatattggatccctaaatactttattctccttataccattatcagacccaagtatcatctaatagtccataatcaaactgcctaagcagtttctacactgtctttttaactatttcaaactatcaaggttcgcattttcttccttagaacttttagtctttttcttccccaaaatatttgagtccatgccagttgcctttagttgtacccaaataatggtttgtctatttcctaaaagtagtactcttaaatttaaatttagtgttatttttgttgtcattgttccttcttcctcatgtggttgtgcaggcagagcttgagcatccagatttcaaaattaaaaaataaaagataatctagtttaatatatagtagttgaatcaccttaagtctagactgctgtatgagcacccattatctttcactatattccatcatcccccaacatatccacagtagatgaagggcagtttgctcaaacattgttttgatcctgtcatgtctgttcagaaatgcctgtctattcagaaacccacgtctaataacaaaatcttggactggttactatcaaaacccaacaacatacagactcctcagctaggccctagggatatttttctaccttgatttccaaatgttcattgaaagaatgcttaattctaatttggaaaaaagtttttggcttcccacttctgctttacacgttcatctttcttgaaatcaaatccaatccaatctatattctaagaacctgctcaaatcttggttcttcaaagctttccctggtattttgcatttttgctttgaatagttccacgaaggataacttcttactccttccttcatctttctgtatcttgcatatagtaaatattaatgacttgtttgcattttgttatcctaacttggctataaagaaaatcagatgtcttcaccagtcgttcaaacttcaggtctgcctacagattcatagatggctgtggatttttataattttgtcacaaagttagtggtaactacaggttatctcagaatatcttttttggcgtataaatttttttcttttccttttttagacagtctctctctctgtcgcccaggctagagtgcagtggcgtgatcccggctcactacaacctctgcctcctgggttcaagagattcttaggcctcagcctcccgagtagctagggttacaggcgcgcaccacctccatgcccagctcttttgtatttttaagtagagacagggtttcaccatgttggtcaggctggtctcgaacttctgacttcaggcaatccggccgcctcggcctcccaaagtgctgggattacaggcacaagccactgcacccagcctggagtataaatttcaaaacattaaaatatgaatcaggaaacttcgattctggtctttttcagactttaggttattttccttggttttatatctgagtataaaagtgaaaatagttattacacaagtggaaaatgttcttctgatgaacagtatacattttattttctatagatgaaagaaatgacctgccgtgatatcgttaaagaagttgcaaaaatgtaagttgaaatttttcttaccatccacaaaaatatttcatttgacctttgcatatatatattacattaatcctaagaagctgttttcctgtaaaataacttagtgtataatttttagaaggtaaatttaacattctaagaagcctcacgaaggaagaaaatgtttttaagcaatattttttagtagtaatgaataggatgggaaaaatagcttgacaaaataaactcctgttacaggttaaggacatataccattagggtcttaatttgttagctcccaacttctcaaatctcttaagtcctaataatagtaatcttaagattgcctctattgtaagaatgcttacaaactttataggttacaactaattatttcaatacatgatccatgaagctggctcatttatataatctgctatttatttgggaaagatatgtttcactttttcaggtttattataaaagttcctataacaaggtaagaagagcagtattacaaaacatttcaacaaccagcttaagaaaccctgaatagtttattacaggtatataaagtagaatactattaatatgtaacaggtatttggacagtaaacaataaaaaagtcaattaacctgggtagtgatgtttctaaaattttgtgattctctagatcaaagagtgtagacatttggtattacaaaaagattccaacaaaatacgttgtgtagccagctttttagattcaaaagttatggataatcgtaattcataacaactctaagtattccacattagaactacataaacaaggtctagtcaatcacctgtctgtatggtagtgtatcaggttttacatctaacaatacgtggaagaaaaaaattccaatgggctctattgtttaataaacatactatttacatcacactcagagtctcttattaaccggtccatcattactgctactgcctttacccctcttgccacctcctcccctccgccctcctagtttcagttgtgaagcaagcagaagccattctatgattgtcagttaataatggcaacactaggaaccaacatgcagcagagctgctaagaaaggaagtcagatatcttccttgaattgtatagtatgttatcatgatatactctgtttccttcaccgaaccaatcctttgaagtccttctggaaatcagttcttaccatcttttatatttaggtataatggtagtcatctgttaagtgttccatgttaggaaagccatcccttcatcatttaagaaaatggagcagcatgttatcttttacttagttgtagaaaatcaagatcctctcatattatagcaaggttttagaagaccctccaaaaagtaaggtatgtaactcagtgcatagtattagataaagctatactctgctactgtacttaatttgatacttttttttttttgagatggagtctcactctgtcgtccagactggagggcagtggcacgatcttggctcactgcaacctccgcctcccgtgttcaagcaattctcctgcatcagcctctcaagtagctgggattacaggcgcccaccaccacacctggctaatttttgtatttttagtagagacaggctttaccatcttggccaggctggtcttgaactcctgaccttgtgatccacccaccttggcctcccaaagtgctgggattacagatgtgaaccaccgcacctggcctcttgatactttttatgttactttaatatgttgcatgacagtgcctccttctttgctgtaatttgtaaggtactacaatgtgaaggccaggttatgtggcatatatgccattataaaatggacaaggagcttaaaaagactactgccaagaagctataggttgaagagaccactaataattgcaagcacataaattagtttttttttttttatttttttgaaacagagtctcactctgttgcccaggctggagtgcagtgtcgtgatctcagctcactgcagcccctacctcctgggttcaagcaagtctcctgcctcagtttcccgagtagttgggactacaggcctatggccacctcacctggctaatttttgtatttttagtagagacgtgggttcaccatgttggccaggatggtctcgaactcctgacctcatgatccacccgcctctgcctccccaaagtgctaggattacaggcacgagccaccatgtccagccaattagttggttttaaatatatttaagttaatggacaaaatattctaaaagggcacagttaatgacgcctcttcctagtgaatccgtgttctttatgaggtatcttttatagttgtatctttttttttttctgagatggagtctcgctctactgtagcccaggatggagtgcagtagtgtgatcttggctcactgcaacccctgcctcccgggttcaaggaattctcctgccttagcctcctgagtagctgagattacaggcgcccaccaccacacctggctgatttttgtttcttagtagagacagggtttcaccatgttggccaggctagtctcgaactgacctcaagtgatccatccgccttggtctcccaaagtgttgggattacaggtgtgagccactgtgcccagccaagttatatctctaaagcaatgtgcaaaaataaactgaacttgggttgattaggtatattcaacatttgtcgggagagtagatgtttcattttatttcagtccctgtgtaatttgtcttctctaatgttaaatactatgtagaatgtgtctgtgtaattttatagatacttttattatggatggacattctaatttgtactgactttgggtctgtgaactacttcaatgtttggaggttaccaaaatcttacctttcccttttctattctagaatttacatagtacatgacgaagttaaggataaagcttttgaactagaactcagctgggttggtgaatgtaagttatttttgtacatttatttgccttaggaatgatctgtaccacagctaatttacaactgagtgtcctttctaatataatgaaagctaaagcaaatttactaggttgtctaatgaagggaaagttctgcttaataattgacttaagttgtgaacacgttattttttgaaacatccatttcatggttttaagatactatgctataaattaatgctcaggatttataaatagcataatttactttcatttccataagaacttaatatgtaggcacatataatctcatgtagaagcagcacacaaaaatattcgagtattactcatagtacaactttgcaaccttaggtgagtcagatatgtggattgggtagatcctatggtatactgcaagttacaatatggtactcaatttaaaattcatttacacatgtggcttaatttacagtaactaatggaagacatgaaattgttccaaaagatataagagaagaagcagagaaatatgctaaggtaagccacagcacaaaaacttctcttggccaggtacagtcagggaatcacttagcccaggagtttgagaccagcctgagcagcacagcaagacccccatccctaatttaaaaaaaaaaaaattctctaaccaaaattatgtgttgaataatataaatagactggggtggtttctatgaaataacactgagagttcagttgaactaaagatagaaattttctaggttatctctagtgggtaaagttgccttggttccaaaaaaaaaaaacttgggaggtttagactgcaaagagttttttaggacttttaatactttaaatatttgttcttttttttttttttttttttgagacggagtcttgctctgtcacccaggctggagggcagtggcaccatctctgctcactgcaacctctgcctccagggttcaagcgatcctcctgcctccgcctcccaagtagctgggattacaggaacatgccaccatacctggctacttttgtatttttggcttcaccaataatacagagacgggttttcaccaggctagtttcaaactcttgaactcacgtgatctgcctactttggcccccgtaaagtgctgggattacaggcatgaacactgcaccaggcctcttaagtatatattctatcaaagatacagtcattgcatgttagagcaacatttgcttaattaactttgcttgggtatcttattctgaaactgttcattcagttacaagtagaggaatttaaccacttaattcaggttgttgtagcttaacttgcccacaggtgtgggatataacaattttaaaaatcaattttaaacacctgttttctcttaacaggaatctctgaaggaagaagatgaatcagatgatgataatatgtaacatttactccagcatctattgtattttaaatttctactccagtccaatgtaactatttagccctggattatacatactgtccaattttcattaaatttttgtcttataactatt

SEQ ID NO: 150 - DNA, 32744 bp, Homo sapiens
  source 1..32744: mol_type = other DNA
tcatcagatcaagtcgactcgctcctctccttccaggccctggtgaagtacggaatgccggaagggccgggctcaaagctccgcctctggcgcgaccgacgactggagcgcagggcaggggtagaggctcgtagatggaactggtagtcagctggagagcagcatggaggcgtcctgggggagcttcaacgctgagcggggctggtatgtctctgtccagcagcctgaagaagcggaggccgaagagttgagtccgttgctaagcaacgtaagtgggctgtgttcgcttccccgcgctgacgccctccggcttccctcaagtgcctgccaaataagacccagaaaaggaggaccgcaccgggacaggggagatgctggagcctgaaccctgggggatggggtctgaaggcagccgccgagattcagatgagattggcgcagttatgaacgtgatagcagcctagcatactctagaaagaaaagatgaaaagcgtcgggtggaagagatgcagcgttgagtggaagctgcgaacatgatgggatgagcggccctaggattatgtactcactgctgttagttagtatttttgtcaccttattttctccaccagtctcgtgaggtctttgcaagagtcacaggattttcctcttccgacttagtcatggggggagggaaaataataaacattttaatacagaaattcttagcggtagaatggaagtggcttggtagtaagtgcatagcacgttcctgaccctaaagcctgtgcagtgggcactccgctttttaactcgagtcctagacactgttcccaggactttgttcccggtgctgtttgtggggagggggatgttttcagggatactgccagaacaacgtgaattgcttctgtttataatattgtcattgcaagatattcctgaccatccttccagtttggtagaactaattcattagatatataagtagagattagttgtgcagtcctagtaattgaggagaaacaactgcccacagcagtcccaggttgactcagcaattctttagtaatcacatgagctgaggccttatccctcctctctctccccactccattcccatcctatcttcatctcttgcagtcacaaggttagtcatggcccttcctgaactctgcctgtcttgtgtactggtggaaatcattttcctaagaaaccctagattcctggagctgcagtagtgggaggtgggaaggaaaggaaaggaaattagtgttggttaagcaacgagtgtgtcatacaaaccctggtggtttgcagcttttttccataatctttcatttatggaatttctttacgaaattttaacttcaccgtccaaacatttaacactactaaatttgtgtgcttacaggaacttcacagacagcgatccccaggtgtttcatttggtttatcagtgtttaatttgatgaatgccatcatgggaagtggcatccttggcttagcttatgttttggctaataccggtgtctttggatttaggtgagtcttcatattttagcatcaaatttttttttccattttgataatatacggagaagtagagagatagattccagaagctgctattatacaatttctagttagttatttctggggttttagcatttttcttgttattcttgttgctagtgtgtaccttggagggctactacatagcttcttaaatacacagaagtgtgactagtttttaaaaatgggaacttgatccacatttcatttataatgaaatatgacacttaagagtggcatattcattgtatctccttggccaaagtgaatcaaagccatgcagattaacttccaaatagcaattttgtgagtgcaaatacaacacataatcttttcattcctcgctgtctctttgtattgttaagtagtcttatttcactttcagaggccagacatgtgttttgtgcctgttcttttttatgtttcaggacttagcttgtaggccagtttgcccaaaatagaagacaatcctggatattctgtgctttcatagtactttgtatattcattctgttattataattgttacaatgatatgtttggaaattaatgttcccactaaactgaaatcctttacaactggaggtcaaggcaggcggatcactggaacccacgagtttgagaccaacctgggcaagatggtgaaaccccatctctgcccaaaatacaaaaattagcctggtatggtggagtgcgcctgtagtcctagctacttgggaggactgcttgagcctgagaggttgaggctgcagtgagccatgattgggctactgcactctagcctgggtgacagagtgagatcctgtctaaaaaatttaaaaaatagaaaaatcctttataactggaccttattcttagcatctagcaccacatggctaatagaatgaattaacaaattggctttgtcagtagaagcagatctatttactaggaaatttaaaatgcctagggagtctcttttatgtttatttcctgcttttattccaaattttttgataagcaaagcaacttttaagtaacccaacttgcttttattatggaatgtactcacaaactttcattatttttaaaattaaaaactatatgtgacaccttaagcaagacatagtcagaggactttttttttgattctctttgaaaaatcataatttatgcaccagggtcttacatgcagatatatactgctgaatgtgtgctcacccagtcatagcaaccatcatttttggtgatgctaaagtgttattttgtgaagttcctgatgtcagtttaatgacatttgtacttttacctctcaattttatttattaacaagtattaactggaccacagagagaaaatttcttcaatgactggggcagttcactggggatagctgtatagaagcttgtcctgctggtgtcttcctaaaaatgaataggaaattatctaagttttttctttcacactgttggtgagaggacctcaatcattacattgtttgcacatttttcaaattgcatcattagaggtgtgttaactacattattttaatttagtttggtttggagagtgtgtgcgtttaatagatgctagaaaatacagcctaaataaatcttaagtacaccttaataagatgaaggtatgataaggaggtcaatatcactggaagtagagggaggaagggaaaaagagaagacaatgagattgcataagtaaaacttctgtttagacttaaaataagaagaaaaccagtcataaaaaggaaatattacaagattatttaatggctgattcagcagtcagcagacaagactgcaaaatgaggaagtttgcttgtatttttaaaaaagtttggtttttatttttttttattttaaaatcagtatattttcatttaaataaaattggtaaatacaaaaaagtagaaaagtatcttcttaatttccttaatgaacataattctgctactcagagatagttcctgtgaatatttgactgttaagcaatttgtttttgtaatgagacaccatacaaaagacaaacttttgggaggttttgaccaggtgttcttttatgttttagcttcttgctgctgacagttgctctcctggcttcttactcagtccatcttctgcttagtatgtgtattcagacaggtgagtaaaaatgttatgctgcttcatttaataaaggagtctcttgagtttgtatctacatatagaactggatgtctcaaatctaatatccagtgagcatacatttttattagatagggtgatcggaatggagaatttgaaaaaccaggatatacagacccaatactgtgggggaatatccaagcacaggatgggaggaggtaattagcatttttacctgctttcctccacaacacaacctaattttctggagtagagtagatcatgggagggtctaaaaggtgttcaaaggatccaaaccttatgcttatggagaaatcattttctcaaggagagaacaccttctcagagctactgttgccttccctgcccccatctgcctgctagtcagaggtagggatggcagaattaggattgtaggaagtaaggtcacaaagctttaatttatttagacacattttgtatttttaattgcaagtctagaatagggtagttttttcctaagagaaataagtatgtgcagttaattcaatatatttgtgtatatactttttcccatttggaattttattatgcaattcagtcatgtattgaataagttcttttaggatccagtaaataaaagtatatgaattatagaagtgcttttctaagattttccttttgtcattaacaaatattctatgttcatcagtcctggtctttttatctgtctagtctcttttgtctttggattaggtcagctttgatgccaaaatcatgggtttaattcttatatggatgagttcgttttgctttatctggccttgtgatgttcagattttaagaagaaaagtagatacacaaaatagataaaaatggatttcttaattcatttagtgtttctataaaagaatacctgaggctgcataatttataaataaaagaggtttattttgctcatagttctacaggctctgcaagaagcatggcccttcttatgaggggcttttctgctccatctgcatctagtaaggggctcaggctgctttcattcattgtggaaggtgaaggggagctaggatatgcagagatcacatggcaagagaggaagcgagagaggaggggcatgccaggttctttttaacaaccagctctcatgaaactaataaaagtgaaaactcactcattaccccaaggaaggcaccaagccattcatgagggatctggccccagggcccaaacacctcccctttggccctacctccaacactggggatctgatttcaacatgagatttggaggggtctgacaaaccaaactatatcagtgagactattctgtgctgaaacaggtgagtgaagcccagtgatgtttcttaagaattttaagactcttcagaataattctgaagccactgctctagtttgttttcctaaaacctgtccatcatcagaaatactcatagatctttttatacacagagagctctaagcctcagggattctaatttcaaaaatctgaggtgagactcaagaatatgtttttaacaaggcaaaaccagtttaggatccatagtttatagctctaacttgtaccagtgctttggccagccagtgccagatatgtttttaacaagtcctccaagtgattcttatgcaaatctagtttaggattcatagtttatagccacaacttctaacagtgctttggccatccagtgcacgcctttgctctcaaggggcttgggtgaatgtgcagacagatgaaaatactaggaagcagtacaaatattaatcctaaagtaacaggttgttcataaaagcatcctgaatttaggaataatagctttagataaatatatttgtaaatcctgctgaaacttgaattttaattgcatgtattgaaattttgctgaatgtgaaaaaaattttacttaattgtgatactttaacatcttggtagattctttcaattcattctgttaaaagattaatactttagtcaactatgtggcaattatgtctttcaagcttcattttaaaacttcattttagttttaatttaagtaaaatgttttatttcggttatgtgggagtagtattcagtgtgtggagatttctaagtaattttaattttttactccttcggttcacatgtatttaactttaagattctgacactgtgtttgttcttttctgtaactctggggcgtatgaagtgaatatatctgtttctcttcttttttctttttctttgatttctgtagcctacttgggcccatgaactaactacttcatggttctgcctgcacattgactcacctgtcttccgttgattgaattccttcaatctttgtaaaattctctgtggaggtaggcttttccttttttttttttttttcaatacatacattcatatataaagactagagtataatacgtaactaactctctcccaacagtttgttggactgtcataaaggattattatgctcagattgaattcattggtaagagaaagagctatcatgagtttttatgaaataacttcttcatttatttgctggtggtaaagggtaaagagaaattttcatctttataaaagtaaaggatttcttcacatgaaattctactttagattttatggagcgtttggggtctatcaggacttttcatgggagctgaggtggaatgtaaagaaccttattctctctagccttcgtttgtcatctgtaaaatggcaatgataacacttccttcttggaattgttctgagagtgaaataaaataatgtatatgaaatgtcaagtccttggcaaatgagtgctccctggggcaaaaatgcccactggggcaaaaatccctaaagattgcagggtgttgtacacactactatctcagaaatagttggttcgttgccattcttttggaatacttctcatgctctgatactaaacccacagctcccctccactggcttccatgtcactgtcaactggagagagtgagagtcctagaactctgcatacctctggccgaaccacaactccctagtcgttgatccctactactcactggattgtcaccattatttgccttgagaccatttggattatgacattataccatctatctcaatttgtgttagtcatttcaagtatattaggttatctttcatttctcagactcatcccatatggctgtcatctgtttctgacctcgtcttccactgctctctaactcctgaaacccttccactgtgctctctggaactcacagtcaatcatcagcaaaactcacatgtctctaattctcttctgaacatttctgtctgtttcttacactacgagaacctcctctgaggcttccctgtagttctctcaagtggtcagtcttttctctttatgtctctcatactaatttgaagatggtataggtgtcctgtttgtcccacatttctgcttctcaaccatcttcctctccttgaaccccccagcttttaatctcatgaatgtataccatctacggctctccttactattgtcatctatagactcctagaccatttcctgtcatttcatgaaagttttagctaaattttagcttctactcaccttttagttctcttcagtattacccctgttataattctggatgatttcaatatgcatgtagctaatccttctaatgctttcagttcctgaacctcttcttctctaatgatcatattctctacctacactggccacttattttctcctatggtcataccactgatcttgtcattaccaaaatagcatttgttagtatctgcccatctgccaccaccatctcctttgtttctaactcaccctctcaagtacttcaactctgacagttttcacccctaccaagacttctatcaattcattgattctaccacctttgcactgaccccccacactcattcttacttccctctttatccagttgaggttttgtagtatgttatttaatcccttgcctatcccttgaaccatcatatttccctggtaaaattccaaccatagttaaatataactctgcctgcttcacatttgcacccatgcatttgaatcttcctgaggaaaagcacaaccatgcagactgatatcactataattcaacgtctagtgtacctatgatgctatcacacaattctggttcacttctttggttcatcacttcatttagctcattcatctgctatctaggagattgcttttttatatcttctcctgtcaaaccttcgacacttttttctttgatttcacccataactgatattcttcgctttctgtttcactgaaaaaatagaagcaatcataaaagaattttataagctcttgccaccacttatttatctgtgcctatatactctgttccttgggatgaattctttgtgtttatttctaaggcctaccccccaacttgtgctatgatcccacctgctcttgcctacatcactccagccactttctcccttctttcttatttcttggcccttttctaccatttccttcctatcattttacaaatagtctaatttctgtcatcataaaaatctcttttactttgcatcttttgaatatgcctcatgtcttcatgacagcactccttaaaataattgtctaaaccaggccaggtgtggtgtctcatgcccgtaatcctagcacttcgggaggcagacccaggaggatcacttgaagtcaggagtttgagaccagcctgggcaacatggtgaaaccccatctctacaaaaaaaaatacaaaaatttgtgtgaggtgacatgagcctgtagtcctagctactggggcagctgaggcaggagaatcacttgagccagggaggcagaggttgcagtgagctgagatcatgctgttgcacttcagcctgggggacgggagtgaaaccctgtctccaaaaagaaaaagaattatctaaaccagatgtctccagttcctctcctcccactcctatcaggcttttccactgaaactgttgtagcagtgacttccacattgctaaatccaatgatcagttctcagtcagcagcatgtgacagagctgataactccttgctctctgaaagacaagtcacgctttcctagttcttcctgtttcatcaaacactccttttctcttctgttgaattctcttaatctccccatcctctaaacattggtgtacccctgggactattcctctgatctcttttcttttcccttcttttcttttttttttgagacagagtctcactctgtcacccaggctggaatgcaatggtgtgattttggctcactgtaacctccgtcctgcagggttcaagcgattctcctgcctcagccgtctgagtaggtgggattatagatgtgtgccaccacacccagataagttttgtatttttagtagaaacagggttttgccatgttggccaggctggtctcaaacttctggcttcaagtgatccacccaccttgtcctcccaaagtgctgggattacaggtgtgagtgatctcttttcttttacactcattatcgggctcatggtgattctgaaatttatatccctggcctggaactctcccctgaatttcagtctcatctccagctgcctccgtgacatctccacttggatgtctaacagctcagatttgtaaaactccccatctttatactaccaatctacactttctactgttcccatctaagtaaatggtaatgtctttcttctaattgcttaggccaaagatctttaagttattctgtatctcccctttttcccctcatcctgcatgttcagtccatgccatactgttcccttcacttcaaaaaaaattttttttcgagatagtgtcttgctgtgtggcccaggctggaatgtagtggcgtgaacatagctcactgcagcctcgacctcctgcctcagcctcccgggtagctggtaatcacaggcacacatcaccatgcacgtcaccacacctaactaacctcagcctcctgagcagctggtactacaggctatgtgcgtcaccacacctggctcattttttaattttttgcagagatgggctcttaccacgatgcctaggctgttttccaacaccagctcaagcaatcctcctgccttgacctcccagagtgcttgggattacaggcatgagccatcgtgcctggccaaaaaattaataatctgataattttctcatttaattgctaccacccatcttcagttactattaccaccatcaaaagtaatagtttatctttttgtttttacttccactcttacttcctgcagtctattcttaacaaaacaaccataatgatctgttaatgtaagttaggtcatagcattcctttgctcaaaatcctccagttgcttcccagttcaatcaaagtaaaagcaaaaatcattacaaagtccaacacaagtcttctgccctttttatctccttgatttatcttccagtactccctcactggtttcagtcacacttttaatttttatcttatgtaacatatacttatatagcacttagcatcattctaaggactttatgaatatgaatattcatttaatcttcataataatattatgaggtacgtatcaatattatttccattttttgaaatgaggtaactgtggcacagagaggttaaagtaacttgtccaagagaggtgaaagtaacttcccagttaggaagtataggagccaggattcaaacccacacagtctggctctaaaattgtgctcactcttccccagtcgtgctgggtagtctcctgcttccatacctttgtgctttctgtgctcttcttggacgtttcttcccccagtttcccacatgactttgctcactcatcaccttcaaggctttgacaaatcttacctcttctgtgaggtctttttatacaatctcatttaaaattacaaacagcaacggttgatctacagtgtcatcaaggaaggaggatctacctttctgttccattattcttgtgtgtgccttccccatccttgaggtctaggacgacttgtggagtgcagacatcgcatccgtgttctagagagcagaaagagagaaagggatgcctaccagctgaatctcacttaagactccattttcttgttgccagaacttaatatgcccgatggccatactaaattgcatagggacctagaaaatgtagcgtttattaaaggtggcaatgagcccaactaaaagtcagggttctgttactcaggtagaagaagggaagagacaaccagcagtctctaccccaccagggttccatctttatccgtacttgtactttactatctttgaataacattataaacttttatagcttagctaccaaaaataggttgacgactctcatccatgctgccgaaacatatcagctacctctgatattggagatctccatttagatgttccagaggctttgtgagctcaacgtgtttaaaattaaacttatctttcatctttaatggctcaaatgtgctcctcttcctgtaccgtacctccgtgaatggtaccaccagtttatatctccttcacctcgtacattcacccagttataaattaattttgtaaatatttctcggatctgcctaattctccttccttattgctactgtgtagatcacgccataacccctccccaggattacagtagagttaaatcataacaggtatttaagttcatgtcattttaattcatacagttcaaaagtggggaagaaaataactttaaatagtgctgggtaatcctgcctgtattctactcagtgaacatatattcatctggggactgagtgtgaggtgggaaatataataatgttgctccctctgttatattttttttctttaaagataacttttttttttttaagacaaagtctcgctctgttgtccaggatggagtgcagtggcgcgatctagccaaaccgcaacctccgcctcctgggttcaagcaattctcatgtctcagccctctggcatcttaagagacttcctatgagttcctgcctccaaacttttttttttttttttgaggcagtcttgctctgtcgcccaggctggaatgcagtggtggatctttgctcgctgcaacctctgcctcccgggttcaagtgattctcctgcctcagcctcccaagtagctgggattacaggcacccaccaccacatccggctgatttttgtattttttagtagagacggggttttacagcgttggccaggctggtatagaactcctgacttcaggtgatctgcccacctcggcctcccaaacggttgggattacaggcgtgagccaccgcacctggccagataacattttttagcatactgtcttcatggtgctgttttaagagatttgcatgtattattctcacaatagcaatgtgaggtagaaattgttacatccactttagagataggaaactgaggcactgagtgattaactagcttgcttaaggttgcacagctagctagttagaagagctaatattcgatttaggcaagctaactccagagtccactttcataacactgtgctgccatttccccactattataggaacctggaagcttattttctggagaaggtaaactaaaaggactcagcaatcatagatattaggtgtagttaaggccaagatcaccttactgaaaacagggagattaagtgaaagtctactaactgaaggagagtcccagttagtaggagttctgagactgctggcagcaagtcttctactttcacttaagggattggaggaatattttcaacagaatttctcctgcccaagagaaaagacctacaggtaaaaatagttgagggcccttcaagaaagagctgagtacctcctgtttaatcatcatatagttaagcataccactcaataagcctcttctgtgtacacagagcttgtatttagtcttttaatgcatcacacttacgtcaagaaatagccaagtatcaccagatatttcaggaaaacctttaatgtgaaagatatatactaaaacagccacatacacacacacaagccaataatgagatacctctacacatgtattagaatgacaaaaatctgaaacactgacaataccaaatactggcgaggatgtgggacaacaggaactctcattcattgctggtgggaataagaaatggtacagctactttggaatacagtttggcagttttttaaccaaactaaatataatctcatcataggatccatcagtagtgctccttggtatttacccaaatgagttcaagacatatttctacacaaaaacctccataaagatgttaataacagccttatatttaccaaaatctggaagcaactaaaatgttcctcagaagtgaaagaattttaaaaactgatatatttgtacaatgggatattattcagcactaagtagaaatgaggtgccggagccttggctcacgcctgtaatcccagcactttgggaggccaaggcgggcggatcacctgaggttgggagatcgagaccaacctgaccaacatggggaaaccctgtctctactaaaaatacaaaattacctgggcgtggtgctgcatgcctgtaatcccagctactcaggaggctgaggcaggagaatcgcttgaacccgggagttggaggttgcggtgagctgagatcaagccattgcactccagcctgagcaacaagagcaaaactccgtctcagaaaaaaattagctgggcatgatggcgggcacctgtaatcccagctagttgggaggctgaagcaggagaatcgcttgaaccccggaggcggagactgcagtgagctgagatcatgccattgcactccagcctgggcgacaagagcaaaacctcgtctcaaaaaaaaaaaaaaaaatacccagcatggtggctcacgcctgtactcccagcactttgggaggccgaggtgggcggatcacctgaggtcaggagatcaagaccagcctggccaacatggtgaaaccccgtctctactaaaaatacaaaaattagccaagtgtggtgacacacacctgtaatcccagctacttgggaggctgaggcaggagaatcacttcaacccaggtgatggaggttgcagtgagctgaaatcgtgccactgcactccagcctgggcgacagagcaagactccatctcaaaaaaaaaaaaaaaaaaaaaagaagaagaaatgaggcatcaagccatgaaaagtcatggaggaatcttaaatgtatactgtcaagtgaaagaaaccatgtgatccagcaattcctcttctgggtttatacccaaaggaaatgaaattggtaccttgtagagatatctatgctcccatgttcattgcagcattattaacgatagccaagttagagaaacaacctaagtgtcagtaagtgagtatataaaaaattgtgatatgtacgtacagtgcaatattgttcagacttaaggagatcctgccattttcaacaacatgcatagacatggagaacattatgctaaatgaaatgagccagacacagaaggaaaaatactgcatgatctcacattcatgtggaatctaaaaaagtcaaatacatatgaacagagtagaacagtggttatgtgggggatgggaagatgttcatcaaagggtataaagttgcagttatgtagaatgaataagtctacagagctaatgtacagcatgatgactatatgtaatattgtttactgaaaatttgccaagagagtagatttcaggtgcttttaccacaaggaaggaagaaagggaggaggaagggcaagagggaaggaagggagggaggaaagaaaagataactgtgagagggtagatacgttaatttgcttgactctagtaatcatttctctgtgtatatcaaaacatcatgttgtacaccttaaatgtatataataaaacaaaaaaatctgaaaaggctacatactgtatgattccaagtatgtgacattctggaaaaggcaaaactatgcagaaaataaaaaagatcagtggttgccagagtttagcagagggagcgtgaataggcagagcaccctcacctttaggacagtgaaatgaatctgtatgatactataaagtggacacgtgtcattatatatttgtcaaaacccatagaatgtacagcactaaaagtgaaccctataatgtaaattatggactttgtgtgataatgacatgttaatatagatacattgattgtaacaaatgtaccactctggtgcaggatgttgattgtaggggaagctgtgcatgtgttgggggcaggaggtatatgggaactctgtactttctgttcaactttgttgtgaacctaaaactgctcctaaaattattaaagaaaacacaaggaaagaaacagactcagaggaaaagaggaaacagacaatacaagaccagatgaaaacttaaaaagctacatttaataactttagagaactaaaagaagatcctgcattcttgaaacaaaaataaggaattataaaaagggtatattcagaaaaccaaaagtcctagaagtcaaaattagttcaattgttgggttgggagagttacagaagtttcctgggggtggaaaaaaagagaaagcttgaaaatgggagagaaaagataagaaaattagaagatcagtccaggaagtccaacatgcaaataatagaaattctgcaacaagaaaaaagtaaaagggatggtagaaaattattaacaaaataatacaaaaattgatgtaactgaaggaaattagtttcaagattaaaagttttcctcccggtatccagtataatacttgtaagataattgttacccaagacatactgtgaatgatcagaaatccagttatatagataatattctaaaagcttacagagagaaggaacaaacaacacaaaaaaaattcctgcaaagaatcaagaaccacagtagtgaaagtcttcctaggagcaatactgtaaactagatgactataaaacaatgccttcaaaattcctggggggaaatgattttaatatagaattctataactagccaaactgttgcttaagtgtgaagtttgaacaatgacattttcatatatacaaggtctcaaaaatttttattcacccttacttagtgaacaatagagtataccctttaccaaagttagagagtaacaaagaaacaaggaatcaggcacaggaaagaagtggagggaattcccaggacataactaagcagcagatctaagcaccatctacagattggagttgtgaggttttttgtggttttgggagggggtgtttagatgggatctcactctgctgcccaggctggagtgcagtggtgtaatcttggctcactgcaacctccacctcccaggctcaagtgatcctcccacctcagcctcctgagtagcttcccacctcagcctcctgagtagctgggactacaggtgtgcaccaccacacctggctaatttttgtactttttgtagagatggggtttcaccatgttggtcaggctgatctgaaactcctaagctccagcgatttgcccacctcagcttcccaaagtactgggattatagatgtgagccactgcctggctggagttgttcttttcacaaaggcacagtcctcgctccaggtcatgcctgccctctggattgtgttcaggatggaaactcttttcttattcctctgagtaaagggattgtctttctcatttgtcggtctaactcttaatttgtgttaacagtgcttgagtagattagcagtcaggccgggctgttaaaaaagtcagaataaaatagggattgaaccaaggtagtaataaggtgaataaaagaaagaaacaggttaacaaatggtggggtgcagcagagttccagttgagaggagctgatatctgagtaaatgtggacaataaaggagaagtagatgtctggtgtatctcccaggtttccggcttgagccactggattaatgatagtgtcatcaatgaagataggaacacagtaggaggaggttgttcaaaataaaaatgagttcagttttagacttatatgtaggtggacaaggcttagaactgaagcacaggctagaaattcattcattcaatactcttgtctactaataagaaagagataaataagagccagttacttccctgaaaaagctcatagtctaataggggaaacaaatacataagcaaataatttatatctagtatgataaatttaacagtttaaatatgtataaggcatagtgatatcttagaagagagagtgactttgatatgggcaggaggcagggaaatactgggtagaagagggtggttccccagcaaaggcccccaccccccaagcctggaaacccatggccctaattgggaacaggcatttctgttttcatgtccaaatgttgccttctgcctgccatccccgcatcctgtacccatataaaccccaaattccaggtccacaggcaggagagcagacaaacagaggagcagaagaggagcacagtaaaggagagaagagaaggagtgtttgaacgtcaaggagaggtcggttggggacagctggagaggagattggccatgggacagcagaactccaggggaagatcatcttcccactccatcccctttccagctccccatccatctcactgagagccacctccatcacctaatacaattcccacattcaccatccttcaaatccgtctgtgacctgattcttcctggacacaggaaaagaatctgggtacgaagagggcactgggctggttaatacttaagcaatctgtggaaggcagagctaaaagagcactgtagcatgcccactggggcttcaggagttgcaggcatgtattcctagatgctgctgtggggctggagcccaaaagcgctctccccgccccctacacctgccggtctgcgagctccgcctcctgtaaggggtttgagagtgcagcagccgaacagaacagacaagccacagccctgtcgcaggccctgcccttcgtgggggatcaggggactctcccgtttcaactttcccttagttggagggtgagggtcagtaaatgttcatggacaactaagctgaaaaggaatttgactagcagacaaggcaagagagaatattccagcatgtgcaaggatacaaagccatatactacctattgtattcaaagtaccaaaaatagtttactgttattagtagtacataaagtacaaaggagaaaattaaactggagagttagacaagtctcagatcccaaggaatttgtagtttttgctgaagcagtgagaagccactgaggttgttgaaaaagagtcaaagtagatactggaatccactgttggttgcttccaaaaagaattttggtcctttctagtgcccagaacataatctctttctctggcaaagaaaacgtagtcttctgtcttccttttcctaaagaaggttacaattattttatgaagattgtaattttgagtaatgataatggaataaagaaggagtgaaatggcctttgtgtgctcctcattttttttcttttttaaggcaaaaaggttttaaaaccctctggagcactgattctgaataccttctttttataacattttctaaatgctccctttactatatgaaatgaaattcccataggtattataccctactgcagtgagctgagtaatgcttcccgaaaaggtagccacatcctagtccctgaaacctgtaattgttaccttatatggcaaaaaagaactttgcagatgtgactgagttaagatgttgagatggagagattatcctggtggactctaaattcagtcacatgtatcatggagggaatatcatagaggagatgcaggcaacatgacctctgaggcagagattggaatgacatgaccacaaatcaaggcatgccagcagctaccagagactgcaagaggcaaggaatggattctttctagagctttcagaagagtggccctgtggacaccttgatttagacatcgtgaaactggttttggatttctggactttagaactgagaaagaataaatttctgttgttttaagccatgaagtttgtgataatttcttacagcagccttaggaaactaatacactacttacataatataatgccataacaatgaaataaagaagacacaaaaagtaaatgttagtgatgtgactttccatttaggaaacaattttttgcaaagttccaaacaaaacaaattatagtcttttctgcatttacatggtaattgtatttctggaaaatttaatatatattcaaaccattaaccaatgtttgtagcatctgccatgtgcttgacacacagagagtatttaataaaagctggatacatgggtgatgaatagatggatgtattaaagctacaaagagagtacataagttccaaaataaacatgcaaggcaaaaattatgtgtagtcaaacgtatctttaaaaattcttgggcaggcccagtggctcacgcctataatcccagcactttgggaggacaaggcaggtggatcacgaggtcaggagttcgtgaccagtagcctgcccaacatggcgaaacccatctctactaaaactacaaaaaattagccgggcgtgatggcgggcgcctgtaatcccagctactcgggagcccgagtcaggagaatcgcttgaacccgagatgcagaggttgcaataagctgagattgccaccactgcattccagcctgggcgacaagagtgaaactccacttccaagggaaaaaaaaaattctttacatagcttatcaaatacagtgttcaatatctacatgacgtactggacactgacacataccatttctcaataaagagctgacagccctctctccccattccctcagcatcgtttgggtatcttatgaaggacatgagttgttttagggatgtaatgaattccattcagcactatgaggtactctcaccgacaatcacagaagaattaaaactgactgaaaggcaatagatatgtttcccatttcaaagctcactgtggacattttcttatggtttggaatggttgtgagctgtccaaactatattttgatgtgtttttcttcttttgatcagggatcatagttcagtaaacccacagttaaactaagtgggctgatcgtatgggtctatctaaagtgaatttgtgtacttgtctcatccttcttattaatgagtggttctaaactggacttggtttttctcccatggggcatttggcaatgtctggaggcatttctgattgtcacagccggggattggggagggcagggtgaggcaaggggctattggcaggtagtgggtaaaggccaggaatgatgctaaacattctgcaatacacaggacagcccccaacaacaaataatgatctgggcccaaaagtagtggcaaggttgagaaaccctggcaacattatgtgtgtgctccccttgtgtagtgattcctttgtagtgtttgccttgacattagattaagtgttcccttaagcagaagctgaattttttgttattgagttgcagtgaaggatgggtgtgaatctctgcagggttaaacatttttacattaacctttcctttttatttttatcaaaagtaatatatggttacatgtatgtgtgcatgtgtgcacacacttatgcagaacttagaacagttccccacccattcttccctagttttatcgcatttcccagagttagcaacatgtaaagagttttgtttttaatttttttggtgattgcctctctaagtctaaataatagcttttggttatctattgatttaagagattatctattgactcttcactgcagaaggttagcaaaagctcagctacactaatccctccccttcttccttctaatattcattagtttatattcgattgtcctttcattgattattttgtaattctaaattaaatacatataaacatttaattttgttccatcaactttagtcagtatctttttatcttctgcctttattatactagcgcttctgttctttcaccttccttattcctatttcctatagtctgtctgctgtacctttacattgtcagattgacaatatttactttctgttttataattatatttgtttgtttttatccataggttgaagccaaaagttgaaaactattaccatttataggatataactgtaaatattgttcactgaagagctaagtagtatactgagatcccagaatcatctctatatatgcaatatcacatcctctgtgccatgagaaagaatgttcctagtattctagcattctgttttctgtgttgagtgttttaaaatcatgccacattcagttggcacactggcatctaaacacatactaagaaagatcagaagtgtcaatgaaattgcatagtgaatattcaaaaaatgaatgacctgcatgggcaaataatacaaaaaaaaaagatcagaggaaaatgatagaaaacacaagaaagacaagaatttcaaaataataagggtacattcccaatggccagctttctgagagttgaactgtatttgaataactcatgtccctcaacccagatccaaagataatattgctgctgctgaaacctgggctctttactatgaccagagtttattaattgtcctatttcattgaggaaaaaatgcaaaacagaacactggaatgactagctggaaatattccactatttcatgggaagcaggtttctaaacgattcctgtggaggccaaactcttgctctcgccaaaatattatagcattaaagtgtgccttgatggtacattaaggaagaaattttccccgaatttacttaagatttatagcctttctgctctcacaaaacgtagcattgatttctttaatatcaaaaaaagtttcctaaaataaactgctaatgattgctttcagtcatttgtttacttgaggtcagtcatgccaagtactgtttgtatcaattcttgtaaaagactcaattaattttgtaattgtcataattactgttattcctgttctgtaggaatatgctattaatgtaactggacatcaccacatcttatttttgtatctctcaaaacatctttcataaaactttgatggtaggaaagagctgaaaaaaaatctcctgttagtagaccaagtagtacttcaattactaaacaccagagaaaattaaaattacaccttaaataaaaccaaccagatatttggtagagaaaatggaactgtacaaaaatatggtttttaaaaataaaattctaccacttgtattatattcattatagactattggaaaccgttccctgccaaaaaaagaaagaaaaagaaaaaagtttgtgaccatttgtaattcattttagtctttttatgtatttttttcacctaaaataatatgggcatttaaatattttaaatatagttttaaatggctacatattattctatcaaaaatacctaccataatttatgtaaccactttctcattgttgagcatttaggttagttttgtttttccagttgaaacaataccccctgagtatctttgcatataatgatttctcttgattttagttttaagacaagctcttaggggtcaaatgttttaaatattttaaaggttcattgttcaaattgcatttcaacagtcaataccagtttacactgttttcagcattttaagaaattgcccaaatgacagagcagaattttaaaagtatttccctagtgttgatttggtttatatgctgagatgctgcagattttttgttgttaaaaagtgagtatgtggagatcaaacatttggctgactgtgtacacattttatttagtaaagcctcaatgttaagcaagaagccattactcatattcatgttgtctcaggaatggaaaagtgcttctaatttttgcaacaaaagaagtctgatggcagtgacagaaaggaatgactagctagatatgctgaccggaaagctagaattaggatttgaccattgtagtcagtctccatttaagagcctaatggttttttcttctcaatttggaagtttgctgcatttagagatattcttataaaactaaaaaaaatagacccagggagcaagtttgaggttactaaaatgtatcccattattgtcagagttgcatttcaaactgtcttcattaaactgttagtttgattacattttctcaaacagtaactgttgtgttttaattttttaaattaaaaataagttttaaatttcaggtaattgaaagaccaattctttttggaatctttcagtattatggttttggttcacagcgaaggtatttgcttgctacatttgctaaatatactatctatacttcattttgttgcataaaaataagacatactccggttagcctttttgatgggtattaccttgatgacttgctcactgacagagaaactgatgtaaaataggtcatttgaaaagcaggtgtttgatatatccccatatgtaacactgaaaagccttcttgctctagatttttggaaggaaagctttcttaagaaagaacggaaaagagagaagaaccaaatagacgcaataaaaaatgataaaggggttatcaccactgatcccacagaaatacaaactaccatcagagaatactacaaacacctctacgcaaataaactagaaaatctagaagaaatggataaattccttgacacatacaccctcccaacactaaaccaggaagaagttgaatctctgaatagaccaataacaggctctgaaattgtggcaataatcaatagcttaccaaccaaaaagaatccaggaccagatggattcgcagccgaattctaccagaggtacaaggaggaactggtaccgttccttctgaaactattccaatcaatagaaaaagagggaatcctccctaactcattgtatgaggccagcatcatcctgataccaaagccaggcagagacacaaccaaaaaagagaattttagaccaatatccttgatgaacatggatgcaaaaatcctcaataaaatactggcaaactgaatccagcagcacatcaaaaagcttatccaccatgatcaagtgggcttcatccctaggatgcaaggctggttcaatatacgcaaatcaataaatgtaatccagcatataaacagaaccaaagacaaaaaccacatgtttatctcaatagatgcagaaaaggcctttgacaaagttcagcccattcatgctaaaaacaataaattaggtattgatgggacgtatctccaaattagaagagctatctatgacaaacccacagccaatatcatactgaatgggcaaaaactggaagcattccctttgaaaactggcacaagacagggatgccctctctcaccactcctattcaacatagtgttggaagttctggccagggcaatcatgcaggagaaggaaataaaggatattcaattaggaaaagaggaagtcaaattgtccctgtttgcagatgacatgattgtatatctagaaaaccccattgtctcagcccaaaatctccttaagctgataagcaacttcagcaaagtctcaggatacaaaatcaatgtacaaaaatcacaagcattcttatacaccaataacagacaaacagagagccaaatcatgagtgaactcccattcacaattgcttcaaagagaataaagtacctaggaatccaacttagaagggatgtgaaggacctcttcaaggagaactacaaaccactgcttaatgaaataaaagaagatacaaagaaatggaagaacattccatgctcatgggtaggaagaatcaatatcatgaaaatcgccatactgcccaaggtaatttatagattcaatgccatccccatcaagctaccaatgactttcttcacagagttggaaaaaactaaagttcatatggaaccaaaaaagagcccgcattgccaagtcaatcctaagccaaaagaacaaagctggaggcatcacgctacctgacttcaaactatactacaaggctacagtaaccaaaacagcatggtactggtaccaaaacagagatatagatcaatggaacagaacagagccctcagaaataatgccgcatatctacacctatctgatctttgacaaacctgagaaaaacaagcaatggggaagggattccctatttaataaatggtgctgggaaaactggctagccatatgtagaaagctgaaactggatcccttccttacaccttatacaaaaattaattcaagatggattaaagacttaaacattagatctaaaaccataaaaaccctagaagaaaacttaggcattaccattgaggacataggcatgggcaaggacttcgtgtctaaaacatcaaaagcaatggcaacaaaagccaaaattgacaaatgagatctaattaaactaaagagcttcttcacagcaaaagaaactaccatcagagtgaacaggcaacctacaaaatgggagaaaattttcacaacctactcatctgacaaagggctaatatctagaatctacaatgaactcaaacaaatttacaggaaaaaaacaaccccatcaaaaagtgggcgaaggacatgaacagatacttctcaaaagaagacatttatgcagccaaaaaacacatgaaaaaatgctcaccatcactggccatcagagaaatgcaaatcaaaaccacaatgagataccatctcacaccagttagaatggcagtcattaaaaagtcaggaaacaacaggtgctggagaggatgtggagaaatagaaacacttacactgttggtgggactgtaaactagttcaaccattgtggaagtcagtgtggcgattcctcagggatctagaactagaaataccatttgacccagccatcccattactgggtatatacccaaaggactataaatcatgctgctataaagacacatgcacacatatgtttattgcggcactattcacaatagcaaagacttggaaccaagccaaatgtccaacaatgatagagtggattaagaaaatgtggcacatatacaccatggaatactatgcagccataaaaaatgatgagttcatgtcctttgtagggacatggatgaaattggaaatcatcattctcagcaaactatcccaaggacaaaaaaccaaacaccacatgttcttactcataggtgggaattgaacaatgagaacacatggacgcaggaaggggaacatcacactctgaggactgttgtggggtgggaggaagggagagggatagcattaggagatatacctaatgctaaatgacgagttaatgggtgcagcacaccagcgtggcacatgtatacatatgtatctaaccttcacattgtgcacatgtaccctaaaactttaataataataaaataaaataaaataaaagaacagaccagatgcagtggctcacaccagtaatcccagcactttgtgaggccaaggtaggaggatggcttgagtccaagagtttgagattaacctgggcaacatagtgaaaccctgcctatacaaaaagtaaaaaatgaaaagttagcctgggcctggtgtatttgcatgtgcctgtggtcccagcaactccaggggctgaggcaggaggattgcttgagcccagtagttcaaggctgcagtgagctgtgattgtgccagtgcactctagcttgggttacagagtaagaccctgtctcaaaaaaataagaatgtacatatttaattgtaatatgaaacggatgctgaaaatgaacaccgatataagtgacatatcagagatgctctggagacttggttcatataatatggaacaaaattaccttctcaatgccaaattagaaaatgatatgtacataattttcaggtttaaaatatatataccaaggctttgggatgttaaatataaggaatgttgcccatgtataacattatcaattaagcttaagaatattaaagatttgttgattaaaataattactaatttttgtgatagcttttactttagaatatgtgatttgaaaaaaaagaatgttgacatttcacatagttggaaaaaattctagttcttagttttgtaacttaattttatgttctaaaatatgtctcaaatccacccttgtaaaattattagtcttttattattaaagcataaagtttgctactcataaatcaaattatatatctcaaattcaaagctaaattgcccttgtgcattgtttagcagtatgtaaatacattttagaaaagggctgtatcattcatgaagtttccaaattcgttgatcaattctgataataaagttaaaatttttgttcttaattagtagatctcattattttttcagcattccactgacttctttctaactttgtagtaatgataggtaaagactgtatctggcttaaaaaatgcttatttttacatacatgtaggtctttgattatgaaagtaccgaggagttcttttgtttatacagtggcagttgaaagaaaacccatgtatatcttgagaagatttattggaactagctttgagaaatgatgagccatatctttaactcaataaaagatatgtattgctgtaccaagccttggtatctgctattctctttagtgtaagcacttttcaaactataggattatacaaatagtagcatcactagttaaaacataaagctatatgatctaaagacatagttttggttattttttgagccatttaattttcatcttttctgtgaccacatttattaaacatgtgacatgaaaatggaatactcttttatgatgacaaaagaaagtatatgcccagccaattatgggataagagtattattttttgtgaacacattatcatcattctagacacctggagaagtgaatatctctgaaagtatcatacatttatactttaactttatttacatatccagttttcagaaaccattgccaatgaaacatttggacaatgtggtatgcaagtactgtatagtaagaagtagggatgttcttgagtaattgttccatttgaattaatccagcatgggtagttgttagacaaccatgaaatgtgctaagctttacctattctaagaggactctattcttacagaccataagcgttcaaaagttttccaagaaaaaaaggttacttctttaaatttagtctgcccattcaaaagctacaataaggcaggtggattaaactgctaggagttgcaatgttagtattgagagcatttaagcaatttaaaatctttcagaatgcctaagatcacaaatttacccctgatcagcctacacagattaacttaaaatacatacagagagatgtcagatagctagagggtcataaattagtgaccaaaattacatcaatctgcatgttgacattgtttaccttatattgattagaaacttttgcttaggaaaaaggggaaataacttttattttaaattatactttaagttctagggtacatgtacacaacgtgcaggtttgttacatatggatacatgtgccatgttggcgtgccgcacccattaactcatcatttagcattaggtatatctcctaatgctatccctccccctcccccaccccacagcagggatgtgtgatattccccttcctgtgcccatgtgttctcattgttcaactcccacctatgagtgagaacatgtggtgtttggttttttgtccttgggatagtttgctgagaatgatggtttccaatttcatccatgtccctacaaaggacatgcactcatcattttttatggctgcatagtattccatggtgtatatgtgccacattttcttaatccagtctatcattgttggacatttaggttggttccaagtctttgctattgtgaatagtgccacagtaaacatacgtgtgcctttgtctttatagaagcatgatttatgttcctttgggtatatacccagtaatgggatggctgggtcaaatggtatttctagttctagatccctgaggaatcaccacactgacttccacaatggttgaactagtttacagtcccaccaacagtgtaaaagtgttcctatttttccacatcctctccagcacctgttgtttcctaactttttaatgattgccattctaactggtgtgagatggtatctcactgtggttttgatttgcatttctctgatggccagtgatgatgagcattttttcatgtgttttttggctgcataaatgtcttcttttgagaagtgtctgttcatatccttcgcccacttgttgatgcggttgtttttttcttgtaaatttgtttgagttcattgtagattctggatattagccctttgtcagaagagtaggttgcaaaaattttctcccattttgtaggttgcctgttcactctgatggtagtttcttttgctgtgcagaagctctttagtttaattagatcccatttgtcaattttggcttttgctgccattgcttttggtgttttagacacgaagtccttaacagcccatgcctatgtcctgaatggtattgcctaggttttcttctatggtttttatggttttaggtctaacatttaagtctttaatccatcttgaattaatttttgtataaagcgtaaggaagggatccaagttcacctttctacatatggctagccagttttcccagcaccatttattaaatagggaatcctttccccatttcctgtttttctcaggtttgtcaaagttcagatagttgtagatatgcgacattatttctgagggctctgttgtgttccattggtatatatatctgttttggtaccagtaccgtgctgttttggttactgtagcctcgtagtatagtttgaagtcaggtagcgtgatgcctccagctttgttcttttggcttaggattgatttggcaatgcgggctctttttcagttccatatgaactttaaagtagttttttccaattctgtgaagaaagtcattggtagctcgttggggatggcattgaatctataaattaccttgggcagtatggccattttcacgacattgattcttcctacccatgcgcatggaatgttcttccatttgtttgtatcttcttttatttcattgagcagtggtttgtagttcttgaagaggtccttcacatcccttctaagttggattcctaggtattttattctctttgaagcaatggtcaatgggaattcactcatgatttggctctctgtttgtctgttattggtatataggaatgcatgtgatttttacacattgattttgtatcctgagactttgctgaagttgcctatcagcttaaggagattttgggccgagatggtggggttttcgagatatacaatcatgtcatctgcaaacagggacaatttgacttcctcttttcctaattgaataccctttatttccttctcctgcctgattgccctggccagaacttccaacactatgttgaataggagtggtgagagagggcatccctgtcttgtgccagttttcaaagggaatgcttccagtttttgcccattcagtatgatattggctgtgggtttgtcatagatagctcttattattttgagatacgtcccatcaatacctaatttattgagagtttttagcatgaatgggctgttgaattttgccaaaggccttttctgcatctattgagataatcatgtggtttttgtctttggctctgtttatatgctggattacatttattgatttgcgtatgttgaaccagccttccatcccagggatgaagccgacttgattatggtggataagctttttgatgtgctgctggattcagtttgccagtattttattgaggatttttgcatcgatgttcatcagggatattggtctaaaattctctttttttggttgtgtctctgccagactttggtatcaggataatgctggcctcatacaatgagttagggaggattccctctttttctattgattggaatagtttcagaaggaatggtaccagctcctccttgtacctctggtaaaattcggctgtgattgcatctggtcctggactttttttggttggtaggctattaattattgcctcaatttcagagcctgttattggtctattcagagattcaacttcttcctggtttagtgttgggagggtgtatgtgtcaaggaatttatccatttcttctagattttctagtttatttgcatagaggtgtttatagtattctctgattgtagtttgtatttctgtgggatcggtggtgatatcccctttatcattttttattgcatctatttgattcttctctcttttcttctgtattagtcttgctagcggtctatcaattttgttgatctgttcaaaaaagcagcttctggattcattgatttttttgcagggttttttgtgtctctatttccttcagttctgctctgatcttagttatttcttgccttctgctagcttttgaatgtgtttgctcttgcttctctagttcttttattgtgatgttagggtgtcaattttagatctttcctgctttctcttgtgggcattttgtcctataaagttccctctacacactgctttgaatgtgtcccagagattctggtatgttgtgtctttgttcttgttgatttgaaagaatgtctttatttctgccttcatttcattatttacccagtagtcattcaggagcaggttgttcagttgccatgtagttgagcggtgttgagttagtttcttaatcctgagttctagtttgattgcactgtggtctgagagacagtttgttatcatttctgctcttttacatttgctgaagagtgctttacttccaactatgtggtcagttttggaataggtgtggtgtggtgctgaaaagaatgtgtattctgttgatttgggttggagagttctgtagatgtctattaggtccacttggtgcagagctgagttcaattcctggagatccttgttaactttctgtctcgtggatctgtctaatgttaacagtggggtgttaaagtctcccattattattgtgtgggagtctaagtctctttgtaggtctctaaggacttgctttatgaatctgggtgctcctgtattgggtgcatatatatttaggatagttagctcttcttgttgaattgatccctttaccattatgtaatggccttctttgtctctttttatctttgttggtttaaagtctattttatcagagactaggattgcaacccctgcctttttttgttttccgtttgcttggtagatcttcctccatccctttattttgagcctatgtgtgtctctgcacatgagatgggtctgctgaatacagcacactgatgggtcttgactctttatccaatttgccagtctgtgtcttttaattggagtatttagcccatatacatttaaggttagtattgttatgtgtgaatttgatcctgtcgttatgatgttagctggttattttgctcgttagttgatgcagtttcttcctagccttgatggtcttcacaatttggcatgtttttgcagtgactggtactggttgttcctttccatgtttagtgcttccttcaggagctcttgtagggcgggtctggtgatgacaaaatctctcagcatttgcttgtctgtaaaggattttatttctccttcacttatgaagcttagtttggctggatattaaattctgggttgaaaattcttttctttaagaatgttgaatattggcccccaatgtcttctggcttgtgaagtttctgccaagagatcagctgttagtctgatgggcttcccattgtgggtaacccgactttctctctggctgcccttaacattttttccttcatttcaactttggtgaatctgacaattatat

SEQ ID NO: 151 - DNA, 32744 bp, Homo sapiens
  source 1..32744: mol_type = other DNA
ctgcgcgcatgcgcggcggccgccgaaggggcgggatccgaggcaagcgttggttctgtgcgcctcaggtacgtgttgggcggcagtgggcgcggactcggtgcggtctctcgcgggctgcggtcgggcccgggatcctgctcctggccgagtcgcggtgcgcgggctgctggggtccggcagggctggaggcggaccgcgaggaagcggcgcggccgggaagatggggcagggtcgcctcggccccggggcctcggtttcctccgatcacagcgcctcagggggcgcgcacgggcgctgcggagacctgtgtcctgccggggcgcggcgctaggggcccctgctcgggtttttattcccagacctaagcttacaggtgcgtggtcccagaaagtgagtaggaaagcgcccaccacgtgccaggcgcttaagctttctgtgctcggtttcccagtataggaggacggtcacggtacgtagtatagagttgtcctgagggtgaagcgagtttacacttggtgaggcgcttcgaatcgtgcctggccggccccaaatgagcacgcagtaaggttagcagctgctgccgtcacttcctcacgttctgaatctgctccgtccccaacgccttcagcaagagccctctcacttcctttgtcttcaacccattctccgcagagttggagcacacagctgtattaaaaaggcaaatcgaaggccgggcgcggtgactcacgcctgtcatcctagcactttgggaggccgaggcggctgaatcacttgaggttaggagtttgagatcagcccgggcaacatggtgaaaccccgtctctacaaaaatagaaaaattagccgagcgtgatggtggatgcctgtaatcctagctcctcgggaggctaaggtaggagaattgcttgaacctgggaggcagagaggttggagtgagccgagattgcgccattgcgctccagcctgagcggcagagcgagactctgtctcaaaaaaataaatgtaaatcggactccccttcttaaagccctcagtggggtcccattgatcattgcataaaatccaatttctttaacaagtcttctcccctcacccgcttcggaccactgcctgccttgcctaagtcctttcttatgacctctttcccacctctgccggctgggttccctctacttgggaatgctcttcaccccatcatttagacagcaggttccttttggccctctgggtctcatttatatgttactttttaagtatattccaaaggtcacccctatttttctgtctcatacttataaaatgtaatgaatgtctaactcatcttggctattaaaatttttatgtgtgggtctgtctcttctgccctgaaattagctctgctagggtagaaactatattgttaacgcctcattcccagtttttggtacataatagctgcccagtaagttattgaatgaatgaactccagggggtaagcatgatatccatttcacagactaaaaaactgaggctcagcagttaactaacctgcccaagtgcacatttactccctagtcatggccgggtttgagacaagggaccatgtttgcctattactggccacacaggaactcaattgaggagcatggcctccaggcccagctgatggtctttaagctcaatgagaaggagcagctggaggtgaaagagaaatgccccagctgggtctcatatagtggggagtgaggaaacactagtagctctaaatggagtacccttttatatccacaacatgttttaaagtccttaataaaagtgctaacagtgtcctgagctagcatttggtgggaagatttcttagatttttcatgttagtgcagtgtttgccaaatttcactcacactcacctgccttctccccagtttgctttattctcttaacacatgacacaggatttatttcagggccgctttgccagctggagacctccagccctgggctggctgcaggaggtgccctgcccactcagcctggcagaatgcatttgtctttcatccccgcccagatcccgtggccactatgactgcatgctcagcccgcgaggagtcggtttgtgagtgagtgagcaagcctggaggcccggctggctgttccaagtgctggcccagtcacaggctccatgtagggcttgtggatggcctgggtgtatggcaagtgactctggtagcagattctggtgtccagacgagggggatgcagtagtgcccaaacacttggagacaccaggcaaatagagatgtattaacagctcttttagtcccaccatctgcagcccaatgaatgggggtgtgtggcagccagcagctccctctcccattgcttcactagcggaacggagtgctacagggttatagctctatttgcactcgctgtttagctggtccgaatttcttgtcctgcgtccaagaataatgaggttaggctgacaaccgaaggggaaaagggcggaggtgagttttactcagtgatgagacagttctcagcagagacgggaccccaagtggatggcccctgccctgaccccaaggtgggcagttcgctggtgtgactgagtctggggcttttatgggctcagaatgagggagtgtgtgctccatggtttgtgagtatgcaaaaaaggctaaaacaaaggcaccactcaaaggtgggcatgacaatgtaaaaaaccaattagggaagggtagatatatgtaaagtaggtgaagggtggggattgatcagaggaaagtgtgccaagtgggaagaggggttatcaatccggtccgtggatttacccaacacttgtagcttggctttcaggctttaaactgtctttggtttgcaggtggggtttcactggggccctgcccctatctgcctagggatttgtctgcctcctgccgctatcacatagactatcatatacttaatatttttgtttgaatccaatcattcttttacataaaataaactttattttgctatttcaaatataacgtagccataagataccttctgttgatggtaaacaaaattgttggtgcctgcagaagagcccaaaccctgctatttgttcaaaatcaagattaaaagcatttctacaacactacaactttcttcttgatttaaacagggagtttggattggaatggaaagggaagtactttcataatgtcaggtcccaatcacttccacttcaggaaacactgtgccgttctgattgagtgccaggattcagaatcaacacagctatattgtattctgattctttcagtaccacttacaaaaagtgtgacttcagatttatgctgtaccaagcactgcccaggcagggaagacagatgataaacaattgaaggaaagctctcaggttctacatttcttaaaactgtatgacttgattacaaagcactctgaaatgctgggcaccagagcctctatgagggaagtaaattctgttactggtgaccagttatccaaagtaaaagtttgatattggtgtttactagcagttcttttccaactgggcgggagccttgatgtcataaagaggttggtaagctgctacatttaacaacaagacacaattttattagtctgttgcactaaattgtaacccaataaattgtattaggttgtaataagcaactcaggcatatttttgagtttcagcaggtccaaaactttatagagcagaaccccaaaaaaaggctttgttctctagaaaatgtcttttttaaagctttgttttattttttatcctcttgtcctactttgttggagggaattccacttccatatggttttagaaaatggagataatgataaaacttaaaaacctttgaaattctctaaataattcacagagttgctaaggattttaccttagcaactcttagtacataataatgtacttagcacagaattctcagtgtttggaaattccattttatttatataatgcaggcaaccatatttgttatggtagcctcttaagattctgcaactgcttctgagagtggaagctgaatcctttctcaccaaaaactaagacctgctacttactttagaatgggcaaggtatctatagagaacagcctgaggactgtaatggaagattctattactcaccgccttggtttagaactgttgtagaattcaaaggaacctagagctgacattcagagagtggtttttcctaaggtggttcttttgttcctagataactttaaagtcacgaaactgtagccactgaaatagtttcttcaaagtgtattgtaacagcttaaatacccctatccagcaacttctagactctagaacactagaggaacctaaggttttgtgggtttttttttcaaaccggaaggattaaaaacatttaaaaaaccacctctgagctgcttaagtaggtgttgagtagtaaatcaatctgaatctctttcatggaggaaactgggcactcagacccctttaaccatgacaatacagttctacaaacccagttatctagtttcttaacccttagcagattagaaacaatttagggaaaatatacctatgctatgagttttaacaaccccttgaagtgggctggacagagtgtagaaataaatagaaacttttagaaagcagatatgagggctcaaaagagccagacagtctagggtcactattacaggagcaagtggccccagccctctctacagtcaataaggctttggctgtgagatagtgtgttcatgctgggtagggtaataatgacccagagccatgaagaatgggccagattattgtcttgatgcattcttgcataaaagttccttgaaatgtgtaatttacagaaggcttgcttaacttgactggtagttaattgaaaaaggtgaagagagaaattgtgaaaagggatagatacctttaaagtatttccaaccctcccctgccccgccctgctgtgttcactgaaaaaatcatgagatctatacatttagaaaggagagcttagttcttataaagggctacagcctgcagtgtggcctgacaggctgggaagcacagcctcaggcagagacctttaatggcatcccagggaggagagggtagaacagagatttatactgaatgggttggccaagtatagtattcaacaggtgtgggaggagctatgaatattcaccaaggggggacacgtgtgcatgtgtaatgagcaaacgtgtgttttgtgcatctcgtgttcactttgggatggagacttaacatttgaatgaattacaattaggccctctgtcaaaaggtgaaggagagacatgaaggcactcagtgctcagcctctgaggactggtcagaaccagtctgtggtttcttttcaggagaaagttactccattgtccaatgacagctgcagtcatggcctgtggaaccagaggggtcagttagtcaagcatctggcagtaggtgagctgcaattgtttagatattccttatctctaggccagtgcttatttagctgctgaagaaaaaagaaccttgtggaaggtagaacatagtttaaaggtagcagtgtgtgatttaacccttgcttggcatggccttaggtcttgtttatgatttagtgtcatattgtcacagaatctattctgccagtcttacgatctctggtcagttgtgtttaaaccgcagaagggaggggatataacaggcatgtctgagctcccatctcatcatggcccggaactcagtttttaaggtttctctggggtccccttagccaagatttttatttttagttctcatctagagacatatgcatatgtattgatttgcaaatcttttgatgtagaataatgttgaattctcttttttggggaatgtaggttttgtgaagggagtgtcaccatcttggtttactccactcaatgcatcttttccagcctcattaaaacagcagaaactcgaagatactgttgatctgagcacagactactgagttttgtaattttcccctgggtcttgtgctaaaatgttaaaagtatcacattgaggaactgttctttagctgtctggaaagtctacttagatagtcctttaccactgaattgacaagatttggtaggtaacagcaaaagtgactgtttcgtgtactttcctgttctcagaacaagaaagtagaatttgactgtggggcttaaaaaataaaagtgtgttgcttcagtacaagttatttctgtgtaggtgttagtagatttatgatgtagccaataggataattatatcttgatataattatatccaactaattataattagttgggtcctcatggaagtagtgtaaataatgtacatacctaagtggtcatttggctttcctcttgaagactttgttaagctttatggtaaatgggttgtcttttgggaagtaagacatacataatcactgaagtcctgtgggtgcctgtacttgggtgaaggctaggtttgtaaattccaatttgaccttaagcatttgaacatagattaaatggaccttaatcccaaacgcttattggaagtttcggggtcaagaatgaatgtttgttttattttggcatttgtcttgatgcattcttcaaccccctttcctaggacatctaagaacaaagtttagattgaaagccaaggccaggcatggtggcttatacttgtaatcccagcactttggaaggccaaggtgggtggatctcttgagtccaggagttcaaggccagcctgggcaacaataatgaaaccctgtctctaccaaaaaaaaagaaaaaaaaaattagccagacgtgatggcgtgcacctgtagttccagctattcgagaggatgaggcaggaggattgcttgagcccaggaggcagatgttgcagtcagctgagattgaaccactgcaccactccagctgggtgacagagcgagaccctgtttcaaaaaaaaaaaggaagaaaaaagaaaggtgaccaggacttttgcttgtgatttggcagaatctgatagtggattctggtaatgtgcttataaacacccaaaaagcagctgatgttaggtggttcagcctctggaaggtgtcagctcatctgacagggaagttgagagcaataaagttattttgccaatgccctgatgaatgggaaatgctgatgtttccacttttcatttccaggagtataatgtctcaggaaggcgattatgggaggtggaccatatctagtagtgatgaaagtgaggaagaaaagccaaaaccagacaagccatctacctcttctcttctctgtgccaggcaaggagcagcaaatgagcccaggtacacctgttccgaggcccagaaagctgcacacaagaggaaaatatcacctgtgaaattcagcaatacagattcagttttacctcccaaaaggcagaaaagcggttcccaggaggacctcggctggtgtctgtccagcagtgatgatgagctgcaaccagaaatgccgcagaagcaggctgagaaagtggtgatcaaaaaggagaaagacatctctgctcccaatgacggcactgcccaaagaactgaaaatcatggcgctcccgcctgccacaggctcaaagaggaggaagacgagtatgagacatcaggggagggccaggacatttgggacatgctggataaagggaaccccttccagttttacctcactagagtctctggagttaagccaaagtataactctggagccctccacatcaagggtaagaggatgctgggtgtcaaggagctgttgaattgcccttgagagtctctcctccgtgaaacaaggagggcagcctagaatagtttctgagaactcttctttgtgttcttaactactttcaggaaaaaaattcttgacaggcaagtgcattagtataacagcagactgtttacttaactcaggcagagcgtgtgttctcaaaaccctgtagctcaaccccttatatcacttagcacgatgtttagcattatttaactttttaagatgaagcttgatgagtaacagtttatcaacaaggtagcaaatacttgacaacagtagtagttctccatgggccctggaccagcagcctcagcatcacctgcaacttgttaaaatgcaaattctcgggccccattcccgattcattaaattggactctgagggtgagatcctgcagtctgtgttttcacgagcccttgaggggattctactgcccagtcaagtttgagaaccactgcttaaaagcctggttttagttcctggtgaagaagaagaagaaaaaacaaaatagtgcctgagtgcaaatagatgtttcagttatggatcaaaagatggccttagtttgctctccttattcctcagggagcacctgcaggaggaagagcaggagctctagaatctgctttctggcctcaccactcatttgctgtatggattgttaacacaggacctaacattctctgaattttagtttgctcatctttaaactggaaatgcagaaaaatgggagcaaatatatgaagtaaccagtgtaatatattcacatggcagatacaataaacattattacccttatttcagatttttttcctgtcccatatttaagaatagtaatgttcactgtcagcagtgttgttctttttttatatatccagtatataattgtatattgtgtgtgatgtatacatgttggagtatttcatactgtagagtgttctacaggttgttttctttttgagaatctcttatcttggtactttgtcaagttttttgtttgtttgagacagactgacaaatatttagagaattttgccaagttttgctctatataataaaataaccggcaattagcaccaaggtattgtggtaacatgataggagctcttacatatattttctcctttaatcctcaggacagtcttatgagtagatgttacaatcgtattccttggataaatgatgcatctgcactttagaaaagtgcccaaggtcgtagagctggtaatgacattctggcatcagaatccatgctgtttgctatagcactctaccatgtgccataattgtagatggcttagaagatctcatggaggaagggggacttcaaaaggcctttgaaagatgggtaaaatttagaagggaagaaatacatgctggtgggggcaaatggaagaatatttgcagtttatctctgcaactctcccaataaggtagaaccttccttaacaatttttttgttgttgttctctgaaaatcgttctaccccagcatctagctcaatgtccagaagataggaagcactcaggaaatatttgccaaatgaatgagccagtcttaattctcagaggcagtttagtgggtatgagcgaaggtgctggagccagacagcctaggttcaaaccccgactgtacccctttctagctgtgtgtctgtgggcagcctcctaagaaggctcctccgatataaaatagaaataacagaccccacctagaaaatggatatgaggagtaagtaatggatgggaagtgccaagagtgctgcctggcatctaacaggtctccacagatgtggctgttgtaatggaaggtcacgatgatggtgtacttgctctcgtggtatggtttgagaagtgagctttcaacttacctaacataaagcttgaatgggtacaaagtgagacttccctagagatgaccaggaacaccaggaatgtgagttgataattgtgagtgcctctgtcctttcattcacaggccacaggtgctttccagtctttctggaaagtctttctaaactgtccacatttataaaatctttctagaaagtttttctagtcttgagttgggagatttcctggagagggacttgaatgggtacttggaggaggtagaagttcagagatctgaaaagaatatgtatcattattgtccatattgagtttctaaacttgatcaatcattcagtactgaagttgtagattttggttttgcattgttttataaaagaatgtatgataaatattaaataccatagggaaattttttttgaattttatgaaacattaaagtctgactttgtagtaactgtttagcttactgtgttctgagtcagatcttgattgtcagtgactgttgaatgagttagtagtgattattatgactagaggatttttgtgagtgtgaatttgatatatgttttgtcttctcagatattttatctcctttatttgggacgcttgtttcttcagctcaggtgagtatacctttaagctgttttttctttgggtgaaagtagacaggtaattaaacaactccataagaaaatatgagaggcatagtttggggatctcagtcctgttcaaagactgagatggcacatacctggaggctggctcaagtgccacagtaatgagatccatggccatcaacatagaatggggatgtcactatcaggagagcatttgactcaagtcagcctccgctggccaagaagtcactttggacattccagcttgaaagactagaatgggacacttcttttggggatactgattaactcatgggactgagttaactctggtgcatagagtggtgaggtatggatagagtggtgaaggccaagtcaagtttgatttaatttagaaaaatgtgaattttcatgttcagtggctccttcctgactgagctagtccctttgtcttgataaatcatgtaatggtccagacccacaagtaagtggtccaaagggccctgtccctgaagaaaggcaggcttcctttatgtttggtttggcattgaaagtcctggtttccatttggaaggtggggagcatttgcaaatgccctgttagctcgactgagttactaagtccaggattacccaggtatggggaggagcctccacgggtaagaccagtacagaacttgcatttaagatgtaattgttagaagcctagtgaatgtctggtcccaggtggctgtgtacaaagctagctaataagttagcctgaaaggaaatgttcttttctgaaagtcctgggatctttgtctccagtatctgtctttttataatcacctaggggaaaagggataaatttataaatccttttatttaaattaatctcagggccattagacataatgtaataacaccctgcggacaagtacagatgctgccaaaacatgcagagataatttcctgggaacctgttatctcatgtacttggctccatttaggttcttttaaccatgcatttaagataaattataggtttgttagtattgcagcataaccctccaggtttataaataatacatgtagtgtatcactattttagagtttccttaaatgtaataactaaacaattctccttatgaactgtttggcagaattacctatggcttagttactcttcttttctcccatctagtttaactactgctttgacgtggactggctcgtaaaacagtatccaccagagttcaggtgagttcctcagggtgacagacaacactataaactgtaaaggggctttgacacctaagatttgtatttctcaggtgaaagccactcatcttttgagtttttcttttgaaactgttgaaatcacacagacattaagttatatccggaaaacagcattctttgatctatttaatcctacacattctttttacggattttagcattttcctctgtgctctttcaggaagtagataaggacaggctttaactcaaataacagaatttcatgtccagtcttaatatgaaggaaaataccatctccacataccttctagatctgtgaatgtgccaacatgccgccaacgtgccatgctttccgtagcacatcaattctgttctgttttgaggatccctttgtgtttctgagatgaggaaaggaggcttatctgtggccttcccttatctaggctctggaggtgatggatttttaggccttctgcctgcacttcatcagcctcatgttaggcaatacagaccaaatagggcatcacacaggtgccacccttccctatttctaacacatttacggggcagattcccataacagcaagtaggatggaggaaaacacacaagaaataatgattgtcagggtcctcaaaattcttggtacatttagggcatcagattgtggaaacctttgacattaacagtagataaaatgctgttaaaatttttcaagcagctttggcacttggggcttttttttttttttttgacctgtaacacacagaattagttttagctgcatgtaaaagaatattcaaaataacaatggcttaaataagacaaattgtttccagcgtgacacattcagatggtaaacatttatggtctagatgggggcaccagggttctcagagacttatccacctaccctttctgttccaccatccttgtatgtgacttcagttttcagagtcacctcgtggcccagtatggcagctagagctccagcttactcatctattccaggtagcaggaaggggaaaggaggaaaaggacaaaaaggcccacattctagctatgcccatctaagcagccttcctggaagtcccacacaacacctgcatctatttcattgagcagagctcagctgcatgctaaccagctgtaaaagaggctagaaatgtcttttagcttagcacaccttttcctgaattagccttttgttagggaaggaggagagaatggctgtctggaggcaacaagcagtttctgccttggctcctcctcgcagtagtatccttgggtgtcacattggcattttctgttcttcctcccttttcttaaagaccttgaaatcaaactgtcaccccattagagtgttggcaaagtgcagactgcagttcctttgtatctgttatgagttaaattatctcacccccaaaaaagatctgttggaatcctaagcctcagtacctcagaatgtgatcttatttggagatagagcccttacaaaggtaatcaagataaaatgaaggcattaggatggacattaatccagtatgactagtgtccttataaaaagagaaatttgggtgcagagacagagataagaccatgtaaagacacagaacgccatttacaagccaagctcctagaagctgggagagaggcttggaacagatgtgcctcacagcctcaggaaccaatcctgccagcaccttgatcttggacttctcgcctccagacctgtgagacaatatattgctgttgtctaagcctcccagtttgtggtgctttgttttggaggccctggcacactaatacagtatccactggactctcagtaactaaagggacgaaagtgtcctccttctccctgcatccccttattgccaaatgcatcttgggaaggctattacgagccttagaaggatgaggagtgacctaaatggtaagtttaagtaacatccagaatttgtatgtagaaaaattcagatcataaggatttatacctcagtatgctattgttcaggtgccatctttttgtaataagtcgtagaaccaataaatttgaaagaattaatgaggacttcagtttctatcagtcatatttaatctttttaataacatgacttgatctaacattttttatttctaggtgctagatgcacgtgtgtttcttacattattctgtttttcttacctaatttctaaaaatcacaggtgcgtgtttcatagtttcattttacctgtcatgttagaataaagctattgggcaagaggtagtgaggtattagtactggaaatagatgtttctctctagttgattgttgttcctttgtgaatggtagagaatcattctgcagtgtgattgataaatgtggaagtgggtcggttgtttatctttcttgattgcttatatccaatttttgttgtgttgggagagcttgtagaaatatacttatttcttttttttttttttttttgaggcggagtctcgctctgtcgcccaggctggagtgcagtggcgggatctcggctcactgcaagctccgcctcccgggttcacgccattctcctgcctcagcctcccaagtagctgggactacaggcgcccgccactacgcccggctaattttttgtatttttagtagagacggggtttcaccgttttagccgggatggtctcgatctcctgacctcgtgatctgcccgcctcggcctcccaaagtgctgggattacaggcgtgagccaccgcgcctggccgaaatatacttatttctaaggattatcttgctttgagttaatcagaacaagaatccctcaaaagcctttttaatgtattcttgaagagtgtttttatattatatttggaattcaaaaatatagcattttcaacgtagcttgggctctgtttcattgaaatctaaccacccattagtgaagctgcgtcatgctgtgggcctggcctgggcctgttctctgttgtatcctgggtctagctcagtacatagcacacaggaggagtttggtgaatatagatgtggtgtgaaatgaatccaccgtgtggtccaaaagaaaaagcaaaaagcactatattatataataattattatatatctttaatttatttggacttaaatattttaacacagaactacttatgtgccgttttgggccaaagaagataattattcaaggactttcttgagtcattacccctctgtattacaacagagctgcagaatcaggccatgtagccccattataaaggtatctggtaaatgaacattagcttttcactgctctgtgttagccctgtcttcattcaactacaaaggccggaaacatatcgagtgataaggaagctagcattccttaatgaggcgagtccagcttcatgaatgatgtattttaattaatttatttatttatttatttatttttgagacagagtcttgctctggcacccaggctggagtgcagtggctcaatctcggctcactgcaaccttcacctcccaggttcaagcgattctcatgcctcagccccagagtagctgggattacaggcacgcacaaccatgccttgtctaatttttgtattagtagagacggggtttcaccatgttggccagtctggtctcgaactcctgacctcaggtagtccacctgcctcggcctcccaaggtgccgggattacaggtgtgagccactgagcctggccatgaatgatgtatattaaatactaatgctctctttttaggaagaagccaatcctgcttgtgcatggtgataagcgagaggctaaggctcacctccatgcccaggccaagccttacgagaacatctctctctgccaggtaagccacttactgccgttggagagcacgcgtagtctgagttagaaggaaacttagacatttagtccaccctctcacttagtgcagaaatcctctctccagcatcagtcatcaatagatatttgtctagcctcagcttaaacacttcctgagatagagcatcccattcatagtactcctcagggttggaaaggtttttctttttgtgggcctgaagtcttcttactaatttctactcattggtcttaattttccccttctggagccacacagaataagtaagtctttcatcttacacatgtcagtgattcatatatctaaagtgatctgtcctgtctcccttcgttttctctctttaattcaaacattctctttcttcagttttactcaatgtagtatggattctgagtctttccgcaacctgctagtgctcccctggttgcatgtagcttgtcagtatgcctgttgaaacctgggtttcaacactgaataggtcctctggatgtagttcagtggctgtgggtttctttttgtgagtatcctgtgagtgcaacttaaaacttgtagttttttgtgacaccttatgtaacttatattagctgccattgacacttcaacggtagtccttcaactgtagttctttttttttcacatgagttgcatctaaggtctaaacaggagagacccatagattaaaaaactgttaggaaactatgtgagtcgtatgctgtgtatgatctaagtccaatgtggagacattaagtggtcttgtaacaggcatatccacttggtttgctaggaccaaagcaaagcagaaaagaaagctatgttagtttgttcttgcaccgctatgaagacatacctgagactgggtaatttataaagaagaggggcttaattggctcacggttctgcaggctgtacatgaagcatggctgaggaggcctcaggaaactttcaattgtgacagaaggtgaagaggaagcaggcacatcttacttggccggagcaagagggaagagagggggaagagctacacacttttatcaaacaaccagatatcatgagaactctctatcacgagaacagcaaggaggaagtccacccccatgatccaatcacctcctaccaggcccctcctccaacattggggattataatttgagatgagatttgggtggggacatagacccaaaccatatcaaaggccaagaaacggttattgcccagtttctttatatattcccataattttgtcctaatactttgcagttagcatacaatgtggccagtgagtcttggactttcattaggatccatttctttagactcatcatctaaaaagatcttctattacacgtggcgcattttgagcaagaaacatgcaaagtagaaaggaaaacaaggaatacagaagaatttctcacatttatgataactacttcctatagaaatggtgattatgaagtagctggtgtaatagtcaccttttcctatttcttttggctgtattcgtttgttatgagaaaacacgaaagatgctttttatagcccttttctttccttatcgttagcttagtgaaattggcaaaagatttctgctctgcaagtacagagacagagtgaattacatcctttctggattttttttctcattttccttctagtgtcttttttccccatccacaaagatgtaagaattccaactcatattgtatcactctttttccaactatatatgatatctttgtatttttttaagattaatacagtacaagagctcaatcttgttagtttaaacatacctcacaacattttccttatgatttaacccactgcactttatagagttgtcattttaaaaatgccttctatccaacatgggctcatctcatgcccatagatgtgcctttgcttcgcagttgccaaaattccattgttttgcttctatttccagcaacataagaggttatactgcagtaggatagctcccatcaaaccttatagtgggcagaaagtaaactgacacagaaatcctgaaaaccagtgactaaatgaatggaaataaagtctttttcaaatattacctacctgtgctcgtttaggagagtggttcctgtgcttgatagtgtgttccaggctggccaccagagggcatagtgagccacttcttccaaacctcttggaaagagctgtgaagaagctcccaactctaggctgacgtacaggattgtgtcctcctgatctcttgaagcacctttataccttgtctgtaagataaagtctttttctagcaacgtgagtcattgaaactgagacacattagtcagagaatcggtggctgctgaccctctcccattttgcaaatgtgggacctaagggcagacattgagaccttgtggtggtcagagtcacattgcctgggctcagtcccggctctacgtgtgtgtattagtctgcttgggtgctataacaaaattacctgggtgacttttcttggacttgggtcgctgaaacaacagacacttatttctcacagttctggaagctgggaattcaggatcaaggtgccagtcagttcagttccaggtgagggctctcttgccagcttatagatggccacgttctcacggtgtcctcatgagggagagggaggaagacagacacataggctgtctggtagctcttgtataaggacagcagtcctgttggatcaggatcccacccttatgacctcatttaaccttaattacctccataaagtccctctctgcaaatagtcacattggaagttggggcttcaacatatgaatttggtgggggacagaagtgtttagtctacaacacttattctgggcttgtcactggcttgtcacctaatttctttatctttgaaattgattgctaatgctgttcatcctagagtttactaaaggacttggtgcactagcccaaaaacagcacccagtaaacaatatctattgaagctattatccttgttttttgtgcttagacttacccagaagcatgtaacttttagcaaacgaaacaaaagccaggtctcttgaccattgttctttctcagctaaatatcagtttatagagtggcagtcttccttctcatttggtaattttgaaaacatgaaatagagttccctgcactttcttctgtggccagaatgcacagatgcatgctggtctgtgagcatctccattccaaacaggagctgtgttgtaactcacctgtgtattccagtcgcccattactgcccccagcaaagtttcacccatgtcatgtggtaaggaggctggggtaggtagtggggagaggttgcagtagtgattgccacgattatagagtgcctattgcatgcaggcccccgttgctcagcattttacatatgtgatctcgttcctgacaactctggatctcagaatggtaccgttttaaagaggagaaagctgaggcatagagttagatgtattttccagagtcatacaaagttgtgaaggcaggatttgagcccatgtactgcgttcctaattgtgaaacttttacggttatttaaactctttcataatctgcatcttgtgacatattctgcttaaccaagatctggcattagtgggtattagataacatgttttctatatacataccctccattagtttgtaaaggtgtcattttataacatgaaaatggatttcatatgtttttattttcagcacttgctatgctaatataagaacatttctattttaatttaacatcctaagtctttatgttgccaccactttcagtgtttctttttttgtttttggagacggagtctcgctctgtcacccaggctggagtgcagtggcgctatctcagctcactgcaagctctgcctcctgggttcacgccattctcctgcctcagcctcctaagtagctgggactacaggcgctggccaccacgcctggcaaattttttcatatttttagtagaaacggggttccactgcgttagccaggatggtctccatctcctgacttcgtgatgtgcccgcctcagcctcccaaagtgctgggattacaggcgtgagccaccgcacctggccttcagtgtttcttttaaatatgctctgaaaactgtgtaccattaatttctgtataagccaaatatctaaaactttgcatagagactcacttgttttactagttttttgtcaactaaagaatttaggcttctcagtcctaattactgtaattaaaaatgtagtatatattctgtagtgtataatcattctgggtaacaaaatttgtgttttttttttttttttttttaatgagcgtccccagatgctattataaaagctgtcttgttattcaagggcttgcctggtagagatcagtaaaaatagttttaaaaaaaaaagttgacctgattgctttctaatgtaatttccagtagatatggatattagtgagttgtttttaaataaatgacttctttttcatcctaggcaaagttggatattgcgtttggaacacaccacacgtaagcactttttgtgaaataggggaacccctcaagcattgtcatttgtccattacacggttattcttaggagagactgagcatggtaggcccacctaggatctagcacagcgatgcttaactgagcctgggggagctattcttttatttaatgctcttataaaaattatttggtctttccttttaattttatagatcaggaaactgaggcccaggtttaggtatgtgatttttccttgggccagtagtggagacaggaatagaacctatttattctaactttaattaatatatacacacaatttttcaagatgtggtctcactctgttgcccagactggagtgcagtggcatgatcacagctcactgcagcctccaactcctgggcttaagcaatcctcccacctcagcctcccgagcagctgggactacaggcacacgccaccatgcctggctaatttttttgtagagacaggggtctcactttgtgacccaggctgatctcgaactcctggactcaaacagacctcctgccttagcctctcaaagtgctgggattacaggcatgagcccctgtgctggcattaactttagctttaaatttgttcttgtttgctcattgctaaaatttaccttattatttcctttggtccattcaccactaccccctcgctcctacacacatactttgcaggttaaactcaacagagctcttttttttttttttttttttttttttttagacagagtctcgctctgttgcccagcctggagtgcagtggcacaatcttggctcactgcaacctccatctcctgggttcaaacgattctcctgcctcagcctcccaagtagctggggttacaggccactgccaccacacctggctaacttttatatttttattagagacggggtttcaccatgtttgccaggctggtctcaaactcctgacctcaggtgatccaccctcctctgcctccccaagtgttgggattacaggtgtgagctaccatgcctggccaagagctcttaattcagagtttaaaatgcctaggaggctgggcgctgtggctcatgcctgtaatcccagcactttgggaggccaaggtgggtggattatttgagatcaggagttcgagaccaatctggccaacatggtgaaaccccatctctactaaaaatataaaaattagccgggcagtagtgggacatgcctataatcccagctacatgggaggctgaggcaggagaatcgcttgagcctgcaaggcggaggttgtggcgagccaagatcatgccactgcactccagtttgggtgacagagtgagaccctgtctcgaaaacaaaagaaaatgcctaggaaagtaattacagttgaacttttcccaattaagtatctgtagtttacattttgttgaaatgacattatcttgtagaagattgagctcgtgtcttgaaattacttttagttgcttatttaaaaaaaaattttttttttgttgagacagtctcgctctgttgcccaggctggagtacaatggcgcaatctcagctcgttacaacctccgcctcccaggttcaagcaattctcttgcctcagcctcctgagttgctgggactacaggcgtgtgccaccacgtccagctaatttttgtatttttagtagagatggggtttcaccatgctggccaggctggtctcgaactcctgacctcaggtgatccacccgcctcggcctcccaaagtgccgggattacaggcgtgagccaccgcacctagcgtatttttaaaatgttttaagaattaaatacttcttatgttcttgacacagctcaagaggatatagagtttttattcttacagctttttctttggtgagagaagcaagacaaacatgtgaattagaaaaggagaatcaccttccagatcatagtgatggagggtaaactgccttccccacctcacagggtagagctagaaacagtgaacgaggcagtctttgagactgcatacactttggcacacaagccctgctctgtccagttttggttggatgccatgcaatcccgtggtctgtctcacagtgttttagaatgggaaagctctttggtttcctctagagctgggagcagagttaattcttatggctccaagaatcgatagaggggaaagagaaagccaaagcagctgaatgtcaaatatccagatccaggtggtggccagtagcaaaccacaggatgggcgaggcatgcctctttccactaagatctgtagtcaggcccccaccatgcatcatttagtcctctttcccaccaaggccatgtctccccccacctcacctacccctgtaccagtagcatgaagtgttcaccgttgctgccaccagccctgtgaaaccatgtgtggtgaaaggagtgccctggcatctggcatttgtgatcccaacaagctcttccgctggcccactttgtgaccttggataatccctgttaaatgtccagctgtagattccacaattgtagaatgagaataactcctcttctgtattgctgtgaagacttggtgtggtaacatacgacagagcttctaggatggcacctggtagagaggtgcttgccatatgttagttctcttccccctttgcaggaatagctgcgcatttgggttgggtcccttttgctgcctcacagcttagcagacagtatggcaggtcagcattcttcaagggagatctcattcctcacccttttctatccatttttaactgtgaccttattaacactaccattttgtctatgaaaagatgaatatggctactctcaagttcataattctatttgatagcattcattgacattagtgtgtgatttgcctgataatcgatgtcttgactaatggaaatatttgtaaacgttctatcatgaatccataactgacttattcttaattacaatcagctgctgatttggcaactgtgtatgtaaatttgcccagatttcagggagcacatttcacaaatggaaagaagatggcacagcagctgtcatttctccagctttgcattaatttactgtttgccagcttgggttaatttctcgttttggcaagagctaaatatctcattctcttgtctcttctcgtaccctttttcttatctttttatgataatttcatcctgcccagataatgttcatgttgtttatttggagagagccagtggttcacttttttttgccatgtgtgaattgagtttcatcagtaagtattaagtagcattttggcctcaatagaaatgataaaataagtcaagacagagttacagccatgagaagtgacactttagttggagagagagaacttagattcctgaaatattgaaataatcctattgaaaacaacagggagataaaaatcatccattattagatgagaaaataaagctgtgtaccaaaggagtaataggaatgtacaggtgagagtgtttcacatttaacaatttttttttttttttgagacagagtttcactctgtcacccaggctggagtgcagtggtgcagtctcggctcactgcaacctccgcctcccagcttcaactgattcacctgcctcagcctgcttagtagctgtgattacaggtgcccacgaccacacctagctaatttttatatttttagtggagatgggtttcaccatgttggcaagcctggtctcaaactcctaacctcaggtgatctgccagcctcagcctcccaaagtgctgggattacaggcatgagccaccgtgcctggcagcaaaatgtatttttgcatttcactcacaatagtcctgaagtggggttgatccttagagatacaagtggaaaactgaggctcggggacattgaatggcttacctagggtcaaagggcttctaaatgacaaagtctggagctcaggtcttcagacttcaaatggaaagcttttatctatatcctattccctctctctcactgcaattaaaataagagaaatgtgttcgactagaggcctggggaggtcacatggaaaaagagtggaccccactaagtctgatttgggttaatgaagaataggcaagacttaccccaagcccagataacacacttttgacaagtgtggcatctatggatacaaaaaaccactaatggtaatgaagcatcttttaaacttcttaaaatttcaactcataataagaaatacactttacatttcagtgtattgtgcactaacatacctttgtgccaaaacaaaatttcatgaaccagtaattaaatatatacagtataccaatttatgctattttagttgtttaaaaaatgccagccatgatgcagcaagaggttgttgaccatactttgaatctcaaacaccagaccagaaggttccaacggtccctagtagtaacaggtaatgctgaatagataataaggggccaggctggagggatgtgaagtgccaggactggcactagggttgaaagttcttttaccaccaaatactcaacctttctgaaaggttttcatcctatcacttaggcagactttcatcatggtaatgtatagaagggaagattataaatgttaagtttgggtaatatgagagtttaaaaaaattcctttagctatgtattacatttgcattggaaaggtattacatattttgaaagtactattaatgctttttgatcctttgctgtttttaaaggaaaatgatgctgctgctctatgaagaaggcctccgggttgtcatacacacctccaacctcatccatgctgactggcaccagaaaactcaagggttcgtaggggcctgctcacttcctggcagtgtgtgtgttgataaaggtcaaaagccagaacattcactttattcttttttctattttttttttaagttgtaaaaataacacacatggcctagaaaaagagttgtatgcagaaaaagttactgtattcttttactacctgccccattctaccttcttggggtaaccagtgttaacaggagcatcatcatccacagctacctctgctgtacatgtaaacatacattactatttacacacagtagtctcttcctagtttttagagaagtggcatcatatacactctacagctaagtagagggcacagcacatgcagagatctgaggcagaaaaggggttacagaatgaaagatctgaacctattgttttcctagtaggatttaccagatagcttttgtgatttctccttactcatgtacccacctgtatttttgcttaccacttcccaaacaggaatcaaaggaaaagttggggtagggcctggtcatgttaatagtgtgctaaatatttccccactcccccagttggtgtattttctttgaaacaaatttaagctggtgtctttttagagcctttagtgtgttaataaagttgtgaatctccaagagaagaactgaatacgaaagcttttatgaactttttaaactactaaccctctgtacttggtgcacatatgctagatccaggttttgatccccttttcaagaggggtttgctttttaaaagggagctttagggatttgctcaacaagttcagctattgttcttgattatgactaactttaattttcttttgtttaagccattttgtacatctctgcctgtgctagagaagagctggttaacaaacagccttctgtgttgggagaaactcggacgtttgtctagcaccatttccaggttcacgttttctctgtcatcctcctctgcctcaccctgccccatatcattgcctagcttgggctagaactcctaatttggagtgtattactttcagctaagctctgctgagcccaggttacatctttgttttgtttgtttttttgagacggtctcactctgtcacccaggttacaatgctgtgatgcgatcacggctcactttaacctcaacctcctgggctcaggtgatcctcccacctcagccttctgggtaactgggactgcaggcacgtaccaccacacttggctaactgtctttattttttgtagagacaaggttttgcctagttgccaagtgatccgcctgcctcagcctcccaaagtgctgagattacaggcatgaaccaccgtgcctggccccaagttacatcttagtttgagctgaaatagctttccagtttccttcaacaggtcttgcttcaacctgagtgcactgcgcaggacaaatgtaatctccctcccttaaagcagtccttcagagtttgaaagggagtcttgtttctgagccttacatctcttgttccctccccactcccttgccccaccatagcatgtggctttgagacccctagctgtaattcctggtcgcttttctataaacatgttataatttttcagtatcccactgaaaatatgcttttcaaaatgaagtgtggctctgactggtccagggttgaggggatagctgcttggtctctaagtctcagctgtagcactttcttgatctactgaatttatggttaactatgcctttggtaccccaagagcttctaagccagttctcctgagctgccagattgggtttggggattcatgtggccctatcaaaaggcaatgagattaatgtagcttgttctcatgaaacaatgttactaaagggatttctcaggttagctctcagcctcacgtggttccaagaatcccaccctgggcctccagctccttctgaagttggaagcttagcttacaggcagtagtactgtcttgggattctctggggtggttgccaggagggaagaggcagggataagggcttgggtgtttcttttatttaaaaaaagtattttttaatttaaaattttggaaaacttattgactaggtaggaacggttcaaaactcagaaagtaccaagactatgaaatcttcctctggcagccatcctggtgtgggatcctattatttcatgcttggcctatattctactctctaatgttttgcatttcatgttatttgtggtaattttaaaacttttgaaagcagtttttgtatacaatctcacttcataattggtctactgtggttctgctaatccccttcagctgcctcatgatccacctgttgatttctcactttttaaaattagaacaagagttgcatccaaagctcacagtaaagaataaaataaaattatttggctcattataataattttctcattttgtgatgtgttaaaaatgcctcatatctcagcatcttagtttagaaagtcatttgtcttgtttctcatccagaactcacctgtgagtgaatctctgatccaggaggagcctcactcagcctgggaactttgaggtgctattgcaaggggaggtcctccacgtctgtccagcccaacctggtcattttacacacggaggcaaaggcccagagagatcacagagcttacccaaaatggtatagtcagctagtcgatctgggtccagaacatgggctccagccctcatcacaccatgctacctcctgtgctaagtgtctccccagggtgggaagcaggggtatgaaatgccccttgctagaaacttgcagagttgagaagatgtacggccgagagtccttgcagttctggatgccttctgccctggtggcctgcatcttgccagtctccttcaggggctgccaggtgaaagagaaattgggcagtttctctttcagcttaatagatagaacccagggtggggaaaaggagagtagccacagaaggggaaaaaagtaacacctgatacttttgactgctcctgtaagtcattgctttgcaacagcccagtgaggcagccttgttaaccccacttttttgcatttgaagaaactgaagcacaagaggtttgaagccattttagtaatctactgtggagcagtttatagaaggattgggattagatatgattgttttctatttatggatataatgtagaagttttggcaaagagcattgttttcctctagggaaaaagaattaatgaaatgaaagatgtctgtaatgcttcttcagtgaattaagtgttgaaagtttgaggttattgtaatgtcactgaatgtgatatatacttaatccaggcaccagaaagtataagacataaaaatatgctgctataggacctacgttatgaaaatgggtttgttaattgaaaatagatttttcacatgcacttttggtatagataacacaattcttatttcacatttggctgaagagctgcattgatgcagacaagggcaaattcttgcttgggattaccactagtagcatggatttgctttaaccgttaagagtagaattcttaactcttgtcatcaagtcttagaaagcaatatataggtgcagaggtaagaggagcaataaggaaggtttggcaagtgagagggagcatggagggatgtgggttggaagaggtgggcagagcccaggtcttactgaatcttaaattcatggcaagacattcaggaataattctgaatgtgatgagaaaccattggagtggtgttctcagatttatgtttcatgtttcctaagattacttaccatgtggagataccgagaattcacctctttcttaggatgaaggcataatcgatacagagatcattatgatcagttgtgtgcctgactgttaaaggttatttttttaattccagaatatggttgagccccttatacccacgaattgctgatggaacccacaaatctggagagtcgccaacacattttaaagctgatctcatcagttacttgatggcttataatgccccttctctcaaggagtggatagatgtcattcacaagcacgatctctctgaaacaaagtatgtgtcagcttatcaatttggggtgcttatgataggcttataccttgggagcctcatgaggtctggcatgcaggggcctggaaagaggtggggtgaaatctagccaagcttcaggatgtgatgaggggatgagcagattctatcacatctgtatcttgtggttctcaggcattaaagtgacagccagtgaatcctcatgtttaccttagcctcccactgggttactctcacaattattgagttctttgtctggtactttacatcttgtaggcattccatcattagttgatttgcttgaaaatgaatttgagagtcaattcaagaaaatggattggctcttagatcatttcttgattatattagttttcatgtgtattttgtcattttttttggtgcccaaagcacatcactatattttataacttgtgtttttatgtctttttagtgtttatcttattggttcaaccccaggacgctttcaaggaagtcaaaaagataattggggacattttagacttaagaaggtaacagaacttttactattttaacatttttaaaaaatttaatgtatattctctcttttaaaataattatatattttgatgcagcttcacaatatttctgcacaattctgggcaaatagatacttgataaattgataattataattcttagtaattactgctttttaatgtgttttgcctcttttatagctgtaggctgttaatggcataaatatatagaccttttctagtttttatattgtaataaagatagaggcttcctattcatacacatactgtagctttgattatagcttttgattgttcagcatatcaagttttaagatataaattcaacaaacagaaaatgttgagtaaagactacaactgagctataatatattttgattattaaaccagtgcccttaagaaaacaaattcaaaaataatacttgctgctgatatgaaaatgcacgaagaaaggtcataaaataagttgaagattaaagtttttttcatctctttttaggtggtttactgaccttaataaattccctggccaggtgtggtggctcacgcctgtaatcccagcattttgggaggctgagaggggcggatcacaaggttaggagttcaagaccagcctggccaacgtggtgaaaccctgtctctactaaaaatacaaaaattagccgggcatgatggcaggcacctgtaatcccagctactcgggaggctgaggcaggagaatcgcttgaacccgggaggcggagattgcagtgagctgagaccacaccattgcactccaacctgggcaacagagcgagactccgtctcaaaaaaataaataaattccctaaagtggctttcttaaaagccttaacctcttattccataaactatttaaagtctaagaattttcccttggttaatgaaactttttattttaatttccttttatgaaatgagaccacagcttaaagcaggcaagatcttgaagacatctttatgtcttggcctagagaggaagttcagcacattggcctgtgcccagtcttggaggcagatatccatagctgggttcaaaccctgctttgttatctacaagccgtgtgacctcgacttgttccttaacatacatcggttgtcatctataaagtggacataataatagtacttccctcccgtgattgtgaggattaaatgaaatgatgaatgtaaaatagtacagggcacacagtaagtcttcagtgcacatacacagttgtttgtggacaaatgtctaatggtttagataggctagataatagcacgtattatgtgtgatcaccatctgatactgaaagttcaactgtatgttaagagttttcaaaccactttttacacacagttgctcatgttgcaccacagctttcttccaggaaggccggccggtgattaggtgcctgtttccactgaagtgtaaatctaagccagaggcttgtccaggatagggtggcccttcaggggctgagcactgcagtagaaactgggtgttgtaagttgtcggttcagctctgtttcctacaccatgctgtacccaaggtggacatggaaactttgggctttttgggaagtgtatgtgtaagtattaatgcctaacctgtgttaaggaaaataatacatattaaattaaacaaaacgtcagtcagatgagctacagtttatttttctgctctctccagccctctaggtaggcattcagtacatatttaagtggatacagtttccaaatgttttcttaattgtttctgcagctttgcataattatcaaagcaggaaatgcagatcagtcttctgcagtgttttagctggtatgtgtatgtaaatattctcttttatgtttagaccatcacagctgcctggagctcaagtgttaaactatgactgttaagcctctttcaaatgataggagtcaaaatatgtaatccttctaggtattgtttaagtgttggtagcaaaaaactcactttgtttcctctgctctcacactacaacagtcaacacagaaaactgtgaccaaatatgtgtggggttttcctcatacactaagcaggggacaccagctgggtgtcctctaattcacttcagttcttatgctgtcttcctggagatgtataaagaaagtgactttaaagaaagtgatgatataaagaaagtgatggtataaaaaaagttattttttattccaaagctggcttagaggaataagtacaggcttcctgtcttaaggatactgctttgctcttggagcagaaagtggacacttttaaaaggggcctagcatgaatggcacgcagaggaggaagcaagcaggtggatacttccttactttctgccttctctaccaggcagtccatttggtctcttcctgggcagaactaggttgtaaagatggctgaaactctccaggtgggagagtttcttagtgggcatactttgggttgtaaatttactgctgtccctcgaggcagtcccctggtgggagaaagttctgctctggagcttctaagcacatagatgaacttgccctgtagggagtgtctagtaaaggaaaggtaaaaggttatattgtatttctaaaggtctaagtaggaagtggggaaggagttggggaatagtagggaaaaaataattgaaaaaatacattttttttaaagaaatatgggggtagcctcagatcccatagattgagggctccatcccacaagactgcccctctccctcagacaccagttgcaagtctgggcctccagaacttctgactgaccagcttcaagttgaggttcccatgaccctctctttgggcttcatttgctagagcagctcgctgaactcagggaaacacttaacatttactgctttattataaaggatacagatgaagagatgcatagagcaaggtataggggaaggggcacagagctttcatgccctctctggatgcaccaccactgtccagcagcccgcaggtgttcagctgtcggaaagctccctaaaccctgtccttttgggtttttaatggaggcttcattacataggcatggttgattacatcactggccattgctgatcagctcaacctttagcccctcctatccctggaggatggggggttgtgccaaaagtcccaatcttctaatcatgccttggtctttatcgtgaccagcccccatcctgaagttgcctagggtctgccagccatcagtctcattaacatacagaaagacttcacattggagatcccaaggattttagtagttgcatgccaggaaacagggatgaagaccaaatacatatttcatagcatcaaagctgcattaaacacttgtgatttcaagtaaaaaaaatctaatttcatatgacaagttggtggtttatctgaaatttcttctgaaatgggcctttttaaacctgt

SEQ ID NO: 152 - DNA, 2135 bp, Homo sapiens
  source 1..2135: mol_type = other DNA
cgcgcttccggcccgagccggaagctccgactgcggcggcatccgggacggcgggcgggctggccaccacgggacaggaaggtgagatccgggacctcagctttgcaagcaggctccgccggcgaccgctgacgggcgctgggctcgcggcgctgcaaggcggcgaggcccgggcctggcgccgcctgcgcagccttggtcgcggcgtgccggcgctgcagcgcggcagggggcggggccggccgcccggaggcccaagtggcggggacgcctccctgccgggtcaggttctcagagcgggtctccggcggcggcgacgggggccgggccgcgcgtgacccgccgcagtcacgccgttcttaatcactagtagctggtgctccaggctggcggcgctcacctttctcctagccgggtgacccaggggatttattttatgttggctttctctgaaatgccaaagccacccgattattcagagctgagtgactctttaacgcttgccgtgggaacaggaagattttcgggaccattgtaagtgcttaggagttactgtcttaacttgggggcttgacttgtagcaccccgcgttcacgtctgaagcagtactgttatgccagaaagtgtttcacctgtcaaagtgaaatgtgctgtgagaaactagtttaattccagtttctggagggcgggtattatggacctgtttaagtaggatgcagtgatttattctgagggattcccgttaaaaagcagaactcagtatatactgaaatcaatggttttttgtttttttgtgtgtgttgttttacttgattgtaagtattacacaaaacaacctgtaagttttacatttcttaataggtgtttaatttaattattttaaatcttaagtgtgttagtgggatattttagaattctttttttttttttttaattagacagagtctcgctctgtcgcccaggctggagtgcagtggcgtgatctcggctctctgcaagctctgcctcctgggttcacgccattctcctgcctcagcctcccgagtagctgggactacaggtgcccgccaccacgcccggctattttttttgtatttttagtagagacgggatttcaccatgttagccaggatggtctctatcacctgacctcgtgatccacccgcctcagcctcccaaagtgctgggattacaggcgcgagccaccgcgcccggcctagaattcttggagataaagcaagtacatttggagtagttgccgtgacagcattactagaccctaattgtattttcttttttaatttgaaggcacagagcatggagaatgatgaacttccgtcagcggatgggatggattggagtgggattgtatctgttagccagtgcagcagcattttactatgtttttgaaatcagtgagacttacaacaggctggccttggaacacattcaacagcaccctgaggagccccttgaaggaaccacatggacacactccttgaaagctcaattactctccttgcctttttgggtgtggacagttatttttctggtaccttacttacagatgtttttgttcctatactcttgtacaagagctgatcccaaaacagtgggctactgtatcatccctatatgcttggcagttatttgcaatcgccaccaggcatttgtcaaggcttctaatcagatcagcagactacaactgattgacacgtaaaatcagtcaccgttttttccctacgattacaaaactgccagtcctatatggagtctgatcacaagactgcagtttcttcacagatctcaggaagttgtcgtggggcagaggctttttaaaaacatgtgattagggagctatctttatctgaataataacgaatttttaggtaaaacctgagatagagtactacaaaatcatgttgatgacttcagattttggaagttaaatcatgtctgttatttgcattctttagaaacttgactaagtacctgaattcatatttctattctactgtgcaacatagtgatgattcagaaatttttcctttggggaaaaaaatgaatatgaacatttccattgtgttaagtgtaaaaaggtccagacatgatcataaaatttaaattttatacaa

SEQ ID NO: 153 - DNA, 32744 bp, Homo sapiens
  source 1..32744: mol_type = other DNA
ctgcagggtgcgaaggggccggcgccgctgccgagttacgagtcggcgaaagcggcgggaagttcgtactgggcagaacgcgacgggtctgcggcttagggtagggaggccgcaggcgacacggctcgaggactcgcgcgccgagccgggggcgcggaggcgggcggccggggctggggccggcactgggccttccgggcggcctgtgggtccaccggggtgcgggagtcgccgtcagcctcggtcgccccgcgggaccgcgctccgccgcgtggcttccgcctgcgcgggcgtccgctccttccttgtctcgttcaggccccgcaggcgcccccggggatgcctggactggccaggccggcccccatctgagctccacgttctggacgcgcgtggtgtcgcggccgagctcgcaaacgccgcctcgggcctcaccgggaagccggttctgtcaggcggggctccgggtgaacagcgcaggcgaggcccctgccccgcagagctcactctgtagaagggaaacaacacacgcagctgcgatgttttgcggatacggaaatgctttcttagaaacgggacaggcagttgcgggctagaggaatgggggcgaggctctttaggttaggtgatccgggagggcatctcagaggatgtgacctttgacttgagacctgagaggggaggccgacccctgaggatagcagccaggcctggggaccgcgaggccgcccgttatttccctgtcacatcgcggggaggccccgtgatcctgtacttgagggtctgtctggtgcaaggcagttagagccgcttgtgtgttttgcaagggactttcataaccgtttgacagttcctcctcattctgtccttacctggcagggtggcatcctttactgttgcagctccattcaggggcaacgcatagtttttcctaccaccgaaatagtattgtggttctcgtctcaaaactcttaggtggtagaattaaattcgacagacagcagcagagtcagacactataggttcctgttgaggccacccatttttctgatgtcctttctttcaagtcactcatttttgttttcctttgtatagactcttcccttccctttcctgtgtccctttcttggaacaacttggaaatacaatttgctattgggaggatgttggttttagggaactgttgaagaacttcattaattattgtgtgtgtgtttttcttttcttcttctttttttttaaactggaattgcccatctgttgagactgaaattcaagagtaaaaaaaagtagggcagcatttattttcaagagttgacaataaaggcacctttctttatgacatgctgagcatgatactttgggggagaatttaatctagaattttgaagcattttcagaaggaagcaagggttctttatatagtcattttatgtaggttacgtttatgttcttcaaaatggcatgtagtgattggaattaaatttctgggtagataagattatgttcatctgttacctatagaagggaatgtaacttaagtagtcacttaataatagctttctctgttgatgctaccacagatggtattctctacatctcaacattgctgatcagattctgtgttaatacagtaacacaacttgaatttaataacaataaacttgtgttaggcgttactgtcaatttagttctggtatccagtacaaataccagttttatagtgcaatgtcttcttgttatgttcagtgctgcaaaaattatgagaggatatttgttaaacaaatgagataatggagtaatgtgttaagcatagagcctggcatatagtaagttagtaagtgcccaggaaatggttatatggaaagcttatgctaagttttattccagtatgcaagtgtgtattttaaaaataacagtaatgcattcaaaatgttgacagaccctaaaattaaatttcttaaaggaaataggccagcttttttttttaactttgagaactaatgtgaaataataataaatatataagtgaaatgtcccagatgtctagaaatgaaaaaacaagattttaattttgacagctatatttttttttcttaaaagcatccctaataagatataatgtactatgattaggattatgatttgaaaaataaaactttaaaaatatttttgatttgaaaaataaaacttatttggaaatgaagcgaagctttaagatttaccttatatcaaatgaaggatgtctcctgaatttatgcaaatgtgcaaatgcttatatctccgtagatcaggcagtgagcctaatgggaattaaatgctgcctctttgtgcgtgtgagtgaggctttcatgaaaattgctcttgatgggttctgagaatggattggtagctgaataggactggagaatatttttcagactggtaggatattttacatgcttgccagggttatttttcggagtaaggagaaatggactcatttattcagcagagatcacgtgccccctatttacaaggaattgtgctaggtgcaaagtctattgctattgtagtgttttgctgaagcaagttttctttgttttaaattagtgtacgtctttttttttttttttttaactttatctagcatccagcacagaataatccaataaatgtgtagggcgcctttgaaaaactgcactattaatgttaaaatgtagaaaatgtttaataaaggtacaagattaatttaaaagggtgatagaaccctaataaaacatttaggtaggtgttgtaaccaagatgtatttttactctaggataagtttggctcttttgatcaaaattcctgtgaatatatttctacttgccattataaagatgcagagggctctgtcctttgaattttttccctttggtgcttgaatgatatttaagcacccagcattctgaagttgctgttttgaagtaatttcatgcactttcccaattactcctgctccatctctcccaatgttgtcttaaatctttgcactcaaattcaagcacatcctactcctcctgttctgagtgacatatgggcaacactttaaaaaagaaaagctctctagaaaatctagagaggtacgagcgatggcccttctcccatattaggagttagatttttagtattcatcaataaatactgatgagaagaaactgctctacttttaccaacattcttcaggaaatttattaagatttttattagccacagtatctttgtcagcttggaaacatatatgtttgtgaatcacatttatttagtctttaggtaagtatatggattttgatgattctttgcagttactcctatctctctatgggtttcttgcccataggatgggaaccagtactctaggatttgaaaattaaggtagatactgttcacactggcaaatatttaagatgaatattaaacgtgtatactaaaatgtttattggtaagtaattcattaaatgggaagatatactagatgaagtaaataattaaattgcaagcacaagcaaattaaatttgagatttgggaatggtctgtcatatacttttaaagcaaatatcatactgataatggaaggacacgtgtcttgtggagctcagtatcaggaacaatatagttggtcctgcaggggactaaacatgagaactgaaagtcattaggaacacgagcagcctcattccactgttccagggaccttataatttctttctgtgtatttattttattttctttttgaggaccgtctgtctggctgtttgtatgtcggcagatatgtctgctctagacttagatacttgctttaagaatccaaaagagattgcattatctaattgtcatttatatctaaaattaaacaaaccatgaagttagacatagctaagataaccacagctttatttcaggttaattgcttttcttagattgtttttatcaagtgacagctaaagaaaagtcatcatttgatgacactaagtattagtgcattgtgattgcgtttcacaatattaagtgttagaaagaactattagaccttaagtatttatagaatgtgtctggaagacacagggagagaaactgttaatgtttctactgtagtctttagagttgcttttttcacatcttattgcagtttactatgtaatttggcaacagctatcaacatagagattatatgtaattacagtgtacccttgaacaactcaggggttgggagtgctgacccccatgcagttgaaaatccatgtataagctttgactcctcaaaagcttaaccactcatagcctgttgaccagaagccctaccaatagcataaacaattaacacatatttgtatatgtactatatgctatattcttacaatacaataagctagagaaaagaaaatattattaagaaaaccctaagaaagagcaaatatatttattgttcatgaagcggaagtgggccatcttaaaggtcttcatcctcattgtcttggtgttgagtaggctcaggaggaggaacaagaggagaggttggtcttgctgtcttggagtggcagaggcagaagaaaatctgtgtataagtggacctgcacagttcacactcatgttgttcaagggtcagctgtatgcatttttttcttagaggtaatctgttatttgggaatcaggaaaaaagttttaaaattcattttttaaaaataagttcaggttataacatttaagaagtttaatcttgttttttcagacttgcagaaaatactttagaaatgctgactctaaaatttatctttcatatgttgctggtaggaatgtaaaatgatataaccactctggaaattagtttggcaatttctcgaaaagttaaacgtacatttgacacacaatccagcgattgcactcctgagcctttatcctagagaaataaaaacgttcacaaaaaaacctgtacatgaatgctcgtagaagccttgtttataatagctaaaaaccagaaacaactcacatgtccttcagtgggtgaatggttaaataaaatgtgatagtcttgcggtagaacaccaccatcaaaaaaagaaacaaactgttggttcatgcagcaacttggttggagtttaagggcattgtattgagtgaaaaaagccagtctcagagattgtatgattccatttatataggattctcaaaatgacaaaattatagaaatgcagaacagaccggttttgctggggttagggctgactttctttgagatgatagaacagttcagtgtcttgtttatggtgatggttacatgaatctgtacacatgacacaatgtcctagaattagacacacaaaagaatgtaaaagctgacatttcaataagtagttcagtgatgaatattgtattagtgtcactttcctgcttttgataattgcacagtgcttgtccattttatggctgtatcacatttaaccatttacccatggaaggccatgtgggttgtttctggtttttggtgattgcaggtaaagctgctatgaacattaatgtacaggttcttttgtgactgtaagttttaattgttctagaataaatatctagaaattcaactgctgggtcatatagtgataaaaccttgagccctcttattctgtcccaggtggggtgtaaatcatccctttgtccagcatatccacactgtatacactacccaccagctagttagtcactcttggttatcagattgactgtctggtgtcttggtgcttgtgtttgagaatcccttattgtacttagtagtgaccccaagtgcaagactagtgatgctggcattttttttttttttttttttgaggcaggtctcttatcttgtcccccaggctggagtgcaatggtgtgatctcagctcactgcaacctccgcctcccagggtcaagcgattctcttgcctcagcctccctagtagctgggtcacaggcgcctgctgccacgcaccgcaaatttttgcattttaagtagagacagggtttcaccattttggccaggctggtctcgaactcctgacttcaggtgatccgcctgcctctgcctcccaaagtgctgggactgcagggagtgagccaccgcatctggccgctgacatattgttataattactcttagtattgttgttaatctcttaactggctccaatttataaattaagcttcatcataagtatgtctatctaatgtatgtataggaaaaaacgtatttatgtagggttcgatactctccatactctccaccatttaaggtatccactgagggctttggaatgtatccctcacagatgaagggggtgctgctgtgtttgagagatacagtttctccacaacctcactaccatttggtattggtgatattttttgtgcgtactggtatcttgtcatggctttaatttgcatcctaatggctgatgatttcatgtgcttatttgccattcatattttttttggtgatttgtctgttcaagtcttttacccgttttgtgattggtttgttttcttactgattttagagcattctttatatgttgtgtatacaaaatcctttgccaaatatatgatttgtaaatatattctctcagtctctggcttgtcttttcattctcttaacagtgtctttagcagcaaaaaagtttcaaattttgttaaagtccaacttctcaatatatggatcgtgtttttagtgcctatcttagaactctctgcctaactctaggtcaggaggttgttctcattttttcttctgttttacccttatatgtcttacatttagatccgtgatcctttttggtttcatttttgcacaggatgtgagctttagatcttggtacatttttcttttccttttgtccatggatgtccagttgttccaaaaccatttgttgaaaagtctaccctttctccattcaataagttttaaaaatcaaaaatcagttggccatatactgtaaattaggtatcaaaacaaagacaggaagaaatgaatgagcaattaactattaataaatacaggtttattgaaggtataacatggctggagtctggaaaaagtgggaaaacattttagagaataacatgggcaaagatctgttctagagaaaataagtaagaactggctatttttgggagtcatgcaagtgaagggaagtagagaagtaaaggaaggatcattggttcgtgaaaaagaaagagtatataaacttctggctagattgaagcatttgtaatcagtttcattggctattaggaaggtgctgtatattcttaatcaggaaaatggtatgatagaaatggtattaaagagaagttgttttaggaccatttgtggcagtgatacgttggtaggaagaacaggatataatcatgacccttgacttacaactttgttttacaaatatctgccagaaagctaaaaaagtggtgttacttcagaatgttataaattcctagtattttctagaaggcagtggtagatttcaaacttttgctgctgtcctcagtgatggatatggagaagtcagcaggacttccaaactgtttcgtatttatgctactgttattaagttgtacatttgggaaaaagagtagtttccgttggctcattgttgatgtgggtgacatttcttaccaggcctgaaaagagtccaagcgttgagcaactgaaatgataaaaacatgaagagttcataaatcggtccaatgaggaaaagttaatgggatcagatttatttatcatggcaaagaggagactcaggggttatttaatcagtatgtcctgatacttgtatgtgaagaactatacagagaatgatgatgaccagctgttcttcaaaatcctgaggactgcataagaacaaatggctcaaattgcagctttaaggttttggtcttagggaagaatttccggacagtaaagacattatatatttcatgtgagatattaaaggatacactagaaacctagatgtagtataggaacattttgcttgtagtcagggggatgtgaaagataacagatctatgtttttgccctcgagtcctattaaattcatgagcaaaagtactcactttccattttgttagtgcctacttcagttgttagtttctttctccatgcaaattatactcttcccctcccctgccgtttatctgtggggatctctttggtttctgctttcttttgtgcatttaaaagattatcatggctgtagattagacttaagtcattttaaaaataatcagtcaacaaatagaacctgtatagtgtcgaactactagaaatcaatgcatttctgttcctatttagaacatggaaaaatgtatcattccattaagaaaaaaatcagtgatgacttgttgaggcaaggattttacagtgtaagaggttaccattgacacatgttaatgaaagaagggcagtgttaaaagctttcatgcaacatctcacatgtttttaaagtacctgttctgtttgatttaacttccttattctgattcttttctacttgtctagatctttttttccactgaaatgttgagattgaccaagaatatttcacttgtgatttgcagcccttcagtattatcacagagaatttttctttttttttttttttttctgcagaagagcaagctcttatagtgctatgcaagctgcccatttaaaactatcattgcttggcacctatgccctagtgacagtttgaccaacatgtgagcaggcatactgccatcctgacagatgggcgtgagtataggcagccaagaaaccatgtatctgcatctagtgtatttgttaagggcaggattcccagtcggggatgttcaaacgtctgtccattctgagctttcacgcctatggataaaaggatgtcatcattaatcccatcctccatgggtatataagagcttcttggctcttacagaagtaggcaattggggacaatcaggataattgttctcttcttcatcacaggactacttcaaataatcctttcctctttctcctagccagctaggtttacagtgagtacaaacctgttcagacattgtcctgatacttgtggaatatgtgcttgttcatttcttttccagagtgtgaaagctttgaaagtcatttgatgtttatgctttggacagtgacatataaaattgggtcaggtagatctagttcaaatattgactgctgtgtgacattagagcaattcaatttagcatcaaatcaaggtaaaataatacctatcttagagttgttgaattaactgcaaactgtatacatgagtcatttggtgtaatgtctggcccacagtaagtgttcaataaatgtttgtcatcatcatcattttcactttgatatacctgaaggtatttttctctggagaggtatctgaaacaaaacttttttcaattcactctcacttcccatcattcccctccctccctccctcccttccttccctccttcccttcctctcgctctgtcaaccaggctggagtgcagtggtgcgatcatagctcactgccaccttgatttcctgggagcaaatgatcctcctcctgagtagctggaatgacaagccaccattcctggcccaccattcttgtgacatcatcacatggtctggtctatgatgaaatgcctccaacgacagagaactcactatctctagggcagaatttctcaaccatgggactgttgacattttacatgggtcactgtttgttctctgcactgtgggatgtttagtggcatctctggctacagagacaaaatcatctctggttgagaaccactgctctagagacagcctatcctatttttattaaagttttgaccattagaaaattctttcttacattgagtggaagtctacttaatttcttctactcacttctgccttttggagaaatgtggaacaggctgaatccctcttccacgtaacatcctttcaaatatgtgaaaatagtcatcaagtattctcagtctttttgatttgaaacatctccagttcattagctattccttacatggcatggtttcatgtcagtttaccacattggtggctttcctctttttaaaaaaatttcattttaaactgtagtgctttgaattgaattctgtgctccagacatggcttgatacgtgagaaatagagttgtatctcttgttctagatataacacttttcttctgtgagttaagggaagaatatcaccttccttcttctacataattttattaatattagctatatccttttgtgaccacatcatacattgaacataaagttgaataaaatccctgcatctatctaagctatgtcttttcatcctgtttgtatgcattagttttggggtccaaccatgggagcttatgtttgtcttgttaaatttctttttattgaatttaactaactgcaacttttaaagatattttggaatcctagttcttggtttaattggcagtttctagcctaaaagaacatgtatgtgatgatgctatgcactgagattggaaatacaagagaaagaagtcactctctctgtctctctctttctctgtctctctctctgtctctccctccctctctctctgtctctctccctctctccctctctccctctctctctccctctgtgtgtgtgtgtgtgtgtgtgtgtgtgtgtgtgtgtgcatgtgattgaaaagagattgagtatggaagcctgggtaataccaatattaagaggcagctgggcagaaaggaagtaagaaaggagaccaagaagtggtggtcaaaaagttgggatgaaaataataggagtatcttgtaatgctggagtgactctgtgttaagtactgtggtagatacttgaataaaaaatgaataggacatggtccctgctttctgcccctgtttttgtttaattgttcagtttatggaactgcctagtcagtcattcctgaagacttggaagtcatcctttatttctccctcatacccttgcctctttgggttaccaagctccattgattaaaaaaatttttttgaagtgtaacaaaaaggtgcagaagcatcaagctcaattatttttaaagttttacaaagtgaacaccctgtaatcactactacccagatcaagatactcattttctagccctcagaagcccagattatgtggggatatcttgcagacagtagttactcccacccaaggtaaacacgattctgacttacataactatagttttacctggttttgaactcatgtgtaaatggaataatgccctctggactttttttttttttttttgcttgacttcttttactcgatgttgtgtctgagattcattcatgttgttgcatgtagtttgttatttttaaaaatagctctgtagttgtggttatctatccctgcataacacactagttttgattattggttattgcgtaacacaccactccaaacttactagtgtaaaataacaaccattttattatgctcatggattctgtggattgggaatttggtggttatggcttatcactgccctacaatgcttggggtctagaatcatttagaggcttctccactttcctgtatggtaccttgactagaacgtctagaagactgggatcatctgatactgttgaccaaacctacatgtggggtcaggaggttttggcttttcacagcatgttggctgagtaccttgactagaacgtctagaagactgggatcatctgatactattgaccaaacctacatgtggggtcaggaggttttggcttttcacagcatgttggctgagtgtccagaggaagcttcctgagagtggcttatcttcagaagtcatataatctcacctccaccatactctattggttgacaaagacacagcctgcctggattgaaggggaggggacatagacctcatgtctttatgagaggtgtgtcaaagaatttgtggtcatttttaaaaactaccacaaattacatagcaaaattcatttattcattccattttaggtatttgaatagtttctattttgaggcaattatgaacaatgttgctataatcatatacttatgtatatgtatgtatcttttggcatacttttatattcattttggttgggtatatatgtaggagtagaattcctggtcaaaatgtatatgcatctagcttgcttgcttgcttgctttcttttttttttttttttttctgaaacgaagtctccctttgtcacccaggctggagtgcagtggtatgatcttggcttactgcaacctctgcctcccaggttcaagtgattctcctgcctcagtctcacaaatagctgggattataggcgcctgccaccacgcctggctcatttttgtatttttagtagagacagggtttctccatgttggccagactggactccaactcctgacctcaagtgatctgcctgcttcggcctccctaagcgctggggttacaggtgtaagccactgtacctggccatgtgtctagttttaatagacactgccaaattgtttttcatccttgttgtacctatttatacttttaccaacatatgaaagttccggttactctgcagctttgcttcccttgatattgtcagttaaatattacaaaaaattaatcactagtggctgtatagaagatcttagtgtggttttcgtgggcatttctctaatcactgataatttgagcacttcttcatatgcttgttggccatttggataccctctgttataaagttcctgttcaagtcttttgtccattttcaacagattggattgtcttttttcttattgaaatgtggagtttataaggtatctggatatgaatcctttgtcgaatatgtgaattataaaaatcttcctgtcttacagcttgtcatttcactctcataaagtttttgatgaactgaaattctgaattttaatcaattccaatgtatccatcttttcctttacgggtagtgtttttttgtgtttaagaagtttttgctactctagggcgatgaagctattttcttatgttatcttctagaagctttagtattttgcctttcagatttaggtcaaagtccccaggaatttgtttgtgtgttatgaggtagggatcaagccttcttttacttttttcatatggttatctatacaagtagtaacaggtggcattgggtctgttggacacaagcctgggagttaggattccagtattctccaccttagattacctttaatgagccttctgcacttgggcatattcttaaatccgtcttgactcagcttcatttgtgaaatgaaggatttgaatggaatgttttctgattttcattctgactgtggtttgttagatctctacctacttttgtagttgtattgaggcttgttagaatcttcttatatctggattgtgttatctaaaatattcataacatctcccagctttatgttgttcccagttcgaatgtgctatctagaacttagctgctgatgaaagatagttttattgatcacgttggcaagtccaagatcacctgttcttctgatttttttttttaatttttttttgagatggagtgtcactctgttgatagtgcagtggcgctatctcggctcactgcaacctccgcctcctgggttcaagcggttctcccacctcagcctcccaagtagctgggattacaggtgcacgccaccacgcccagctaattttttgaatttttagtggagatgggatctcaccatgttggccaggctggtcttgaactcctgacctcaagtgatccacccaccttggcctcccaaagtgcagggattacaggtgtgagccaccgcgcccagcctctgatcttactaatatactgtgtcccttgccaggagctcatcatgctttgtttagtaagtcatggtagaagacaccaattccattaacaaaaaaattagctatctcctgcagaagggagcaaattccatttttgaaagtcatctgcacatactattcatcttacttgtccctaccttcagtttcgtacttgaacttttaagaatcacatacacagcatagagtttcatgaatcagcagaagtcattcaagatcagtgagttgtagtcttggcaaattctctcttccatcttggaaagtggcatacgttccaaattactgtataatatgtttgtgtctctaagaagagtgagtcaggaactaccctggatgacagaacagaaaatctaccatttgctggtttctttgtgttcttagtggcctgctttgaggtgcttttaacccttctttgaaaatatttagtttagtttccacagaacgctataatccagtgtagctatttttctttgttatccttgctatcacattttccctctcattaacctttttttttttaaagcaaacagctttagtgagatataacttacataccatacaattcattcattaaaaggtataattcagtagcttttagtgtatgcacaggactgtaaccatcaccataatctaattttagaatgctttcatcagtactaaaaccccctactcattaacagtcattctccattccctacttgatccctaagaaaccacgaatagttttgtctataaatttatcaattctggaaattttacgtaattggaatcatataatatgtagtgttttgtgaccagtttcttaacgtgtgttcagggttcatccctgttgtacatgtgttaatactttatttctttttattgctgaataatattccattgtataggtgtaccaaatttgatttatccattcatcagttgaaggactttggggttgcttttgctttttgactattatgattagtgctgctatggacatttatgtacaagttgttgtgtgggtatgtgttttcatttctcttgagtatacctaggtaattctttaagttctttagggactaccaaactttcccaaagtggctgtattgttttatattcttactaacaatctgtaaggattcagatctctctagatcctaccaaaacttgttactgtctttttgtttatatatgtcctagtgggtaggaagtggcatctcgttgtggtcttgactttcatttccctaacaactaatgatactgagcatctttttgtttgcttgttggccatttgtttatctgttttggagaaatgtctgtccaaatcctttacccatttttaaactggcttagttgtctttttgagttcattaaccttttaatgttcactctgatttacttttaactcaaaatgttttttctttttcttccattttgttcagagactgttcgttctgtattaagcaggatggttaagagggttttcaagcccttttatgttttcttggcaacaggttccattagcaacatacatacatgtggattactttagattggaaaatgtacatctactggttattggaatagatcatttgtggttcatactggttatattaataaaatgaactctgctccttttcctacaaaccagtaggtaaaatgcttggctttgactttaatcctagcctttcattttacaggtaaggaaaaaagacctggagaagttgggtcttgtcttaagttcacaacaggtagacctggaccatgactttaattcagcccattcttaagaactatcagttggtttcacatcatgtggcagatatgttagattgaagggataccaaggtaagacagggtccctgatttggcgatcctcacaaactgtgtcacaagagattgacatatacataactaatggtaatacagtatcacaattgctgtgaattgtgaacaagggtgtgtagtcagtccagtgctcttaacactgctcggtgctgactgggattttcaccttactttcttttgcatataggcagaattagattcttgagtagttgattttgtttgggtcatttagtaagaaatgataacacaaatgccatcattcaaaccctgagattacagaagaaacagactttagaatcttcagggttttggactagaatctagaagatagtctcattaagtgcatattttatatgtattattttcttagcttttttcatatattcttcagtggcgtatacatcaagtttttttcagctgaatttgtgttagtatattaaaaaaacaaaacttttcggaagacgttttatttacatcagtgatttatttcattactacgtttgtcctttggatttttggaagtcatatttcttttcacttgacagagttaggccatgggatatgtatttatagtaatgtgtgagtatgtttaggtttgatcttttatactatttttatggcatttatatttatggctgtgttattagtcattaaagcaaatatttttccaccttaagacttcttgttttgcacatgatttattctgcagtatgtgctctcttttaattagcaaaaaggcatttttacaaaaattacactttccttgcaacttactggttgtaaggccgtggacaaattatttaatttcacttatccttggtttccttatataatgatacagtcagtatcattatacctttgttttatggttatcctaagaattagagataatgtgtttaagttacccagcatatagcttgccatatagatgcttgaatattgatggtattaattgtaatatattagttcatttatacataagagctataaattctagttaatggttaatcgattctttgtgatatagattactcatttaggattaattgagcaaaaataagtgatcatattaatgtaagaacttgatatcagtattcattttcagttacttgtcttttagagactgtagtactttaaagactagagactattgctctttaaagactgacctcatctttatcttcaaaacatgaaggtatgatcctgtctgcagattaaggtattgagagttatttttctatgttgtcaattgcagtgttttaacttgtggcagttgacagggctgactgtgttgatcctgatgctttagaagcactggtaaattctagactaatattggaaagaattacttgacattttatttactaaagttctttttgttattcatgaagaattcttaaaaaatacctcaattgaaaaattaatacatgcacacaataataaatttagacaatataaaagagcaaagaatgaaaattaagcttcccacccttaaggcattctctgctactaattgattatatagcctcctagtaatgtgctatatgtacacgcgtggggatacattgttgcacagctcccaggggtgcagtcatacatattcaagcatatgcagcatatgtataatggtccttttatatgaataggaatgttctcatacaaggttctttccttgtatttttcacttaatgatatatcttggcgaatattccatgccaatgtatgtagagctaccttatttttaaaactgcctaatattccattctgtggatatgccatgcttcatttaatattatgttggtgcaaaagtaattgcggtccaacctaaaagtcccctcttgatggtaattaaggatctttctagtcttttattgtatataatgctgcagtaactatccatgtatatttgacagtacgtgagtatccctgcatgataaattactggaagtacactttgtgagcaaaagggagtatgcatttaaaattttgataatgccaaattgttatgcctttttcctcatactcttaccaacccagtgcattttcttattttttgaatatgactaatgtgataactaaaaaatgtcattttaattgtaaattaagtctcattgtaattttaatttgcattttattaatgaagctgagtctatttgttattgatttccaggatatattgttagtgaaagaaatcatggtgaagaacaaggtgtataatattctatctctcatctaggaaatgagggatgcagataaatgtattttatttgttatttaaaaagagaaaacaggaaggataaccccaaaactagtgaaagccattatttgaggggaaaaataataaagacggaggggtagaatctaggattctctgaagataccttatattgtttgggctttggaaatgtaaatgttttatacatttttaaaacttaaagaggaaaatatatcagttaaatatttaggttgacattgttaggaaccaaggtttttaacaaatgagaaaaaaagccgggtgcggtggttcgtgcctgtaatcccaacactttggaaggctgaggtgggaggatcacttgagctcaggagtttgagaccaacctgggcaacatagccagacctcactctactaaaaaaaaaaagaaacagaacaaaacaaattcgtgggcatggtggcactggtctgtagtcccagctgcttggaaggttgaggtgggaggattgcttagggccgaggctgcagtgagccatgattctgctattgcactcagcctgggtgacagggagaccctgtctggaaaaaaaaaaaaatcttcttgctctgtccactcaaaaaacctagaaataatattttagtgcccagattttggtctccgagtaccactttcaactaaaaggaaatagggccccttgtagaagtggctgattgtaggcttgagacaggaaaatgtacagaaggaacctggaacattttgtactaggaaagcaaggaaaagctccaagactagtagggttgtatcaggaaacagtggccacattgaaggggcccccgttgtccagtgggaaagaaaaaagaaatgagcagcccctgatgttcagaagcctcaccggtaggccatgttctcctactaaacataagcggtctcacagaataccttcaacaaagtttctcagagatcataataaaatgaggcaaagcatagacaaaaaccaagaccactgtgccacctacaaaatacttagccaaaatgaatgactaccgctgctttacccattacagttttatcttcattctcatctcccctcccttaggtaagatttattgagatacgtaaccacagaattaccctacttcctgacagcatccaatgtagagaaactcctccttctttagaccctcccccaaattactaaactgaggcccaaattgtgtaattgattttaacatcctcttactgagatgccccatggtgccctgtggtgtgtgttctccctcactgcaatgagtaataagcctgtctcgtttaattattggtggtcttggctgaagggcattgataacaggtagagtaatttgagcaacaatatcagtaacaaaaaatacaaggaacagattaagtgacagtatagggtcacaatcagcaaaattcaaaatgggaaattttacaggacaaatgacaagaagaaggacaaaaaagagaacagtggcactcaaagagactcaaagacacatcagccacgtgcattgactagtatttgggtcctgagtcaaagtcaactgtgagaagacattctttgagaaaactggataaatttgaacccttcttattagatgacattaaggaattactgttaattttgttaggtgtggcaataatatatggtggatttatttttaaaaagtacctgttaaaagtatttacatatgaaatgatgtgttgtctgaggtttgctttaaaataatcttggaaggggttagtagaaacaaacaaattggccatgtgttgttgatagttgttgaaattagctgatgtttaggtggacactcattatatcacttctctacttcatatgtatttgaaaattcttctaaggagaagtttttttctttaaagccatatttatttctttttctgtgagtgtgcctcttcatattcttccatttttctgttgggctttagtcttataatttaaagggttctttaaatactaagaaaatttgcctttagtcatatgttttgcaggtatttttaatttgttttttgaatttgtttatggcttttttttaatctgtggagaatttctatttttattttgttaaatttatcagttttctttatggcttgcgtgttttgtgtgtttagaaaaatcttcttgtctctgagattctgaaaagttctttcatgttttcatgaatttttttaatgaccacagtacacttctgttatactttatttagtcaccttaatttcctcttagagtatttggaaatattctcccatagagccctgccccaagactatatagggaaaaatgttgttcagtagctgttctatcagatctattgatagattattatatagtgaacatccagagaattaattgtaaaagtttgctcactaattttgctccctaaatagaatgaatgagaaatctatttaccagattttgaaaatatgctaagtgttatgtaaaagtattagctatatagttcacagtttctaattttagaaaagtttcagtgtttgctttatataaagaagcattcctttgagctcttctcatgggccataaggtcaaggagccaggtgtcaccgctttttgaagttgacatcttttggcttgctcctttcctaggtctgactctcttggataggcacaacagtgattctgttttctggtctctgtaggaatggatgttactgtagtgtcttcatcactttcgtttctgggagacctgttgagacccaggaatggatccttctacctactatctcaaaagtcagaaacggaaatacagttaaggcttcagggaatgcttcccttgtaggggaaagtgatagcagtgaggtgtcttgggcttgtgtttgcaaatgtaccacactgtgcattctcagttgaaaactaactctgcagttagtgtttctcttttagaacttttagaagttttttaaggaataaaagttgagaaagtacatttgatactatattttaagcattttactcactataccaaaacattttataacctaacgttgatcacttttctaatacaagtaaaaaaatttctgactaggaagaaattttttcttttctgaagatagccactttctttttcagagttagaaacgtgagtcttcacctagttctttccagcttaggtgtgaaaacatgactagtgtgacaattgctgctaaagattgtatcacagtttgagtttagcttaatgtttttcagggataaatctatgaatttatgggatcattatctctggaggttcacttctatatctcatggtttgttgtgttatattttgatacttatttttttaatgttataaaggtaccatatagccatgaatttttttatactttcattgatatgcataattctcctctgagtgaaacctggggacagattgggtgttcctaacaggaacctgggggcagtttccttaggttttttatgtttagtgattttggtcataagtgaattttaatatctaatgaatatccttacagttctgtctcaatcataggatttttgggatcaaaatgaagaaaatatatgaggaccctctgtgtcactgggaagtggctttataaactcaagattctgtattttatttttcaaatgatttcttagcactaatcaaatgcattaatcaacttctgattagctggcacatttataagaggattgtctttagatgtattgctttcaaattgttcctgatgtaatttagcaaaggaggtgatggagttctttgttgactgactatctttcgtttgattttattctgacttactgtagtttggcaggaggccagttataccaaaatatgtaattacttcttaatcccaaataagtttgaaatataaatgagtcattttgtcttagggatatgatgggttgggaaaaaagtggtgtttttggctcctcctaaatcactcatgaatttattttttacccaacttctaaaatgaactggaaaggtcttttattaaaatcctcagatacggtagacttgtatgtaatagagcaattaaagtgaaaatgaatgacttaatgaagaaagtaagatgtaccagaatatctaggtcagtgggtcagtctgtgcatcacagtaccctgtgtagcatgaaaatataaagatgctggggctgttgtggagtaaggcctttactgttccaaagttccactgataattaggttggtgcacaaataattgcggttttggactgtgaattttaaatcattataactaggctcaaacacatctttatcaaaataggagccattgcagtcaacacatttttgccaatgagaagtaagttagtttattcctgtagtgtaaaaatccgtgttttgggattcgatgaactcttggaaagcattttctgcatcctgctggttgtgcaagcgttttccctgcaaaaatttgttgatatgcttgaaaaagtggtagtcggctggtgagaggtcaggtgaatatggcggatgagacaaaactttgtagcccaattcattcaacttttggagtgtttgttgtgcgacgtgcagtcgggcgttaccctggagaagaattgggccctttctgttgacgaatgctggctccaggtgttgcagtttttggtgcatctcatcgatttgctgagtgtacttctcagatgtaatggtttcgccaggattcacaaagctgtactaggttagactggcagcagaccatcaaacagtgaccatgacctttttttggtgcaagtttggctttggaaagtgctttggagcttcttctcagtccaaccactaagcttgttgttgccgattgttgtataaaattcactttcatcactatccgatcgagaaatggttcattgttgtagtgtagaataagacaagatgacacttgaaaatgatgattttttttttttaatttttgctcagcttatgaggcatccacttatagagctttttcaccttcccaatttgcttcaaatgctgaatgactgtagaatggtcaacgttgagttcttcggcaacttctctgtagttgtaagaggatcagcatcgatgattgctctcaattgatcgttgtcaacttccaatggccagcctctaccctcctcatcttcacgcctctcatttcctttgaaaaacttcttgaaccacaccacactgtatgttcgttagcagttcctgggccaaatgcgttgttgatgttgtgagttgtctctgctgctttacaacccattttgaactcgaataagaaaattgctcaaatttgctttttgtctaacatcatttccatagtctaaaataaacaaaataaacagcaaacaataagtcattagccaaaaaacataaagtgagaaatgtccattaaaatgatgtataacataaccacatttatttaagaatgtattataatatcaaacagcaaattccaacaatgcaaaaaccacaattatttttgcactaacctaataattttaatgtatagttaagatagatgttactgccttagatgatggatcgttaggcatttggctttataattttgttctgaatttcctagcattcactgcaaaagaggtaacaggagtttcatagctcttgatatcttaaacacttgcatcattggaagagacacttttttccctaccatgaaccctagagagtttgattttgtagatgtccacaactgttcactatctttaataaatacttttattaaaggcttcagaaacattctttccctgggaagttttttattgatccttgtttgaagttgatacataatattatatcataactgtgtgatgctgtttctgcatatagctgaatgcagctttttgagactaaaggttgcatttccttcatctttgaatttccagcccctagcacagttcctggcacatattttggaggtattttataaatgcctttggaaaaaaggagttcaagtgtttaatttcctggcaaactaaatagctataaagagagagcttagaaagtctagagtaagagatgattagcatgcttcctagaccatctgtcactaataccaattgtttctacttggcactgcagacttgttttttgagggggagggcagcttgtgtaaagttaaaaaaaacaaaacaaaacaaaataccagaactcttaggttattctatacccctctgtttagtggctaaaaagtcattgctgttttctaaaaaacattgacattcttattcagtaaagataaatgcaattattgctttttccaatagcaatacagttgtaataactggtagctgtttctgccttgcccccttacagtctattcttgatgcgtcaaccagagtgatccattcaaagtgcaagtcagaacatgtacactcctctgctcaagaccttccaagatttccccattcagagttaacgttgaagtccttacaatagcctgagtgttgggcatgttctccacctctgtgcttctttacatctgaccccagccattgctctcccctggctaattcttcctcagctgcaccagtccccttgctgtttctagaacaagctggacatgttcttgccttaacgcctttgtagtcgctcctccctcaatgtgggatgctattcctctagagcatctgtgtggctagattctctcactttttttttttttttaacaagtttttgcttaaatgtcactttcttgtgaggctttaccagaccatctttttaaatttcattccctcccgcccccaactccctgtccctgcctttttttttttttccttagcccttataccattggacatatgacatgttttaatttttagaaaattatttttctctactgaataaaatataagctccatgaaggcaggagtttttgtctgctttgttcactttttattcttgtcttgtagaacagttcctgcacagagtgtgctgtcaataaatacttgttgagtaaacaaattaattaagcaggcagtatgtattgtaataatgtagaattccaatgggactcagtattgtttttattttaaattttaagaggggtgtagcatggtaaagtttttgtatttcttgtcaaaaagttgcagaccattcactctaatagcactactaaattactgatatttacattaaagggaaaatagggtctagtcctattctctactttttaggcacagaatttgattcattgcaaaaccattcctatcgtgaggtgacttgtgacagaggcactacagaagcacttaacattttggatttgtatcaagcttatatagtttatagatggaatgtatttttagaatggactaacacattagcaaaaaatataacaaatgtaaaatctttggtgagaattaagtcagcaggagaatttttcttgacttaggtgttcagtgcatgattttcaatttgattgaagtgttgtgaactacaatgcaagtatacagcaagttccaaaccttgtagaaatccatttaccctgtggtgaaattcagagtcctgacagtagccttcaaggccctacttgatctcttgctcctgtgctaacctttgggacttgatctcctgcttcccccttgctcacgccacaccagccacactggcattcttactctttggttgccaggtgtgctcccaccttagggtctttgcacaactcgtccctctgcctatactctctgcccagatactcacatggtcctcttcctcaactccttcaagtccttgttccaatgagcaaagtcctttcagaggaggctgaccatgaccactctgtttcactgcaagctttccccttctaccttctactccctatcctctatctccctttacctgctttatgtttttaaaacatgactggattttctgaaatattaggtaacatatgcattatttgttctttttatctgtctcttcctgccagaatgtgtcaaaagagaaggacctttgttttgttccttgaggtatagcaagtgcctagaacagtgcttggcacattgtagattatcagtgactatttgtagagtgagtgaatgaacagactatgtcattacccttcatgaatttacataatccacagttaacatttatttattgctgtgataactagtagatttatgtaattagcatctataagaataacctctgaaaaaaataccaattgtaatgcttttccagttgtgtgtgtatgggggcaggaatgattctgtagtcatcaggaacacgttggtattatcttgattcaacttaatttctgccttttttatctgctgcatctagaaactgttttcttttttaaaaaattgtgataagaaacatagaagatttcccatcttaaccatttttaagtgtacacagtagcgttaagtgtattcatattgttgtgaagcagatctctagaacttaatttgcaaattcgaaactctatataccactaaacaacaactctcttttctccctccctccagcctctggcttatttcacttagcataactgtcctcaagattcatctgtggtgtagtgtgtgtcagaatttacttctatttttcaaggctgaataatattccattgtatatacatgccacatttattcattcatctgttaatggacactcaggttgcttccaccttttactattattgtggatagtgctgctgtgcacatgggtgtacagatacctctttgagactacaaactttttcctagagatctgttaacttaaaggaataaacatcaattattttttcaaataaatgtcctgaatttccaaagatcttaattttattgagtagcacatttttaaatatataatttattttcacataataaaatttgtattttggtgtaagctgtggaaatgtaggtggtctgcttttttaacatgataaaaccctggaaaactgtatatgataaagtggaacaagctccctgaatgaaagctcatttcatcttgaaaaaagaatttactgtattcctcaaattgcctaggactgtgagtagcctaaatggtagactggaatccaggatactactgtattttgaaagcaaaaggaagagaatgtttcaagaaagaaagaatgagcagtgttgagtgcttctgggcaggcaaatgagatgattcagtgtcagctagatttcatagcatggaagtcactggtgacctcagcaagggttattagagaggaatcatgaaggcggatctcggagtgagttggataagtaggtgaaaggaaatattggcaagtacagacgattattgaaatggcaagtacagacatttggcattgaaagggaaaagaaaggatgatagcagagatagcagagggggattaaaaacattaattttttttttttttttttccctctgtcgcccagcctggagtgcagtggcgccgtctcggctcactgcaagctctgcctcctgggttcacaccattctcctgcctcagtctcccgagtagctgggactacaggcatccaccaccacgcctggcttattttttgtatttttagtagagacgggatttcaccatgttagccaggatggtctcgatctcctgacctcgtgatccacccgcctcggcctcccaaagtgctgagattacaggtgtgagccaccgcacccggccaaaaacattaattttttaaaatggcagagccataagcatttttaatagctgatgggaaggatctagttgagggagacattgaatatattagagaaggattaattaatagtgtaagtcttgagaaggttggaggggatgggatccaaagcaaaggtgaaggacttgatgtttgataggaggaggatagtttctttcaatgtgataggagagaaggaagctaggattggcttgaagtgggtgcaggtggtttgtaggtgtggctcttagaaagatagggaattcccatctgaagtttctgttttctctctaaactagagtaggtcatctgttgataattatggcttaggaaggggaattagagttttgaggaagaataaatagagtttgacatagtcattgtagagggtggttgctggacttttgaggaatgacattgtcctttgcagttgggtgatgtatattaaacataaagttagatatctggtagttggggaaaaatactaaacttttttgctgtttaattttatggatttagtgaattcctgctaactacaatgtattgtgactaagacatttctcatatacgaggagcttataagcttatagggaaagttatttgtcacatgcaataagaggtacaaacagtactgaaacttcaggtcatatctgacttcagaagagataggtctttaggtatggggaaaatgtcaatcaatgtataaggagaggttaaatgagagaaaaggctttgtgctgggaagaatggagataaaaatatgttggttccatgttaatagaatggtggagtccagtttgtccagaattatccttgaatcagagtgtctctatacagtgtaaaacatatcagagaagtttatgactttaaagaaaatttcataaaaatacatgaccccctaaaggagtttacatgcagaactattttggggaaaatttatgagtagtcattcagtatataacgagctttattcagcattgtaattttccagtttgtgtatgatgaattcatagagctcattaagtgtaagtgtcattgttgtgattcattcaagcctttttcctctcttcagcagaaggttaaaaaaaaattccaaatttgaatccaggacttgaagaatgccagttgtctaaatacagtaccatattgtgataaatatagctattgaaatttttaaaaatctattcacaaaactttattttaatattcatagcagaactttttttggaatgttatctgaaaaacagaggaccattttatcatcagagctgactattaattagggtattgttgcagatataaaagttgatctgccactgaaattctatttgaatatgtatagttccaagcttgctttgtgtatttaataactttagtaccataattactctgtttacaattaaattttggtgaatatgctaatatggaatataccaatgagtgatttcagcaaagggcagtattgatttgcatcttgatgtgcttttcagttgcatctgcatttcatttaatatcagaggaaaagaagtggtcagattatgtaatgctaaacttttttttctttgaaacctctctgttgcattggctactataaaagtagacttgcatagagtcagaggggctgaaattatgtggaaagatttaattttgttaaagtttgtgcctttcggtatattcattaatagaaaccttaatgcaagcatcggtttcattattagaagaaacctataatgtactaaagtgattgtttaattctaattagtattttaagttcttcagaaaactcactaacttactgaagcaaatacttgtgattattttatttctttgagcagggacttctggttttaaataattcctcttttaagaaattgcctgaaaagcaacaaggagattgagaaacagtgatttcatattctgagaaactgagaagcttctgtagccctgaactagaaaataaggagctgccaaattcagtgaaggtcaaacagggtatgggaggatgctgaaagggaacctgagacacagatgtcaggaaagctggcagaactgtgttctctaaagaaaggggcacaccctgagaggcacattaataagcctttgtctgggagaacaggaataggtgttggcaggcaggggcactagggaactttatggtgtgatgaaaatgttctgtctggtggtcgcacaagtgtatgtacgtttgtaaaattttgtcagtttactttgtgcaagttagtaatttattgcctctcaactccaaattcacccctttttgctctatttatatactcgagccagaccttttaaatattttttcttttcctggacagtgttagattttgtcagtagaaggtgaggaagggatactgcaagacttagcagagaaagtgcttctcttgttgccatgtgcttgtttttttgttcgtttgtttgtttttcttaatctcttaaggtgtggctgtcagctctacttactctcctgtaagcttcattagcaccctggtaggcagcttcttgctcccaccagtatctcgtgggcagcagattcctgtggataagctgtagctcactggccctacagagaactaccctaccgctcagtgggtcactgccacagtctgtccagtgaagtgttcctttcttgggcactctcccttagccttggagacagtaactgctccctatatttgctagttccatattccttcaaattgtcttttacatctattagcacttgacaactttttacaaattaataattttttatttatgttacattttcttgttttaattgattgtttgttttctagctcctgaatggacactgactgttatcacacacttgtgatttgtgtaccttacttactgtgttaattttacataaataaacaggatgaaataataagtatacttcttgattactttctataacatgaaccaattgtttaaacaccaagattgggatatagaatgctaccagatccctaggaaccatccacctccagccatttcttctgacccttagtccccaaagtgatatctgctgtttgacttgtatcaccattgatttgttttattattgaaattcatgtaaatggaatatagtatgtactcttctgtctggtgctgctttttcttaacacagtgtttggtatgtccatccgtcttactatattcattttcctgttgttggacatacaggtttccagtttgtggctgttgtgaataaagctgttatcattcttgtacatgtctttgggtggacatgtacatgcatagaagttgaattgctgggtcggttagcaggtactgccaaatgaattttcaaaatgatcgaaacagtatacagtgtaggagagttctgtttgttccaactccttaccaacactttgtagtgtcagacttttgcagttgaagtcttcaaaaccttaaggaatagatcaaatgctgcttaaactccttagattgtggtaaaggaagaaaagcttccaaaatcttattatgaagtgagcataatattgatacttaaacagataaatgtagcagaaaaaataaactacagaccattcttatgaatatcagtcttgtctatggctataccaccctgagtgtgcccgatctcgtctaaatatcagtcttgttcctaaataaaatattagcaaatagaattcagcagcacactaaaaaaattataactgccaccaagtataatttttttttttctaggaaggttgtgttaaatagctctatatgagtatgtggtataccagctgtatttaagtcttttgtgtttctcaagatgctaaaagataagtattgaacaagtatttattagtacactgccattggccctgcttatacctggctgaagcaggccctaaggattgacagggcctttggttgcctgaggccacctgagattataggggccagcaagagcaagagggaatcctccacatctttttccattagaagccacaggagggagtttcatttagatacattttaaagaaatatttctgtcatagtggcctcttgcagagcagctgagtatatttcagtgacttcttaacgtttatgcgcaagacacagagctactctgtttaatatacaacatataagatgtgcctggaaataaaaagcaagactaataattcaaaagaaaaatgagccgaggttactcatagtttacaggaaataaagtacagattttgcttaggagtgttttcttttaatttttttttttttttttgagagggaagtgggaatggactgggcatgctcattgagtatgagaggatttccagttttgatcccttggtgaatattaattataggagcaataatcattttgttaaggaacctggtttcttttcatgggaagtggtattttaagactacaatttgtttgctagggatgctctttgctgctgggttgattattgtttctaagctttttagtgaatggggctaggaaatacaaagatgtgtttctgtgtatgtgtttattttaaagatacattctgaactaaaaatatttccaagtacagcatttttacctttacctattctatcttttatctctgtctctttcttccatatctgaatcctgatgttcagggacacaagagaatgatagaataataatatcacataattactcatttgcatcattccacatgtatgcacacaacagtcttagttaacaaaatcaagtatcacaatatgatttctggaaagttgccttttttgcgtatgttatcccattttttgatagttgtactatatctacagtgtcagtacatttgcccattatatactcttttctctcttttataacccttgttgagtctcagttctacaagtatatatttactgctcactgatattgacatttctttagtcattttggatattgctatgggagtggcagaccccttctactgggcttcttctctagtagattcttattgctgttttctatattgataacacttagcagtctttatactcgaaatttagctgggtataaaatctttggttcatgtttcctttcttagagtcttaaatatgttactttttttcccctggcataaaatgttgctgttaaagtgatgaca

SEQ ID NO: 154 - DNA, 32742 bp, Homo sapiens
  source 1..32742: mol_type = other DNA
gactgcgcaggcgtgctcacctggcgtgctccacccgactgggcgtccgcaggctcctcccccgggtgtggcctccgggcggcatggctgcttcccaggtgatgccggcttcagctagtggggtctagttgaccgttccgcagccgccagggccagcggaaagccggtcagggggaaccgcggcggggctggtgtcatgagcctgaggtgaacttgagggtgcctcctcagcggtctcccgccctgccctgaggggcgccgggaccccaaagagcggaggaagagcgccaccccgacggccaccgcttcggagccagcacgcggggtaccctacggggagcgcggatgcccccgtgttcgggcggggacggctccacccctcctgggccctcccttcgggacagggactgtcccgcccagagtgctgaatacccgcgcgaccgtctggatccccgcccaggaagcccctctgaagcctcctcgccgccgtttctgagaaggtaccaagggactcaagatttacgcttcactatgttttatttcaggcggggtagggggagagaagaatgtggtacagcataggtgttctcaagccagatatcctaattcctgcgtgtgatgagcactggcggcctccgcttcttagcggaggtttgtcctctccagctgttcagaaacacggggcggggaagcgctttgggaaccggggactgaatctttttaggattcactgatcttgctcagtaggttacgaagagctcttaataaaatttaaggtaattgtttttttttccagaagcctcaggtggagtctgtgagattatttactagtagatccatagggatagttgtatgcatgtaatgtacagggtctagatttataaggacgggcacacgtgtcaaagtaagattcaacaatcactattttatacctgggtttcttggcatgttacaccagaataagaaagcttctaaagtgacagaaacattctaatagaattccagggaggggggaagccaacatttgtaacaccaagaatgatctattcctggaagttcagattatatctggaggggcacaaaagaagtgaatggagagaatttctaaagtaggaggagtgtaaatcataaacatcttccgtattaaaaagcaagtagataccaatagaaactgtgccaatgatgtagtaatacatttgataataacatctttagcctttgtagtgttggaaaaaaaaaagaaaaaaaagcactgaagtacttcttaattaatagagcctgaaaaatacttaaaattttttcttagaattgttttgatgttatccgactttccctaatcttaaaacaccagggtatgttctgtcgttaccatggctatatcccaaactccataactgtgttattttacattgaaaacacgtattttacaataatcaacttgaaggatagtggcatcttgaatcatctaaaaataatttatctgtgtttcctaattatcaagaggaaaaaaagtataatttttggggggggaaaaaaacccagcgagcaaaagttaaaacaaaattttgtattattcttcaattaaccataacattgtatttcccataatacctatataattcaagcattctatcaagattttaccctatataaattcaacattttattataatcacagtaataaactgttcactttgtctcatgcatagcctttggtttagttttgttttttttttcttagatggagtctcgctgtcgccatgctggagtgcagtggtgcaatcttggctcactgcaacctctgcctcccaggttcaagcgattctcctgcttcagcctcccgagtagctgggactacagatgtgcaccaccacgcccagctaatttttgtatttttagtagagatggggtttcaccatgttggccaggatggtcttgatctcttgacctgctgatccacccaccttggcctcccaaagtgctggtattacaggcatgagccacagtgcccagtcccatgcatagcctttgaatagtctctatttttattctttttatctcataacttttcctccatattcaaagattcaataagcaacacccaaatctaaataactaggcctgaatggctgggcgtgttggctcacacctgtaatcccatcactttgggaggccgaggcgggcagatcacgaggtcaggagtttgagaccgcctggccaacatggtgaaatcccatctctactaaaagtacaaaaattagccaggcgtggtgacacatgcctgtaatcccagctgctcgggaggctgaggcaagagaattgcttgaacccgggaggtggaggttgcaatgagccgagatggcaccactgcactccagcctgggcaacagagcgagactccatctcaggaaataaataaataaatagataaataaataaatgggcctgacctaattttatttctgattttcaatttcaaaccgggaatttaaaaaaaaattttttttttgagatggagtctcactctgttgcccaggctggagtgcagtggcacagtctcagctctccgcaggctggagtgcagtggcacagtctcagctctccgcctcccaagttcaagcaattctcctgccccagtctcccgaatagctgggattacaggcgcatgccaccacacccagctaatttttgtatttttagtagagacggggtttcaccacgttggccaggctggtctcgaactcctgacctcaggtgatccacccacctcagcttcccagagtgctaggattacaggcgtgagccaccgcgcccggcctcaaaccaggtatttcttttttttttgtttccttttttttttttaagagaagtctcgctcttgtcccccaggcttgagtgcaatggctcaatctcgactcactgcaacctctgcctcccggattcaaacgattctcctgcctctgcctcccaaatagctgggattaaggcacctgccaccacacctggctaatttttgtattttttagtagagacagattttaaccatgttggccaggctggtcttgaactcctgacctcaggtgatccaccagcctcggcctccggaagtgctgggattataggcgtgagccaccgcgcccggcccaaaccgggtatttctttttttttttttttttttttttgagacgagtctcactctgtcgcccaggctggagtgcagtggcatgatctcggctcaccgtaacctctgcctcccgggttcaagcgagtcttctgcctcagcctcccgagtagctgggactacaggcatgtgccaccaggcctggccaatttttttgtatttttagcagagacggggtttcgccatgttggtcaggctggtctcgaactcctgacctcgtgatccgcccaccttgccctcccaaaatgctgggattacaagcgtgagccaccgcgcccggcccaaaccgggtatttctaaataaattcatcagtttctaaaccttatgaattattttttcatttcaaacttgaatcattatgatggttttgtgcattaattccttctaaacaactaccaaaataattttctaaaaacagtgctttagacattacatattcttttgtccaaaaactttcaattatttgaaatacccacacaatttaagtcatactgagaggttacaacgtgctggcagtcctcagagccctggcttgctctcggcgcctcccctgcctgggctcccactttggtggcatttgaggagcccttcagccccccactgcactgtgggagcccctttctgggctggccaaggctggagcccactccctcagcttgcagggaggtgtgcagggagaggcgagagcgggaaccggggctgcgtgcggctcttgcgggccagctggagttccgggtgggcgtgggcttggcgggccccgcacttggagtagccagccagccctgctggccccgggcaatgagggacttagcacccgggccagtggctgcggaggtgtactgggtcccccagcagtgccggcccaccggcgctgtgctcgatttctcgccgggccttagctgccttcccgcggggcagggctccgggacctgcagcccccatgcctgagcctcccacccactccattggttcctgtgcggccggagcctccccgacgagcaccacctcctgctccacggcgcccagtcccatcgaccacccaagggctgaggaatgcgagcgcacggcgcaggactggcaggcagctccacctgcagccccggtgcgggatccactaggtgaaggcagctgggctcacaccaatcagcaccctgtgtttagctcaaggtttgtgagtgcaccaatccacactctgtatctagctactctggtggggccttggagaacctttatgtctagctcagggattgtaaatacaccagtcggcactctgtatctagctcaaggtttgtaaacacaccaatcagcaccctgtgtttagctcaaggtttgtgagtgcaccaatccacactctgtatctagctgctctggtggggccttggagaacttttatgtctagctcagggattgtaaatacaccaatcggcactctgtatctagctcaaggtttgtaaacacaccaatcagcaccctgtgtttagctcaaggtttgtgaatgcaccagtcgacactctgtatctagctgctctggtggggccttggagaacctgtgtggaaactctgtatctaactaatctgatggggacgtggagaacctttgtatgtagctcagggattgtaaacgcaccaatcagcggcctgacaaaacaggccactcggctctaccaatcagcaggatgtgggtggggccagataagagaataaaagcaggctgcccgagctagcattggcaacccgctcgggttcacttccgcactgtagaagctttgttctttctccctttgcaataaatcttgctactgctcactctttgggtccacactgcttttatgagctgtaacactcaccgcgaagatttgcagcttcactcctgaagccagcaagaccacgagcccaccgggaggaacgaacaactccagacgtgctgccttaggagctgtaatactcaccgtgaaggtctgcagcttcactcctgagccagtgagaccacgaacccatcagaaggaagaaactctgaacacaaccgaacatcagaaggaacaaactccagacgcgccaccttaagagttgtaacactcactgcgagggtccgcggcttcattcttgaagtcagtgagaccaagaacccaccaattcctgacacgatacaccagcacttctcagcctgtttcttacctactgcataaattctccattccagtctaacgtttctactgtcatcctttttttttttttttttttttttgagacagagccttgctctgtcgcccaggtttgagtagtggctccatgtcggctctctgcaacctccacctcctaggccctggcaaacctcccaagtagctgggactgcaggcatgtgccaccgtgcccagctaatttttgtattttttatagagacggggtttttttttttttgagacaggtctcactctgttgcccaggctggagtgcagtggcgtaatctcggctcactgcaacctctgtctcccaggttgaagcaattctcctgcctcagcgtcccaagtagctgggactacaggcgcccgccaccatgcacggctaatttttgtatttttagtagagatgtggtttcaccatgttggccaggcaggtcccaaactcctgggctcaagcaatcaacccacctctgcctcccaaaattcaaggcatgaggcaccatgcccaacctgctgtcatccttagctatgtcccttgctagagatgaccttcccccaactgcccctctttctccttcatagtgtattctttaagaactagtttaggctgggcgccgtggctcatgcctgtaatcccagcactttgggaggctgaggcgggcggatcatctgaggtcaggagttcgagaccagcctgactgacatggagaaaccccgtctctactgaaaatacaaaattagccaggcgtggtgccatatgcctgtaatcccagctactaggggggctgaggcaggagaatcacttgaacctgggaggcggaggttgcagtgagccgagatcacgccattgcactccagcctgggcaacaagagtgaaactccatctcaaaaaaaaaaaaaaagaactagtttaaatcccattctcaccaagccctgggtaataaaaccatatttgaaaccaaagattctcaactcaggacccatagttggcttcagggaatgtttgaactccctataattgtgttcaaaattttgtgtacatattcattatatcattagagtcttatcagcatgtgttaattatcttctattgttttgttttgttttgtgatggagttttgctcttgttgcccaggctggagtgcaatggcatgatctcagctcactgcaacctccacctcctgggttcaagcgattctcctgcctcagcctcctgggtagctgggactacaggcgcctactaccatgcttggctaatttttgtgtttttagtagagatggggtttcaccatgttggccaggctggtcttgaactcctgacctcaggtgatctacctgccttggcctcccaaagtgctgggattacaggcgtgagccactgcgcccagcccgcccccaccgccggctcccttttttatttttttttttgagacagagtctggccctgtggcccaggctggagtgcagtggcacaatctcagctcactgcaacctccacctcccgggttcaaccaattctcctgcctcagcctcctgagtagctgggattacaggtgcgcaccaccacgccagctaaattcttttgtatttttagtagagacagggctttgccatttggccaggttggtctcgaactcctgacctcaagtgatctgcccacctcggcctcccagagtgctgagattacaggcatgagccaccacgcccagccccttgtattgatatttatgttttttacatatatgctaccttttagccagattgtatgcacacttaagcgtaggaataaccttgttaaaattctctgttgtctcaattttttttctttttcctttttttagagacagggtctcactatgttgcctggtctggaagtacagtggtacaggcccggctcattgcagcctcaaccttccaggctcaagccatcctcctgtcccagcctcctgagtagctgggactacaggaacgtaccaccatgcccagctaagttttatttttatttacttatttattttttttgagactgagtcttgctcttttgccaggctggaatgcagtggtacggtctccactcactgcaacctccaccacccgggttcaagctgttctcctacctcagcctcctgagtagctgggactacaggcatgtgccaccacgcccagctaatttttgtatttttagtagagatggggtttcaccatgttggccaggatggtctcaatctcttgacctcgtgatctgcccgtctcggcctcccaaagtgctgagattacaggcgtgagccgccatacccggccatttttaaattttttatgaagacagcctcactatgttgcccaggctggtcttgaactcctaggctcaagtgatcctcctgccttagcctcacgaagtgttgtgattacaggtatgagccaccacagccagcctgtattctcacatttttgagtgactacatatgctacattgttgtaacttttgggatgcatcagtaaacaggaattcctcactcatggattccatattcttacagggagaaaacaaaggataagcaataacagaaaggcaatgagcacaactaagtacatcatgtagtgatcagcactaggaagaagaagtaggtcagggtaagagagattgagaatatgtcaggtaatttgcagtttcaaatatgttggtcaaaataaggctctttgagacagtgacatttctgtaaagacttgaaagaagtaaggaggtgggccatgggaagaactgggaaaagagtggaccaagcacaggaaaaaactagagcagagaccccgaggcggaagtgtgcctagtgtgttcagggaacagtaagaagccattatggctggagcagagtgagcagggaaaccattgcagggtttaagaatttatttgtttgctggtttgagaatagatttaaggaagcaagagtagaacaggaaggtcactaaggaagctaactgtagtaatccaggccacaggtgccagaggtaggtagcaactgagatgaaaagaggctacagaatcctacatatactctgaaggtaaagccgataggatttcccagcagatgggatgtggcttgtgggagaaatgaaggagtcaggaatgactccaacgtaggcataagcaactggacgatggaaatgccattaacagagatgaggaaggctgaggaagagcatgttttgaaaggaagatcaggaattccgtttttcacatgttgggtatgagatatcaggcattcacagggaatgtccagaaggcagttgaataatcaagtctggaaagaggtctgagctgcccatctgtattctgcagttatcagcagataggtagtatttaaagcctggataggctgggcatggtggcttatgcctgtaatcccaataccttgggaggctgaggcaggaggatcacttgaacccagaagttcaagaccagcctgggcaatatggtgagaccttgtctctacaaaaaaaatttaaaaattagcgtggtggtgtattctagcaatcctaggaggctcaggcaggaggatcacttgagcccaggaggttgaggctacagtgagctgtgattgcaccactacactccagcctgggcaacagagggagaccctgtctcaaaaaaacaaaaattaactcagaatgaattaaagacctaaatgtaagaattaaaactataaaactggagctatgatcacaccactgcacaccagcctgagcaacagagcaagaccctgtcaaaaaaagagaatggacaaaggatctgaatagacatttctgcaaagttacacaaatggccagggagcacgtgaaaagattcacaacattattagccatcagggaaatgcaaattaaaaccacaaggagatgtcacttcatatacactaggatggctataatcaaaaagataaacaataacaagtgttggtgagaatgtggagaaatttaaacccccatgtactgcagataggaaggaaaagtaatatagccaatatggaaaatagtctggcagttccgtaaaagtttcaacagttaccataggacccagcaattccaatcgtatgtatatacccaagagaaatcaaaacatattcacacggccgggcgcagtggctcatgtctgtaatcccagcgttttgggaggccgaggcaggtggatcatgaggtcaggagttcgagaccagcctcaccaacgtggtgaaattgcgtctgtactaaaaatacaaaaattagccaggtgtggtggtgcgggcctgtaatcccagctactcaggaggctgaggcaggagaatcgcttgaacccaggaggcggaggttgcagtgagccgagatcacaccattgcacttcagcctgggcgacagagcgagactccatctcaaaacaaaacaaaacaaaaaaaaaatttcacacaaaaacttatacgtgaatgttcacagcggcattattcaaaatagccaaaaagtggaaacaaaccaaatgcccatcaactaatgaatggataaacaaaatgtggtatatccatacaatggaatattaatcagctatgatagaaaggaatgtagttgtcgggcgtggtggctcacgcctgtaatcccagcactttgggaggccaaggcaggcagatcacatggtcaggggttcgagaccagcctagccaacacggtgaaacctcgtctctactaaaaaaatacaaaaattagctgggaatggtggcgtgcacctgtaattctagctactcgagaggctgaggcaggagaattgcttgaacccgggaggcggaggctgcagtgagctgagatcaagccactgcactttaggctgggcgacacagcaagactccaactcaaaaaaaaaaaaaaaaggaatgtagtatagagacagaaagtagatttgtggtagcctagggatggggaaatgacagggaaggagtcgtgactgctaatgagcccagggtttcttttagaggtgataattgcacagttctgaatataccagaaaccactgaataatagtcgttgggtgaattatatgtgcagttaaaaaaaatcaaacctagccaggtgggcgtggtggcacatgcctgtagtaatcccctgtagtaatctcgggaggctgacaggagaattgcttgaaccctggaggcagaggttgcagtgagctgagattgccccactgcattccagcctgggcgacagagtgagactccgtctcaaaaaaaaaaaaaaaaaaaaatcaaaactagagccactctatctatagtgctcaatttatttttcaaacagctgctaaattatccaggcataactacttattaggttgtttgaactgtacctggtaaatggaactgttagatttttctattggtccagggagcgccataaagaaattctgaaacactaagggctctgagaaccaagaaaacttgggaatcaccgtaaggcataaacctttctcatttcttaccttccaacttatacctcccttcttatctctatctgaacccattcttattcttctaggttaaaagaagaagtacctcttctcttcttttctttcttttttcttaagatggagtgtcgctatatggctcacgctggaatgcagtggcatgatctcagctccctgtaacctccgcctcctgggttcaagcaattcactgtctcagcttcctgagtagctggtactacaggcatgcaccatcacacccggctaattttttttttttttttttttttccgagacggagttttgctcttactgcccaggctagagtgcaatggtgcgatcttggcttactgcaacctctgcctcctgggttcaagcaatctcctgcctcagcctcccgagtagctgggattacaggcgcccgccaccatgcccagctaattttttgtgttttcagtagagatggggtttcatcatgttggccaggctggtctcgaacccctgacctcaggtgatccacccacctcggcctcccaaagttctgggattacaggcgtgagccactgcgcccatcctaatttttgtattttgggtagagacggggtttcaccatgttggtcaggctggtcttgaattgctgacctcaagtgatccacccacctcggcctcccaaagtgctggcattacaagtgtgagccaccgtgcccagccacctcttcttttcaagatcaatttctccaccatgttcttgtaacaaattcctggtctcctctaggacaccctgctccagcagcaagttactgtttctcctgggcagactcccacactgcactgcctcctcccatgtagtatgagcctgctgagcaaagaagagagcagcacagaagaaccaatgttcatttctgcttgagagtttggcagtgtgttggtaattgttaatagaattgcttctttctccaattaaaaacaaaacatggctggtgtggtggctcacacctataatcccagcactttgggaggccgaggcaagaggatagctagagcccaagaggtcacaaccaacctggcaacatagcaaggccctgtctctataaaaataaggttagccaggcgtggcaacacacacttgtagtcccagctactcgggaggctgagttgggaggatcgcttgagcccagaaagttgaggctgcagtgagctgtgttcataacactgcattccagcctgggccacagaacaagaccttgactcaaaaaatgtatgtgtatatatataataaaacaaaacacctctgcctattgcttactgtctccagtcccagccttgaaagagtcacagctgtctcctaccccctcaaataaatataactccatgtgtgctattttaattatcttagactctagggataagactgaaatgtgggttccaaaccatagtaataaagggaaaatacaggaagaaaataagagaactgtcataaggctgggacattctgcctcagtcacagaactaattgaattattacagtatgttagaactgaattcaaattaggacatcactttttgtagatagaactcatgctagctttgtttttcattgttaagctcctccagtaagaagtaaaacaacagcttatccaagcagcttaatgagcattgtgggttttatctttgcaaagattagagcaaggacgttcaagcttaatagcctcaataacagttcctaacttttttctatctgagatcctgaaacaggaaagatgagattttttaaagagctagtatgctatatgtaaagaaaaaattaacttgttacttatatataattataagtacttattgggaggaggctatgaagaggtgatttaaaaaaaaaaaaaaagtacttctcactctctgaagagcctcatcagcattattggccttttgagaagcagccagtaaaacagtgatttttagccatagattgctgtaaagtagtagctggggcctgtggcaggaagtaagattcatttgttaatttaaaaattcattttaggagttactgattgggaaaacaaaaacacagtttatgatattaaaagaatctagtcggccgggcgcagtggctcacgcctgtagtcccaggactttgggaggcctaggcgggcagatcacgaggtcaggagatcgagaccattctggctaacaccgtgaaaccccatctctactaaaagtacaaaaacaaagttagccgggcgtggtggcgggcgcctgtagtctcagctactcttgaggctgaggcaagagaatggcgtgaacccgggaggcggagcttgcagtgagtcgtggttgcgccactgcactccagcctgggaacagagcgagactccgtctcaaaaaagaaaaaaaaaaagaatctagtcgaggatgcagtcagtatctacccatttagactccgagtttcttgagaggaggagccattctttttccgctttaagaatcccctaagatattgctaagcacatagtaaataatcaacacatactgaattggatttctagtttgttcctcttccatcttcttcatatttttgcgttttgtttttctcttttcctggtgtttccatgtccacgtgtccccttactgagctatggtaacttgtagttcctcatacctgtcacacctgtgctttcatgcttttgcataagtgagattccctttcctctctgttcatcagagggaatagaaggccgctcatcccagaagacttcactccaaaaatcactcctgcctggtatgctctctgcttattcatccctcacttttcaacttaaaggctgccttctcagagaggctttccctgaggccccaaatgtaagttatgtcaccttattttctcatggaattatttcccgtatagcacttagcacaatttctaataatatatacatcatacacacacatatttatatgttttcttaaataaaagccacctccctcagtagaccgtaagcttataatagggatcctgcctatttttgtttggcatgtcgtgtgtagattggggcctgacattcaataggtactcaatacacacttgccaaatgagtgactcacctttgagaaagattctcttttagcaccttatgttaatacttaactttattatgacatttattacattgctgtctcatctcactaggttgttcgctacacacgattgcagttcacagacttaaaaatatgctcatgcatgctttcttttcttataccttccccctgaggttaaactctgccttaggtcacattactcatgctttcagaaagctctgcttctagctttctgagcgggggagattcagccccttgtttattttatgtatttggctttcaggtaaatatctacttagcatgcccattgttcactcacttccttagtcccagctcattctgcttccctcttcctaaaaaataacaaaaacgaaacactcctgtccttggagaataatttttgcatatggtcacatttcagtttagtaggatagaatattgaatttgctggataggttttaacattgcaagaattatcaactgggtttttattgtggctctagatctgtttgttgggataagaaaagattatgaggttgggcacagtggctcatgcctgtaatcccagcactttgggaggctgaggcagtcggatcacttcagcccaggagttggagaccagcctaggcaacacaaggagcccccatctctacaaaaaataaataaaaattaactagatatggtgatacatggctatagtcccagctacttgggaggctgagatgggaggatcgcttgaacccaggagtttgaggcttcagtgagctgtgatcacaccactgaactccagcctaggcaacagagtgagacttcatctcaaaaaaataaataaagattatgaatgtgggcactgaatgatttttctttttaccatgtctttctcatctatagcaatgctttatagattgttggtgctcaataactatttagtggattgaatatatactcaaaaaagagcactggacttaaggtcaaaagacataacataaattctattcatgatcacattatttaatattgtgacagtatagtacataaaagttttaaatgaaattattatttatatatgattagatgttggaaatctaagaggatcaactgaagaactgtaagaaacaataagaagccaagcatggtggtatacacctgtaattccagctaatcaggaggctgaggcaggaggattgcttgaggccaggagttcaagtttacattgtgaatcatgatagtgccactgcactccagcctgggggatatagctagactcccatctctaaaaaagaaaaaaagaaacaatagacaatgtaatatagcagatttaaaaagtagcattcaggccaggcacagtggctcacacctataatcccagcactttgggaagccagggtgggcagatcacctgaggttaggagttcaagaccaacctggccaacatggtgaaacccccacctctactaaaaacacaaaaattagctgggcatggtggcgagcacctgtaatcccagctatgtgggaggctgaggcaggagaatcacttgaacccaggaggcagaggttgcagtgagcccagatcgtgccattgtgctccagcctgggagacaaagtggaactccatctcaaaaaaaaaaaaaaaaaaattagcattcaaacatcaataactgtctctactttctctgtcaaatagtaactaatttaagtataatggaagaaaatgtcacattcacaataacaaaataagataaataggctggacgtggtagtttccgcctgtaatcccagcattttgggaggcagaggccaggagttcatgaggagcctgggcaacagagggaggcgccatctcttcagaaaatttaaagattaaccaggtgtggtggcacacacctgtagtcccagctgctggggaggctgaggtgggatcattgcctgagcccaggaggttgaggctgtagtaagccatgtttacacccctgcactccagcctaggttggcagaatgagaccctgtctcaattaaaaaaaacacggttgctagtatacatctcacagggaagtggggggtgcctttaatttcattgactgcagtgtgaatggtgccccctgagatgaaccacacagtttctctgaatatatttagaacatgttcataaactatctggacatagtggcttatgcctgtaatcctagtactgtaggagaccaaggcgggaggatcccttgaggctaggagtttgagaccagcctggacaacatagtgagatgcaatctcttaaaaaaaaaagaaaaaaaaaaccacaaggttttagaaactacttgaagagcactcttaaattctgaagaaacaaaataattaaaacacctcattcttaggtaacaagactcaacattgtagaaatgacagggttttttgtttttgtttttgttttttgtctttctttttttagaccgagtctcgctctgttgcccagactggagtgcagtggttgtgatcttggctcactactgcctcccaggttaaagcaattctgcctaaccctctcaagtagctgggattacaggggcctaccaccacgctcggctaattttttgtatttttagtagaaatggggtttcaccatcttggtcaagctggtctcgaactcctgacctcaggtgatccacccaccttggcctcccaaaatactgggattacaggcatgagccactgtgcctggccaaaatgacagttctgtctggatcagtgtgtaagttgaattcaggccaaatcaaaatcaacagaattttatttacagtttgtcagaattattctaagtttcatttggaataagcatttaagaatcactatgaaaaagaagagtattggctgggcgcagtggctcatgcctataatcccagcacttagggaggctgaggcgggtggatcacctgaggtcaggagttcgagaccagcctggccaacgtggtgaaaccccgtctctactaaaaatacaaaaatcagctgggcatggtggcaggcacctgtaatcccagctactcgggaggctgaaacaggagaatcgctcgaacccaggaggcagaggttgcagtgagctgagatcgaacccttgcgctccagcctgggcaacagagtgagactctgtctcaaaaaatatatataaaaaataaaaaaaagaaaaagaagagtaatggcaggagtggagtggggggacttgcctcccaaatattaatatgtattataaaacctcttaagctgggcacagtggctcacgcctataatcccaacactttgggaggccgaggcaggtggatcacaagatcaggagatcaagaccatcctggctaacacagtgaaaccccgtctctactaaaaacacaacaaaattagccgggtgtggttgtgggcacctgtagtcccagctactcgggaggctgaggtaggagaatgttgtgaacctgggaggtggagcttgcactgagccaagatcacaccactgcactccagcctgggcgacagagcgagactccgtcaaaaaaaaaaaaaaaaaaagtctttaaacagatccttttcctaaaatggaataagtacagaattagaccccaataaaaatggacatatgatagagatggcaggattaatttaagaagaggtattggaacaaccaactaaccatttataattttaaaattggattcctacttccctcctcactccaaaataaactccagatagagcaaagattttaatataaaaaataaccataagagaaagaaatgacttgaataaatatatttataatcttgaagtgaggaaagcttttctaaacatagcccaaaattcagaagccataggatatttttattttatgtcttgcatggcacaagacaccatatgaaaagacaacaaccttggaaaaaatattcacaacacatatggcaagggattaacatccttaataataaaaacttatttcgagcaattagaaagaaaacccagtagaaaaaaataggcaaaggacataagcaagcaattcacaaaagttgcattcattaggatttttgttgatgacttctgagtttcctgtcatgcctagaaagaatttccccactccagggtgctcattgttttctaataactaaagaaatgcaaattgaaactattttttactatcacattggaaaatatcaattatcaatataaaattgataatagtgttagcacagatgttaatgttggcacaagtattaagaaacaggatgggttcacatacttggtgagaaaaaaaacaggcattttgattttccattagtgagaatgcaagttgctgttatttatttggagggcaatttgatcatttctgtcaaaatacttattgtagttatgtgatttgactcaactcaagttctaggaatttacccgcataaatgtacaaagattatgtgtataaggattttcaccaaagcattgttcttaatagtgaaaaattggcaataatctaagtacccatcaatagagaattcaataaataaattatggaaatgacatactttacagctgttaaacaatgaattcataaacttacatatactgacatgaaaacatatccaaaatatattaaatgaaaaatacaggcctggtgtggtggctcacacctgtatcctagcactttggaaggctgaggcaggagcatcaatcatttaagcccagggggttgaagctgcagtgagtcatgatcacaccattgcactccagcctgggccacagagcaagaccctgtctcaactttacgtgtgtgtgtgtgtgtgtgtatgtgtgtgtgtgtgtgtgtgtgtatgttgcagattagtatgtataatatttcattttctgaaaagcagaaattttttttttttgagactgagtctagctcttgttgcccaggctggagtgcagtggtgcaatctcagctcactgcaacttccacctcctgagttcaagcgatcctcctgcctctgcctcctgagtagctgggattataggcgcccaccgccacgctaatttttgtatttttagtagagatagggtttcaccatgttggccaggctggtcttgaactcctgacctgaggtaatcggcccgcctcagcctcccaaagtgctgggattacaggtgtgagccatcgcacccggcctaaaaaggtaaaatttgtatatacctataacaaaataggttttattaaactctgagtttgagaactgacttcattacttactaacactttcactttttagagagtaacctctctaaatctattttcttgtgttaaagttagagtaatacgtatttcttatgtgtgtcaaaagttcaaaagacaaaatatataaaatctctttgtaaatggtaatgtactatataaatatatggtaatcaaacaaaagtctttaaatgtaaatgactcccataatcatctgtattcttttcgtgggggagggtgggacagggtctcgcttcatcacccaggatagagtgcagtggcatgatcacagctcactgtaccctcatcctcccaagctcaagtgatcctcccacctcagcctcctgagtaggtggaattacaggcacatgccaccatgcctagcgaattatcttttgcagagatggggtcccactgtgtttcccaggctggtctcgaactcctgggttcaagcaaccctcctgcttcagcctcccaaagtgctaggattacaggcatgagccaccacacccagtctgtattctaataaaactaagtagccctataattattactttttaacttgatttaataacataaagcttaatatctttttggtgtgataagtgattcttaagtttttatagcataacataccccttaggaaacttcaggaaagcttttaatttcattctccaacccaaatgtatatgcataccaaattttgcatacaactttatggatcatatagacactccctcaaaacaaaatatcattccacggattactgctatgaattctagtcttcaaaatgcataaagaagaggaaaacggccgggtgtggtggctcacacctgtaatcccagcactttaggaggctgaggcgggcggagcacaaggtcaggagatcgagaccaccctggccaacatggtgaaaccctgtctctactgaaaatacaaaaattagccaggcatggtggcacgtgcttgtaatcccagctactccggagggtgaggcaggagaattgcttgaacctgggaggcggaagttgcagtgaactgagatcgcaccactgttctccagcctgggtgatgagtgagactccgtctcaaaaaaacaaacaaacaacaaaccacaactagttggtagatatgatagaagtttccatatgcaataattatgaataagataaaacccctaagaatatacttaataagaactgtgctagatctttatgatgaaaattttaaaatgctattgaaggactcagaagaacaattaaatacatggaaaggcacaccatgttcttgagtagaaaaactcaacatcataaaggtgttcttcctaagttagtctataaattttatgtgatttcattaaattacaaactaagtttggatagtttggatactaggcaatattacttcaaagttcaagtggaaaaagtaaaaaagcaagaacagaggctgggcgcagtggctcacacctgtaatcccagctctttgggaggcgaggagggtggatcgcttgagctcaggagtttgaaaccagcatgggcaacatagtgaaacctcatctctactaaaaatacaaaaattagatgggtgtggtgtcaggtgcctgtagtcccagctacttggggggctgaggtgggagaatcacttgagcctgggaggtggaggttgcagtgagccgagattgcaccactacactccagccggaatgatagaaatgagactttgtctcaaaaaaaaaaaaaaaaaggaaggaaaagcaagaagagtcagaggaattctaaaaagaatgtatggggaggggtaggcaggggaatcagctctgtcaaatattaaaatatataacaaaacatgtagttgttgcacaggcatgtatagaacagaatgagaaatccagaaacaaactcaaatacacctaagaattttgtatgtgatttttaaaatgttattaatattatttaaaatctgtaggtaaaagatgaatgttcaataaataggattaggattgctgggtaatcatctaggaaagtggatgaaagattaaaatataaaaaacaaaaagtgaccgggcatggtggctcacacctataatccctgcactttgggaggctgaggtgggcagatcgcttgaatccaggagtccaagaccagactgggcaacatagaccccatctcaattaaaaaaaaaaataagtaatagaagtaatgaaggggagacatttttaatctcagagtatggacattctttctaatatgacacaaaatttgaaagccataaaataaatcgtgatcacattaaaaagtggttttttatctgataaaccactataagtgttgcaggaccttaggggttatcatttttctggctagaaacctctgtggctggtggcacccttgtctgaattttgcttgggctcactgggctcattctgcccattcagcctggcaggctgtgcttggctcatgctaccagcctggatcctatgcctccaggggagtctgtaagtcaggcatggagcagtgaggggtgtatgaacgagcgtggagtccagccactgtgcagtcagacatgccagctgctgccatggagcaggcagctccaggtgccagcacaggcaatggctctctacaaggctgcagctggaccagggacatcgcaagcagcttccccagctggcactggggaatgcagtggtgcctagaagcttggagacaccaggaactgcagggccccaaagagagactcaaaaccctggctcagggagctcccaggtctcccaggtctgggcttcccaaagggccacagctcttctctccttctcttcgcccgcaacgtggtgagcagtgggcatgttttaaccctgtttgtgttacagttcttttagtttcgccattcggtgggtcctgagtttttgtcctgtgaacaagaagaatgaggtatgcagacaagtgaagggtgagcaagatgaagaggagctttattgagtggtagaaccgccccgaggagacctggaggaggtagctcctttctgcagctggggggtgttcagctcctagcaaagagggtagctcctctctgctaagcaggtcatcccgaggagtgtttagctcctagcgtggagggtagctcatctctgcagctggtcatcctgtcttcagctctgctctggctgagtcctgggcttttatgggcctcagaggggaggaagtgcacactgattggtccatgggtggccataagtgggcctggaaaaggcaccacaaattcccactccagtccatgggactggcaacctggcccccagccttcaggccctccctggcctgaaggtggtgcttcactggggacccacccctttccaccctggagccggtctacttcctacaacttttcacggcacccaggctgttcctgctgaggggtgcctgcaggccagtgccgagctgcccttagcaccccccttggcgtctctcccatgctcctcattaccaaaagtccaaagagggaggttgacatgttagtgctgcactgagcgggtgcacacccagccaggctgggacagcgcccaggctcaacccccatgccactctgagatcggagtgggtgccaggagtggggagaggccaggcagcagaagcagacacccccaagcctgtgccctgagggcacagagtgcagagatgcccagatcctacacctgggagggtggggctcccaccactgcatggagcttgcaggcagcctggggcaggggctccaggtcctcaatgggcccctttctgcctgcccaccccatgcccaactgcttctctgtgcccagccccattgtggcagcgcccagggtggtgggttctgtggagggcagggagtgttggggagggtccagcttgtccctggctcctgctggctctgtggttcatggaactgccccaggcacagctctacctcctccccatgccctctccgcagtggcagtaggctagagtggtgacacggggccagggtccagagcagcagaggctccaggcctgggaacaggtctcacctgaccatgcaagggtgggggcagcacagtcacctgcctcgggaacgtggagcacaggggacccactgccaccattcctgctcccgcagctgcccctgccgccactgcttgcacctccccgctgtggctggtgcagtggccactgccatgataagcaagatcaacaaacaacaaactggaaaaagaataaaggactcctagaaatcaataaaagaaaggctaaaaatctaatggacaaaggatctgagcaaacaggaacaaaacagaaacacaactctctccaccattaaaagatgctcggtcttggccgggcacagtggctcatgcctctaatcccagcactttgggaggccaaggttggtggatcacgaggtcaggagatcgagaccatcctggctaacacgttgaaaccctgtctctactaaaaatacaaaaaaaattagttgggcgtggtggcgggcacctgtagtctcaactacttaggaggctgaggcaggagaatggtgtgaacccgggaggcagagcttgcagtgagacgagatggcaccactgcactctagcctgggcgacagagcaagactccatctcaaaaaaaaaaaaaagatgctcggtcttaaacttaagaaaaatacaaattaaaataacagttaagctgggctcagtggcaggtgcctatatcccacccactcaggaggctgaggcaggagcttcagttgagcccagaagttctaggctagcctagacaacatagggagaccccatctctaaaaaattttttttagaatcagataaatttttcttttttttctttttaagacagggtcttgctctgtcacccaggctggagtggagggtcacaatcatggctcactgcagccttgacctcctgggctcaactgatcccacctcagcctgccacagtactgggattacaggcgtgaaccactgtacctggctaaatattttcacagtcaaaaagtttgataactgtttacaaggtattaggaaacaaatatgcatattattgctgttggtgtaaaactgttacaagcgcaacagagaacaatttggcaataactaatcaaaatctaaaatgtacgtactcttcaatccagcaatctcacttcttggagtttatcttacataaatccttgcaaatctagattcctagattccttctcccatcctagcagaagtctaaggtttattttttgtaaaagtaaaacacagagttgttttgtttgtttgtttgtttgtttgttttatgagatggaatcttgctctgtcacccagactggaatacagtggtatgattttggctcactctacctcccgggttcaagggatcctcttgtctcagcctccctagtagctggggctacaggcatgcaccaccacacccagctaatttttttttttttcttgctctgtggcccaggctggagtgcagtggcgccatctcggctcactgcaagctctgccctctgggttcacgccattctcctgcctcagcttcccgagtagcaggtgggactacaggcgcccgccactacacccagctaattttgttgttgttgttgtatttttagtagagacggggtttcaccgtgttagccaggatggtctaaatcccctgacctcatgatccacccacttcagcctcccaaagtgctgggattacaggcgtgagccaccatgcctggccaatttttttagttctagtagagatgaggttccaacatgttggccaggctggtcccaaactcctgacctcaggcgatctgcccgcctcagcctcccaaagtgccgggattacagtcagcaaccgggtccggcctaaaacaaagaatttctatacagggaatactaggccaaattaaggcaagagtagtctcttgaaaatggggattacgtgagtgtgtgattactgaatgctggaataatcccctgccttttctctccactgggctttcaaaacactggcacccaaatctttactctccatgcagaaattttagaagactcttttctggagaatctgacaatccccaggatataggtttaagaggtttcccaacaaattgcccatgtagaataccctgcagtgaatctcaaagtctaaaaatcctgtaaaccatgtgctcagatcttccaaatggctttttagtcctctactcttagtcataagcagacatccaaggattatcatacatctgagaaaagcctctaaacgtgacttagagatcaaaataaatgacatggccaggtgcagtggctcacacctgtaatcccagcaatctcagcactttgggaggccgaggtgggcggatcacttgaggtcaggagttcaagaccagcctatgcaacatggtgaaccccatctctactaaaaatataaaaattagcccagtgtgctagcgcacgcctgtagtcccagctactcggatgactgaggcatgagactcttgagcctgggagacatgagatcatgactctgcatgacagagtgagactctgtaacaaaaaataaataaataaaataaatgggggcggggtgcagtggctcacgcctgtaatccctgcactttgggaggccaaggtgggcagatcacgaggtcaggagatcgagaccatcctggctaacatggtgaaacctcgtctcaactaaaaatagaaaaaattagcggggcatggtggcaggcgcttgtagtcccagctattccagaggctgaggcaggagaatggcgtgaacctgggagccagagcttgcagtgagtcaagatcatgccactgtactccagcctgggcgacagagcgagactccgtctcaaaataaacaaataaataaataaaaataaaaaaataaaataaatgagtatgcctggtgcggtggctcacgcttgtatcccagcactctgggaggccaaagcaggcagatcacttgaggtcaggagttccagcctagccaacatggtgaaatcccgtctccactaaaaatacaaaaattagccaggcatggtggggcataccacacctgtaatcccagctactcgggaggctgaggcaggagaattgcttgaacctgggaggcggaggttacagcaagccaagatcacaacattgcactctatacttcactccagcctgggtgacgtagtgagactctgtctcaaaaataaataaattaattaaagaaagaaagagagagagagagagaaagcaagcaagcaagcaagccgggcgcggtggctcacacctgtaatcccagtactttgggaggccaaggcgggcagattgcctgaggtcaggagttcgagaccagcctggccaacatggtgaaaccgtgtctctactaaaaatacaagaattagccaggtgtggtggcaggcacctgtagtcccagctacttgggagattgaggcaggagaatcgcttgaacccgggaggcagaggtcgcagtgaaccaagatcgcactactgcactccagcctgggcaacagagtgagactccatctcaaaaaaataaataaataaatacaaacaaaacaaatgacacaaatgaacagaaaaaataatattgaagaaaacaggctgtacagggagatgcgaatttacaacaagtgctaatattagtagtttaaatagatattgcatctatgaaataagaacggtctgcattcttgtaaaaaacttaggaaaataaaaaacctcttgaatattaaaaacttaacagcagaaattaaaatgctagaagggttggaagagaaagttgaaatcaactgggcacagtggctcacgcctgtaatcccagcactttgagaggtaaagccaggaggatgccttgaggccaagagctcaagaccagcttgggcaacatagtgagacctccatctctacaaaaaaatttaaaacttagctgcacatggtggtgtgtgcctccagtcccagctactcaggaagctgaggtgggaggatctcttgagcccaggagttcaagattacagtgaactatgatcacaccactgcactccaggctaggcaacagagcaagaccctgtctcttttaaaacaaaaaaaaagggagagccaggcacggtggctcacgcccgtaaccccagcactttgggaggctgagacaggcagatcataaggtcaagagatcaagaccatcctggtcaacatggtgaaaccccatctctactaaaaatacaacaaaaattagctgggtgtggtggcgggcacctgtaatcccagctgctcaggaggctgaggcaggagaattgcttgaacccaggaggcacaggctgcagtgagccaagatcgtgccagtgcaccccagtctgggaacagagtgagactccgtctcaaaaagagagagagagcatataatagaagaccacctagagaatctaagaggtccaaactccaaacactgtaggaggaaattatccacaaaatcttcaagtaaaatttccagaactgaagaacatgagtttacagaggggatgagcccaccaagtgtccagcagaatggataaaaatagatctataccaaggtacatcactttgaaattttagaacacttggaatagaaaagatcctacaagcttccagagagaagaaatgtcatataaaagggatcagtaatcagaatagcttgacttgtaaacaccaccactgaaaaccataacacaagtaggaaaaaaagctcttttatgctatcttgatgtatctttgcctctgttgttcattgatggatcccaagtgcctagaggcagtgccaggcatgtactagagtctcagtaaaaatttattgaatgtaagagaacaattgagaaatggcttcaaaattctgaggaagtatttattccagcttataactaaaccaatatatcactcaagtatgagtttagaataaagatattgtgggacatgcagggtttcaatttaccctctttgtgccccttctcaagaagctgtgaaaggatatgctttgttttgggccagtttctcccatttggaaggggtgtatttacccaatgcctgtacccccattgtatctagggaacatgaaaagggaaatctaggcagaggttcccaaacctcaattcttgacttccatgcacctgcaggctcagtaccatgtggaaactgccaaggcttggggcttgcaccctgtgaagcaatgagctgttccttggccccttttagccatggctggagtggctgggactcagggcaccaagtctctaggctgcacagagcaagggggccctgggcccggcccataaaaccattttttccttctaggcctccaagcctgtgatgggaggggctgccgtgaagacttctgatatgcccaggagacatttttcccattgtcttgggaaattaacattcagctcctcgttacttaagcaaatttctgcagccagcttgaatttctcctcagaaaatgggattttcttttctagtgcatttccaggctgcaaattttccaaacttttatgctctgcttcccttataaaacagaatactttggctgggtgcagtggctcatgcctgtaatcccagcactttgggaggcagaggcaggtggatcacctgaggtaaggagtttgagaccagcctggccaacgtggcaaaaccccatttctactgaaaatacaaaaaattgggctgggcgcagtggctcacgcctgtaatcctagcactttgggaggcagaagcgggtgaatcacgaggtcaggagatcgagaccatcctggctaacacggtgaaaccccatctctactaaaaaatagaaaaaaattagccgggcgtggtggggggcacctgtagtccgagctgctcgggaggctgaggcaggagaatggcgtgaacccgggaggcggagcttgcagtgagccaagatcgtgccactgcaccccagcctgggccacagagcaagactgtctcaaaaaaaaaaaaattatccgggcatggtggtgggcgcctgtaatcccagctgcttgggaggctgaggcaggagaattgcttgaacccgggaggcagaggttgcagtgagtcgagattacaccattgcactccagcctgggcaacagagtgaaactctctcaaaaacaaacaaacaaacaaacaaacaaacaaacaaaactgaatgcctttaacagcacccaagccacctcttgaatgctttgtggcttagaaatttcttccaccaggtaccctaaatcatctctctcaagttcaaatttccacaaatctttagggcagggcaggagcagaatgccaccagtctctttgctaaaacgtaacatgagtcagccgggtgcggtggctcacacctgtaatcccagcactttgggaggccaaggcaggtggatcacaaggtcaggagttcgagaccagcctggccaatatggtgaaaccctgtctctactaaaaatacaaaaaattagccaggcgtggtggcaggcacctgtagtcccagctactcaggaggctgaggcagaagaatcgcttgaacccaggaggcggaatttgcaatgaactgatattgcaccactgcactccagcctgaatgatagagcaggactccatctcaaaaaaaaataaaataacgagtcacctttgctccagttcccaacaagttcctcatctccatctgagaccatttcggcctggatttcattgtccatatcatcatcggcattttggtcaaagccatccaacaagtctctaggaagttccaaactttcctacattttcctgtcttcttctgagccctccaaactgttctaacctttcatcattacccagttccaaagttgcttccagagttttgggttatcttttcagcagtgccccactctgctggtaacaatttactgtattagtccattttcatgctgctggtaaggacatacccaagactgggaagaaaaataggtttaatggtcttacagttccacatggctggggaagcctcacaatcatggcagaaggcaaggagtagcaagtcatgtcttacatgtatggcagcaggcaaagagagagcttgtgcagggaaactcccatttttaaaaccatcagatcttgtgagccttattcactatcatgagaatagcacaggaaagacccacctccatgattcggttacctcccaccagctccctcccacaacatgtaggaattgtgggagttacaattcaagatgagatttgggtgaggacacagccaaaccgtatcagggatattcaacttggaactactgttacatacaacatggatgaatcccacagacctaatgctgagtggacatagccagacatgagagtacgtattgtgtaattccatctgtatgaagttcagaaatggacaaaactaatcaatggtgtcagaatgttggttatctttgagggagatattgatagggaagaaacatagggagcctctggggtgctggaaagtctgcatcttgagctgggtgttggctgtaaaagtgtatcaagtattacacttaggatttagcactttatgtaaattataccttaatttaaaaagttaaaaaattcagctgtccaataaaaattaaaataaatgaaatgcaatccacatagccctgctaaagtcaggaagagaatgaccactatctccactactgttcaacagtgtattgaaagtattagccaaagcaatcagataagagttacaaatgaggggctgggctcagtggctcacacctgtaatcccagcactttgggaggccgaggtgggtggatcatgaggtcaggagttcaagaccaacctggccaacatggtgaaactccgtctctactaaaaatacaaaaaattagctgggtgtggtggcaggcacctgtaatcccagcaactccagaggctgaggcaggagaatcgctcaaacccaggaggttgaggctgcagtaagccaagatcacgccattgcactccagcatgggcaacaagggcaagactccatctcaaaaaaaaaaaaaaaaaaaaagttataagttagatgtgtaaaaattagaaaagagaagttaaaagttttactatttgttaatgataggatcaatatttacaaggcccaagaaaatcaactaaaaaactgctattaataaaacaatttttaaaaaaagaattcaaagctaggcaccatggcacaaggctgtagtcctagcttgaggtatgaggattgcttgagtccaggagtccaagtccagcctgggcaacagaacgaggcccaattttttttttttttttttttttttggagacaaggtctcgctctgttgcttacgctgtagtgcaatgtcatgattatggctcactgcagcctcaacctcccagtttcaagcagtcctcccacctcagcctcccaagtagctgggtccacaggtacatgccaccacacttagctaattttctaaaatttttgtagagacatggcctcgccatgttgcccaggttggtctcaaaatggtctcaagcaatgctcgtgttttggcgtcccaaagtgctggtattacaggtgtgagccattgcacctgggcttcaaggccccaattctaaaaaaaaaaaaatttaagagagaattcagtgaaatgatagggtatacaattacagaaaccagaagcctttatacacacaaagacacaaacagtattacagtgagcatcttcatacgtgccctcctatggatccttgtcagaacttcccttgggtctgtgctcaggaacaggattggtgggacagagcgttcacacattcttcatttgactgaaactgctaggtggctctccagaacagccacaccagctgtcacacccaccagcatccttgctagtacttgccatatcccctacatatcctctgtgcttgtggaaaatgtgcttctgcaaaaccaggggctaggctaggagtggtggctcatgcctataatcccagcactttgggaggccaaggcaggtggatcatgaggtcaagagatcgagaccatcctggccaacgtggtgaaaccccattgctattaaaaattcaaaaattagctaggcatggtggcgtgcacctgtagtcccagctacttgggaggctgaggcaggataattgcttgaacccgggaggcagaggttgcagtgagccgagatcatgccactgcactccagcctggcaatagagcaacactacgtctcaaaaaaacaaacaaaccaaaaaaaacgggctaaaccaagaaagaagcaagcatgagatgtaggaaacagggattctaacagggaagtggtgagaggaatctctaggatgtgcggcaggccagggttggggcactactgcttccagactccccaccctcgcctccttaaagggctcaggatatgaggaggaactggccataggcttagttgaaattattgtcattgacaacagttcttctgtctataaagtttgagtatttgtgccttctctcagtatcactgtatatcatcccctaagcagtagatctatgctttcttagttcttcttgccctaag

SEQ ID NO: 155 - DNA, 11515 bp, Homo sapiens
  source 1..11515: mol_type = other DNA
cgggcgctccttcctcagcggcgggaagctggcggcagcggcggtggcggtggctgagcagaggacccggcgggcggcctcgcgggtcaggtgagcgggcccggcggaccgctagggcgtctacggcggcgtgcacttttgtgctgcagggcgcggaggagcctgggggcggtgcgcggagtctgtggctcctggcgctgggtccggggcggaggcggcgcccgggaccaccgctggggctgccgcggcgccctcgccgccctcctgggcgctggttcccccgcggggtggccgctgctgagggggcccggggaacagaggggcccgggccgccgtctgcgttccttgcggagcgcggagctggggctttgccgaggcctgcgggcggccccacgcgggagccgcttcacgagggcccggctggggtacgcagcggcgtttcccgtacctcggctctagttgcagcggagggaacgccaggcgcgccgcagccccctctgtcggagcccggccgcggagagggccgcggatgtgggaggaggcccagaccccgggcgggtcggccagcgccgtcttccctgggctcctccggcggtgcgaggtgggactagggaaagtccccgagacacttgcagaagtcagacgcaagcctccctccgcgtcttcagacgcttctcgccccgcaaacaggatcgtcgtggcaaaggctccgacagcttgctggaatagagggtctccgctgcctcgcttctcctgtggccttcgtgtgggacgcacgggacggcgggacccagataaccgttctctcaaagcgagccacagaaaaacattgcctgttcacaaaacttacgttttatcaactttctacgtacaaccactctattttcaagtgtcaccgtgttttataattagggtggaaatccagaatacaaagtgagttacaccccttttctaggaagagtagtaggctgtatcttggaaaaggggctaggaagtttccctcaacttgccactggaacatgttttcagggaaaagaaggagtgtgtttcgttccaagtaacaaaagtacctgcaattggctgggcgcggtagctcacacctcccagcactttgagaggaggcctaggcgggtggatctcctgaggtcccgagttcgagactagctggccaacgtggtgaaaccccgtctgtactaaaaatacaaaaattagctgggcgtgatggcgcatgcctgtaatcataatcctagctatgtgggaggctgaggcaggagaatcgcttgaaccagaaaggcagaggtctcagccgagatcgtgccattgcactccagcctgggcgacagagcgagactccgtctcaaaaaacaaaaaaaaccaaatacctgaaattaacataacagtaattgttcatgaacagcctccaggagacttgtagtggaaggtggagctcccactcagtactcaagactgcagaccttgctcctcttctccctgtttttccgataaagtatttcaaagcttatctgatgtgtgaggaatggaaattgttgatgatttgcttaaaaacccgaaactttgaagtggctgcaagtccagctgtgaaggtgacaggttaggtcagagttgagtctgtccccaaccgtcccagccctactgatcagaatctgggaatctgcgttttcagccagcctcgtggtattgctcagccacgaaggtgtggccactgctgctgtagtgaaggaccagtccccgagctgtactctgcttgcctgagcagcactgcggggctgctccctgctggcctctgcctcggtgggcctaggttgctctgtccctagtggcctgttggctgttccacctgccatgtcggacatgtcctcagtccgtctggccctcttcgtttttctctgtctggtcggtgcttggtttagaagcctgagggcagtgctgggagttgactgagggcttggctgtcccggtaacaacctgtggagttggtgggattttaggcatttaactagatgtgtagaaagagcttcaaaactgagcagggggccaggcatggtggctcacgcctgtaatccagcactttgggaggccgagatgggcggattgcctgagttcaggagttcgagatcagcctggccaacatggtgaaaccccgtctctacaaaaaatacaaaaattagccgggtgtggtggcgcgtgcctgtagtcctagctactcgggaggctgaggtaggagaatcgcttgaacctgggaggtggaggttgcagtgagctgagattgcatcactgcactccagcctgggggacagaatgagactctgtcttaaaaaaaaaaaaaaaaattgagcagggagctaggctccacagccccaccggtatggtatagggccctttctcattccatattagaaggagttaagcagcctcaggcagaagtcacacaggaggccctcagggagctgggcccagcccaggcatccctcggggctggttaagaccatgctcttgctgactttgtcccaaacacagatataacccaattcagggtgatcctcacaggccagcttctccgggcccaaccttatcctcttcactcctgaacacatgttctgggtgacagctctttggggtcacgtgactgtaaaaagcacctgtgagctttactcttttttgtattaatagtaataaacttgtcagcattttaaaatattgggtacaacacagaattaacagctgctggagatttggaacattggagaggaatgatttgaagtgactgaacagggatattctcctggtaccagaatgggatctgtgcatgggatgagatgcagtggaggatgatggggattatctctcgtcccttgtagaacttgtgtaacccaggcacatctatgcaggtccctgggttacacaagtcctacaaggggcgagagagaatctccatcatcctggaggattctttctggccccttgtagcatttcccaccctgatggtggctacccttctgtgttttcacaacttagattagctttgcctgtcctgaaggttcagatcaatagaatcctacggtacatatttttgtgtgtgtcttgctgcttttattcagcataatgttttgaaatttatccgtgttgcataaatcattgaggtatgttgctgagttgcattcctttgtcagaatacaccagatcgtatacattcaacttgttttaagtgttttttttgtgtgtgtgtgttttttttttgagacggagtctcgctctgttgttcaggctgtagtgcagtggtgcaatctctgctcactgcaacctccgccttccaggttcaagcaattctcctgcctcagcctcccgagtagctgggactacaggcacgtgccaccacacctgactaatcttttgtatttttagtagagatggggtttcatcgtgttggccaggatggtctcaatctcctgacctggtgatccgcctgcctcagcctcccaaagtgctgggattacaggcatgagccactgtgcccgggctgtttaagtcctaaaagaatgcttgtggctgggtgtgatggctcactcctgtaatcctagcactttgggaggccgaggtgggcaaatcacttgatgtcaggagttcgagaccagcctggccaacatggcgaaaccccggctctattaaaaatacaaaaaactagctgggcgtggtggtgcacgcctataatcccagctactcgggaagttgagggaagatgaggcaggagaatcgcttgaacctaggaggtggaggttgcagtgagccgagattgcaccactgcactccagcctgggcgacagtgagactccatctaaaaaaaaaaagaatgcttacaactgagagtgatgaaactaggccaaggaccgccccccacctccccaggagcctctctggaggctcacacctgctggtcctgtccttgaatagacagaaaaaaggttccccctgttctctgaatttcttttcggtgtgatagatctcattgcctgtgcatttaacactcctaaattttataaaacgattatttctttggcatttatccaagagaaatgaaaaaccaatgttcatgcaaaaacatgttctagaatgtccatagcagctttatgtgtaataactccaaactggaaacaaggaaaaagttcccttcagctggggtgtggtgacactctgctccgtctgtgcctccagatcctactctgttgggaactgttgacacacaagagtttgcaaggatctcaagagaattatgctgaaggagaaaagccaacctcagaagggtgcttgctgtgggatcccatttatgccacattgttgggctgacccagagctgaagggtggcatggccagaaaaggacctacacagggaggccagggtgtctggtcctggcaggagagcagccgtggaacagggtaggaacacagacgtggagctcagtggaggagggaaggaacgcttagctgtggggcttagagacttggcaaaacaagaggaagctttaccagcaagtgtgcagaaatagtgcgggagaaagttggtggagcgttccaccttcttaggatgcagtttaataatgtttatcaagcctcttaaaaatgtacctgcacatcaccctagtaagtaaagagccgaggctaaggaagccaaatgctagaaataccaaaacacctaaagttagaaactggtatcatttgtgattgggaaaattgtcagtagtgtgaaacttccctcccttgtgcagagaggaaagtgctgggagaaacgactggaaaggaggaacccaggtggtgactgtgtttttctgagtggatgggatcctgggagaaaattcgttttatggtttttgatgctcttccagattgtctatggtgagctgtggaaataagcaaccaggtgagaacaggcagaggctgtttatccagagcttcccctagcaagggtgcggccctcctctctcgtgattggcagaaactcataggcaggtgagggaacaggagagctttacagtggaatccagggaagctcagggatggctgatggaggctgctgacttgggggactggggtggccagttagaagtggggctcctggcctggcacggtggctgacgcctgtagtcccagcactttgggaggccaaggtgagtggatcacccgaggtcaggagttttgagaccagcctgaccaacatggtaagtctctactgaaaatataaaaattagccaggcctggtggtacacccttgtaatcccagctactcgggaggctgaggcaggagaatcccttgaacctgggaggcggaggttgcggtgagctgagattgcgccactgcactccagcctgggcgacacaacaacaacaacaaagaagtggggctcctgtgagatggcctagaacatgtttggctttctctggttggtcctaaattggaagcagggacaaaaactggagaggttgtcggttactaatcatgtcctggccattttgggctgcttgctatggaaatgattgtttagcttcctggattgttcctagagaaagcagccaggcttcctgcaggtctgactagggcaacctggcttcctggcccgttactgaaggtaaagggctggtttccgactgatggcggcagataatggctgagagttctgtttctgtatgtggttccgccattgtttgttggtatattccctcgctcagagcagatgttattagggtgatttctgacggtcacgtattgctagtgctgcccttaggaccgctgacagcaccaggccaagcactgaattcatcctcttaagatccccagtgggaggcttctagtatccatatctggctttcagaaaagggcgggagggtctgtcgttgggtttggactcaggacctggcatttctaaggactcagaggaaaggaaagtgggacccagagggtcctaggagcttgggacagcttcttgaactggttcccagtgtggttgtgggtcttcttggcctgtcccattggtattcttgttccttctgtgagttgccctgattgccctgctcagtcgtgctgacctcctgtaggccccacattatgggggttgtgctgctgggtttccagagtcaggggaggcagccaggggttcttctgtctataaacttgggcttaatgcatgctgttcaagaggatttggtttgggtcctaaattaatccattgctatgcaggcttgggattgagataggttgaaagagaaactaaaaacctaaaaggtatattgacttcccacagaggaacccgtgggacttaatcttttccccaacgcagggtgtcctttgtagtttgacatagccttatgttaattctcgatatacttagcaattttaagccagtgatttaaacaatggattgggatggaaaagctctgaaaagttaaatttgtggctgacacaaagaactcgaatatttaccaaaagtaatagaaatgtgtaaatgtgttttggtggtaaactgtccttcatttagaattagttgagaagctggtgtatgcaggtgtgagaggcggtgcccagcctgagggctgtgcctgtggtgacactggcatgctgctctggggaaatgggtgctgtaggggaaataagctagggttagggaagttttcctttaattttaattttgaaataattgtagagccaggggaggttgcagagcagtgttcaggaggtcctatgtgcccttcctctgctccccagggccggcatccttgtaggatgcacagccaggccccaggtccgtgtgatgacacggctgccgcaggcgcatgtgtgcgtgtccggcgctgtgcagtcagggtagggccacccccacagcccaggagcagaagggccctcacccccaagatctccctgcgcaggttcctttctagccctgccacccctcagctctgggtcagcatgacaatgtggcataaatgggatcccatagcaagcacccttctgaggttggcttttctccctcagcctaatgcccctgtggaaggatccgtcctgtgtatcaacagttcatttctttctattgcagagtaggatttggtggcatgaatggagcagagtgtgtgtcaccgtgcccaggtgaagggtacattttccttgtttcagatttggagctactacaaataaagctgctgtgcacattctggaacatgttttttgcatgaacattggctttttctctgggataaatgcccaagaggtcacttagttttttaaaatttacatgtgttaaaggcacggggatgagatctgtgacactgaagggaaattcagagaacagggggaccctttcttctgttaattcaagggtaggaccagcaggtgggagcctccagaggggctcctgggaaggggtatgtttggcagccagttctcccgcactgcaaaacttcccatccttggtctccagaccccgagcagagacagcatgtgcctcccatacgccagctttccaagagcacctgggtataccctggtcacagggagccatcagattgactaagagaaaaagaagttccaaagtttgcatattcaaaagattgtaaccctatttatgcataacttgaattatttgaaataatatttcactacattacaagcatgagaagagagaaacttaatcatgcgtgagatgcttgtcctgtcagactctgccggccagtatggccctgagccagctgtcatcctcccagctccccgcaggcggcactggctcagaatggcatctgtcaaaagccagagcccaccctcctgtctgctctgcctttagtgccccagagatgtcccaatttagaatcagttaaaaaaaaaaaaaaacagtttgcacagacttgtacttctgagagtagacatggccaatgtccatctagtgcatctgtgctgtgcgtcttagtggaacctgcccagcaaggctgagccttaggtgccatcccggagttgcccaggtctggggtaagatccaggaatctgcatcttcaaccaacagcgccagtgctgaggcatacgccgagaaacactgccttggccagctctgggctgccacaacacactggtgaggaacccaccccccctgccccggacacacacataccctgccatgttttggttcctttgaagagaaaggagttgagatgagaggggaggtggcccctgaggccatggttgtacgggctggtcagagctctcgagtggagggcattgacctgagagatgtcaagtagaaagcagccaggcagagcctgtgcaccttgggagaaatgaactggtggggcgggtggggggagccaaggaatgggtgtgatccctaaggcaggcagcatgggcgggtgtgggagcaagggactgtccagggccacataggctcggccaggagaccctgtgtcccttggagaattgtgcacgaaacacagaccactcgctgcatgggatgagcatacagccctgcagtccttcccctgcgcgttcctggtggcacagctttccagcccggctgtctgcgacatatagaggcttttagtgaaagcattgagggggaaggcactaactcttctgaacgcagaagtgactttgtccgaggcaggatcctgagggaagtcagaatggtacgtgtgtgtgcccggccctgtccggcccccgccctgcgccctctgcaggctggcacggttcacattaatctcatgttaccccagggtctcttcttttgtacacaccacagttagatttttgaaacagattttcagccaagctctcgaacacttacatttctcttatatatttctcctatttttagttcatttatcttttttgctataaaacactgtcgtggtacagttgagaggtttgtcgtttctaacaacgtgactgtgcctggcttaggcaggatggcagctgatctgggggtgggggtctcccactgggctccacgtctcagctctgttagggagttacagctctgtcaagtccctgccagttacggagtcgctgctccttgcgtacagtgagggcagtcagacgaaatccaaggggcgctgtccgcagagagtctgccgtgtgctaagtggtgtcttccttggtttctgcaggacacaatgtttgcacgaggactgaagaggaaatgtgttggccacgaggaagacgtggagggagccctggccggcttgaagacagtgtcctcatacagcctgcagcggcagtcgctcctggacatgtctctggtgaagttgcagctttgccacatgcttgtggagcccaacctgtgccgctcagtcctcattgccaacacggtccggcagatccaagaggagatgacgcaggatgggacgtggcgcacagtggcaccccaggctgcagagcgggcgccgctcgaccgcttggtctccacggagatcctgtgccgtgcagcgtgggggcaagagggggcacatcctgctcctggcttgggggacggccacacacagggtccagtttctgacctttgcccagtcacctcagcacaggcaccaaggcacctgcagagcagcgcctgggagatggatggccctcgagaaaacagaggaagctttcacaagtcacttgatcagatatttgaaacgctggagactaaaaaccccagctgcatggaagagctgttctcagacgtggacagcccctactacgacctggacacagtactgacaggcatgatggggggtgccaggccgggcccctgcgaagggctcgagggcttggctccggccaccccaggccctagctccagctgcaagtccgacctgggcgagctggaccacgtggtggagatcctggtggagacctgagcaggagccctgagtgctcacagccgcctctgacgcattgacacgtgagcactggctcccacggagggtgcgcctgccgccagcggcccagccttgctgccctgtctgctgattctgagaaatcccagaacagcccattaccagtggggctgcagccctaggcccgtcccactcacctcccccctgtggagcgccaggcagaggctgttctggaaggcttcttgtcttctgacgtccccacagccctgggcccctcgtgtctctttgtgtcccccactgtagaggacggtgagccgcagctgcatcaacctccttttacctttagataggtgaatttttacaattcagttttacatgttttgggcagtattttgtcttaagatatattttttaaactttttataccttatctctttagattttttcagctattttcttaaaagtatattttttctataaacatcctttgctgctacattagaacttttatagcctaaacaattgcagttggtgtgtttcatttttttaaggtttaaataagggttttttgttttgttttgttttttgcagtgagcatcactacagtctcagtcaacagtgtgaatgtatcatgttttactttaaatgtgtgtgtgatacttcttcattatgtcctgcgctgcagtgagacctgggtgaaaatcaggagccgcacacagccacatcttcctagacctaagagtaaattatggaggattttatttatgtctatttatatgtaaatgtcattgaagacaaaggtcaaatatttgtctgtttgtagatcacaggcaccagttggtcttcagggacctcatagcccctcggtggtgccttctcaaggcagtgttcctggaggctcccatcagggtcagcccatgcacctgccctgggtgaggaagtagcattgctgctggatgagaaacgcctgcgctgctctgttagactggtgctgaaacaaaaggttaaggctaggttgaagtctagaatgaaagaaatctgaatccatgtcattcataaccccttgatctgtagtgtcatgggtgctgccgcaggcagggagtgagctgggggtgcctgcagccttccactcctgccccgcctcaccccacatgctccctgtttctcatgctttctctaacttcctcaccccttaaccaaaaaggtgtgttttcttttgtgcatatagccattcttaaatatcagtgatgtaaacctcactttattaaaaaattatccagcaaacaaaatgggaatgtggtgttagttacgaccacggcctgaccctccagcaacctttctgcaggatcagttctgctgtattatctggtggtgctttctaaggtggggaaaggaattgcacttggctgcattaaatggacgctgggttacttttatttcccccccccacagggttgcagagcaaattctttttacattgttcagcgcccggctggagttgggggtgtccacgacctctgacagcccccgatgtcgaaagttaatcctcatggaccctagtttaaagggtatgtgttttataggaataaatctaaagcactattttgtttctgtatagcatttttatcttttagaaacatcatttgttcag

SEQ ID NO: 156 - DNA, 17829 bp, Homo sapiens
  source 1..17829: mol_type = other DNA
cagagctgctgtcatggcggccgctctgtggggcttctttcccgtcctgctgctgctgctgctatcgggggatgtccagagctcggaggtgcccggggctgctgctgagggatcgggagggagtggggtcggcataggagatcgcttcaagattgaggggcgtgcagttgttccaggggtgaagcctcaggactggatctcggcggcccgagtgctggtagacggagaagagcacgtcggtttccttaagtgagcatcctgagggcagcgggaaaaaggctgggatggaggccggacagggaccccaccaggagagttaagtgtcaggacgggacaacgtcgctgtctcagactgaaggggagggtgccgctaacggtctatgccgggagaccttgggaggcagtcggatgctttccctttcctggtcctgtacctctggaatgagcatggcaggcgctcaccccctgccatggtcagagcatggagtcagttatttccaaccttattttggccccatgtggggacgatcattcctgggccctggggacaggtggacccttattagtctcttgttggattcttttatatctcatctggtttccctagaacctagtcgttttttgcattcacttcagtcttttggtagcttgttattatgtagaaagatgcgacacaagtgggaattctcaaaacccaaagggcttctagtgacgacatagactgggaggctaatgttactgcttctaaaattaataggctctgaaatccctaatcaaagcactttttttttctttttttttttgcttgggggtgggatcgttgttcttttttacagttgaattcatcgagagatttgctatatcacacttgtcatttatgtgagactagggttcctctacattgctttcttgcttctgtcctttcatgctattagtggaagtgggttttctgtctatattaaaagacaggatgaatttgttagcactagttttgcagcagcctgcttttgaaatgtctaggcacgcgtatgttgttttaaatctttccacccttacttggaggtgaaactgtaaactgaaagcaaataattaggaagtatttcctttggtgggttcgtacaccagcaaatggtatctgaaaatcagacaacttaaatgtagacatttaaatccaaatctgatttacatatttgttcagatcatctaagtgcccttgagtggttattcaacctcagattaataaatagtgacaaatttacaaccagtattttactgctgtctgtcattaagaatctggcattagggcattcgttagagtttaccctaattaatgatgttttaatgataaagttctcattaagctttaggaataagccttaattgaccatttggccactcttctgtatacagttcttttaaaaagcatttaatttctgtttaaaaatagtatattagaaacaaagtaggaaaacaacccttaatgtttcattgtatctttctttttatttttttgagacaaggtctttttctgttactcagcctggagtgcagtggcgagatcatagttcatggcagcttcgaacttctgtactcaagtgatcctcctgtctcagcctcctcagtagataggactacaggcggacaccatcatgtccagctaattttttaattttttgtagagacagggtcttgctatgttgcccagtgtggtctcaaactcctggcctcaagtgatatttctgcctcagcctgtcacatttttgggattataggcgtgagccacggtgcctaccatttttccagcttcttttggaatcatatgacttaggtttttactagtaaaatacaacatgtagtagtttgtatcctgcctttttcacttaatatttttgaacagcttttgataccatttcatgttctttatttgtatgtagaaaggttgatggagaatttccaggcgcggtggctcatacctgtaatcttactttgggaggctgaggtggaaggatcgcttgagcccaggagtttcagaccagctggggcaacatagtgggaccccatttctacaaaaaataaataattagccaggagtggtggtgtgcacctgtagtccaagctactcaggaggctgaggtgggaggatcacttgagccgaggcggttgaggctgtagtgagctgtgatcatgccattgcgttccagcctgggctacagagcaaaaccccgtctctcaggaaaaaaagaaacattgatggagaattaatatgaggagtttatggtgataatcttattggaaaaggggtaggtaatttgtattgtagctgttttgcataactagcacacagttttgacttacatttgtgcttattggaggtggcttaggacttagttaatggagataaagggaattgggcctgaagactcctcatgccatttcttgctatcatcacaatgtatataagccataatttatttaaccagtcctctgtttttggacaggtggttttcatgtgtttttgtttgtttgtttgtttacatagtaatattatattctatacttttttgcactttttattatagaaattttcaaacatttatagaatggcattctactgttttgtttcatgtcttttgtgtacctcattaatttttttctgaaatatttttaaatggttctaagcataataggattttacttgtaaaagcattattatgtatctccaaaaaataaggacttaaacaaaaaccacattaccattattgattcaacaaaataatcatgccttaatatcatctaacagtcccatttttatgtttcctcagttttctcaaaaatattttttatataattgttctttcaaatcaggatccaataaggcctacattttgtagagtacatttttaaggatgaattttaaattttgtattgcaaactttatgttatttttctcaagtaaaatatttaccttaggatgataaatatatttgctttttctttaattatttctgatattatttgtgttccactgtcatcagtttgtttttttctggatctgaaaaaatgttttgaaattggttgagtcagggctgggtacggtggctcatacctgtaatcctagcactttgggaggccgaggcaggcggatcaccagaggtcaggagttcgagaccagcctggccaacatggaaaaaccccatctctactaaaaatacaaaaaaaaaaaaaaaaaatcagccaggcatactggcggtagtctgtaatcccagctactagggaggctgaggcgggagaatcacttaaacccaggaggcggaggttgcagtgagcagagatcacctcactgcactccatcctgggtgacagagtgagactctgtctcaaaaaaaaaaaaaaaagaaagaaagaaattggttcagtcagggtcccattaagaagtagaagatgcactcaaattagagtaattcaaggataatttaatgaaggcatcaaacagtgtagtcatggtgttgggaaacagccagattgtgcagtaccctggagcttacatcctcaaggttattatcaccacctctaatcctgaaggaagaggagagtagaggttactggaaccttgaagggaagaaaggcctgcattgaaagacacaaaccagtcccttaacacagccagtcagaggtggcctgtcagtgagaggtctggggggaaaatagactaagctcattttctttccttcctccagtctgcaaagaggagaaaggtagagagtggatctagagggcaaatggaacatgtccaggccaggcataagttaacttttttacatttcaattctggcttagtgtgctctggagtgacactttttcatcttacttttttttttttttttgagacggagtctcgatctgtcacccaggctggagtgcaatggcacaatctcggctcattgcaacttccgcctcccaggttcaagtgattctcctgccccagcctcctgagtagctgggactacacgcgcatgccaccacacccagctaatttttgtatttttagtagagacagggtttcaccgtattagtcaggatggtctcgtcatcttgctttttagtaactgttgtggatatcatcagtatcagttattcctttaactatgaaagagcctatgaggatttaagaagcattattttaatatattattatgatatcgggaattctctgatacagttggtcattttagaaccatttgttttcctgaaacataaactttttttcccccctcagaatagtagtttctcatttttcaaacaaattaattttgatctgtgaaatgaaattatcagctcttgataggatggttttctaagtctaggaagtttagaagaaatcagtaaggaaaagatggatgtttttaactacataaacattttaagcttctagtaaccaaagtaaatgggaattatttatagcaaatagaacaaatggtacttaaataccttttattatttgttaaaaagaacagaaaaccggccaggcgcagtggctcacgcctgtaatcccagcactttgggaggccgaggcgggcggatcacgaggtcaggagattgagaccattctggctaacacggtgaaaccccgtctctactaaaaatacaaaaaattaaccgggcgtgatggagggcgcctgtagtcccagctactcgggagactgaggaaggagaatggcgtgaacgcaggaggcggagcttgcagtgagccgagatagggccactgcactccagcctgggcaacagagtgagactccgtctcaaaaaaaaaaaagaagaagaacagaaaaccaaaaattgcaagttaaaactagaacaaaatgcctttttttttttttgttggagatggagtttttgctctggttgcccaggctggacagctcactgcaacctctgcctcccgggttaaagcaattctcctatctcagtctcccgagtagctgggattacaggcatgcgccaccacgcctggctaattttgtatttttagtagagatggggtttctccatgttggtcaggctggtctctaactcccaacctcaggtgatctgtctgcctcggcctcccaaagtgctgggattacaggcggcagccaccacgcctggcctgccatttttaacagtaagaagttgttgggggtgactggcaaaattggaaccctaatattttaataataatgtatattcaatgaagacatggctttagaatgggaattgtgtttctgtcacctgtcatctctacccatagaaggaaaataattactttctatgtcaggcttctctgctaccctggagtggtcttgggtattttcagaacctattcagtgtaattatagacactgaaggccggcacagtggctcatgcctgtaatcccagcactttgggaggctgagacgggtggattacccgaggtcaggagttcgagaccagcctggccaacatggtgaaaccccgtctctactaaaaatacaaaaattagctgggcatgatggggcacgcctgtaatcccagctactcgggaggctgaggcaggagaatcgctcgaacccaggaggcggaagttgcagcgagctgagatcgtgccattgcactccaccctgagcgtcgcagcgagactccgtctcaaaagaaaaaagaaaagaaactgaagcataggacaactttcgccaaggttttgtttgtttgtttgcccgttgcttttaatgtcatttttcgggagagttgatttgggaattagcaagtaagaaaagactaagctgttgatcagtagtagctaaacatgattttcatttttccaggacagatgggagttttgtggttcatgatataccttctggatcttatgtagtggaagttgtatctccagcttacagatttgatcccgttcgagtggatatcacttcgaaaggaaaaatgaggtgagggcacctgatttaatttttgccaaaagctaggctactgaataccttagtatatattccttttagaattaatagtttagatggaaaattctttttatttaaactacagctattccttaaaacacttaaaatatcctcgtttatttaatctgaacattgaaaaaattgtaaagttgagcttcttgctctggcttaaaatttattttaaagctcctaatatgattacataaagaaaaggtaagattacttactataggagctaaagtgctatgaaagttataattgaaatatgattattaagttggaaataatttaacttttctaaattagaaatactattcatcacctgtttttcactgggatattttgataatacctcttattacctatttgatacttcattgatctggaaatttctgtggtcctttctttatggaatcttttatgttcaatggaaatatagtatttctagggaaaacaattgaggtgaaaagaactatagtctaatttagactgtgagtgtggaatagcaaaacctatttgaagttgaaacatttgtatagtatctatagtcttcagagtcagcttcccattataatagaacacatttatttatttattttgttgtctcatggcaatagcatcctctttggtcaaatctgaccaggaaatatatgaagcaactcctaagtggtaatgtctcttctttaagctatcaaatatgactatgttgcagtaataaagcacaggtcatgcaaaggcaaaaacaatttctggaggtggaggactaataaataattttactactgatctttttggtgtctgcgcagcatatttagactgacttgtagagactcaaaattgagctgacacatgttcagttagtaccatactatttacatttgagttagtgtttactcctaaaatttgtaatttgtttcttctttctttgctttctttgacattgaaagttttaaaaatgtaatatgtaaatatgccataattcaaatagaatgagtcacacatggagttgtcccatcctttatcttagctgcgtgttagtccattggtggatttgacatcatttatataaccggctcctattgatagacaagcagtgatttctttctcttcttttagcatgtatactaaacagagacagttatcaagagaatattctttttttttttgagacaaagtcttgctctgttgcccaagctagagtgcagtggcgcaatcttggctcattgcatcctctgcctcccaggttcaagggattctcgtacctcagcctcccaagtagttgggattacagctgcacgccaccatgcctgtctgattttttgtttgtttgtttgagatggagtctcgctctgtcacccaggctagaatgcagtggtgtgatttcggctcactgcaacctctgcctcctgggttcaagcaattcttctgcctcagcctcctaagtagctgggactacaggcacctaccaccaacgcccggctaatttttgtatttttagtagagacgggatttcaccatattggccaggctggtctcgaactcctgaccttgtgatctgcccgcctcccaaagtcctgggattacaggtgtgagccacggcacctggcttgatttttttatttttttgtagagatggggtttcgccatgttggccaggctggtctcaaactcctgacctcaagtgatctgcccactttggcctcccaaagtgctgggattacagatgtgagccactgcacctgtccaagagaatattcttgatattatcaggaaagtaatactctaatgccactaatatattcttaaaaacaaattacttttcccccctactttgtagagagacaaaatcttgctatgttgcctaggctggagtgtagtggtttttctcaggtgcaatcatagcccgctacagcctcaaattgacctttagtgatcttcccacctcagcctcctaagtagctgggattataggcatgactgtaccactgcactccagcctgggcaacaaagcaagatcctgtctcaaaaaaaaaaaaaaaaaaaatatatatatatatatatgtgtgtgtgtgtgtgtgtgtgtgtatacatatatgtgtatatgtaaagttcttttatattaaatctgtgccttaaaggacttattcatgactttttgtatattttagaattgtaagcttggaaatggaggggtacgtggatcacagtatatgttatatatactgctttaaacattttttttatattgaaaacacaatattggacggaatgagagctgctacacaaaagggaatacttgtatttttttttaatcctttttactctggttaaattttgaataaaatagtcttagcaaataggaatattgttttaaatatagacggtccccagcttacaatggttcaacttataattttttttttttttttaatttgagacagtctcgctctgtcaccaggctggagtgcagtggcgtgatctcggctcactgcaacctccgcctcccgggttcaagcgattcccctgcctcagcctcctgagtagctgggactacaggcatgcgccaccactcccaactaattttgcatttttaatagaggcagggtctcaccatgttggccaggatggtttcgatctcttgacatcatgatcctcctgcctcggcctcccaaagtactgggattacaggtgtgagccactgtgcccagccctcaacttagaattttttgactttaccatggtgcgaaagcgatacacagtagaaaccatactttaagtacccataacaaccattcttttttttatgcttagtacagaatttagtaagttacatgaattaaataagtttcttattataaagtgggctttgtattaggtgattttgccactgttggctaatgtaagtattctgagcacttttaaggtaggctaagctaggctatgttgttctgtgagttagctgtattaaatgcatttttgacttacagtatttttcaatctataatgggcttattggaatgtaaattgaggagcaactgtataaagttttcattgcctttttaccttgagtaaagagtacttcctgctttagcacttatgaactggttgcagcagtgggattcatgttctcagatacattcctgatgattggatgtctgaagcataggttaaattaaaaaaaagaaaaaattatttaaaaattattttaataattagggatggggctgggcacggtggctcacacctgtaatcccagcactttgggaggccgaggcaggtgaatcacgaggtcaggagttcaagaccagcctgaccaacatgatgaaccccatctctactaaaaatacaaaaattagctggacatggtggcgtgcgcctgtaattccagctactcaggaggctgaggcaggagaatcacttgaacccgggaggcaaaggttgcagtgagccgagattgcgccactacacttcagcctgggcttcagagcaatatttcgtctcaaaaaaataaaaaataattgggggtgtgacagagtagagaacaaagtgggattcatataagatcctaattctttgtgtgtgtgtgtgtgtgtgtgtgtgtgtgtgacggagtctcactctgtcacccaggctggattgcagtggtgcaccctcagctcactacaatctccacttcctgggttcgagtgattctcctgcctcagcctcccaagtagctgggattacaggcatgtgccaccatgcctggctaatttttgtatttttagtggagacaggttttaccatgttggccaggctggtctcaaactcctgacctcaaatgatccacccaccttggcctcccaaagtgctgagattacaggcattagccactgtgcccagccttgaccaatattttataagcatgcagcatgcatgataaattagttttgaatatatgtgggattttcagttctgacattttggcagagaaatgctggataaaaatatgacgaacattttcttttattaataaatgcatagctccccccacaacaaaggaaatccctaggggataaactataaagcacttccccacctggagattttgatattctctaacccagaaggcttagatttaattagcaatgtgcagggaggaggcaagccatgggcttgcttggagtcagaattagatctaaaatttggtcctccctttgacctttggtactaaaatgcagaaggccctggattttcggagggaaaagtctgatgctggcctttgggggaaaaagtctcccctgaaaactgatagttacgctcctacactcattacaagttggggtatgaatttattactttctgcataatccaggaacttccaagctaagcaatgaacaaaatagtttctgtttataattcccaaattcctggcagtaacaaatgcataatctctctggaaggagataccctttgtatctctttacttaaataaaggtaaataaagtctactaaacttacaaagaacccaagaaaacagtctacattgagtcagcaaataaatcagacctctaagaactttaaatagtagaattattagatatagactgtaaaataatttaatgtatatttaaagtacttaaggaaataaaagactgccatagaaatgatataccaaaataggctatagatatttgaaaaaagaatagaatagaatctctacaatgaatataggcattgaaatgtacaactaaatggatgcattaagaaactgagcagaagtctgatgaagtgggagacagatcagaaaaaaaatttcccaacacagcaatgacagtgaaataggagaggcagttttcaaaaagtaaaatggatcctatgtaaacatggatgagaattttgattaaaattagtgcgtctttggtgaaaaatgtagcgttacctatagcactgctgcagtgctttcttgcattataacattttctggcaatatagccttaaaaattggttacatccaataatgcatttcttagaccatcaaaaaaataaaatccagtatttttgtatggtataatgaagtaaattcattactaaatataatcaaataactttagcaccagaaggattctaaaagaacttttgacataaatagaagttagggaactgatttaatcccacaggtctaggtaatgacagagctgcagctagaagattccaagtctagcgtttttttctctgtgttttgctgcatattttagacatgtagataaagctattttggtcagattttcaagatcaaaagtttaggttttaaagcattttggaaaaagctgaaagtgtgtataaggcattgctaatataatataagcagttcttttaaccagtaatgtttttaatggaattactgttgctttccccatgttgctttatcagagcaagatatgtgaattacatcaaaacatcagaggttgtcagactgccctatcctctccaaatgaaatcttcaggtccaccttcttactttattaaaagggaatcgtggggctggacagactttctaatgaacccaatggtatgtatcaggctaaaataaagcactttactaatacctaatttgcttctaggcagtggaaacttcaaacctctgtgagatagaaagctgaggtcagattggtggatgaaaggataattgtgaataatttgcagatttcagaagaatagtggctttgggaatacataatgaagagaatataatgagaattgcactgtagatttgattattgaaatgtgtaatagaaattggataaatatttatagcatgttttacatttcaaatagaataagaatactcagtaagtcagtcatacctggagctgtctcattcttcatactacctgcgtattttttgtttgtggtttgttttggctttttttagacggggtttcgctcttgttggccaggctggagtgcaatggtgcgatctcggctcaccacaacctctgcctcccaggttcaagcgattctcatgcctcagcctcccaagtagctgggattacaggcatgtgccaccacgcccggctaattttgtatttttagtagtgacagagtttctccatcttggccaggctggtcttgaactcctgacctcaggtgatctgcccgcctcggcctcctaaagtgctgggattacaggcgtgagccaccgcacccagccatactgcctgcatattattagtccattgatgaatgtgccatcatttattaaccagcccctattgatagcacaagtaaggatttcttcctctttttttaacatgtgtagtgaagagaaaagttattctatggtaatttaagtagttggcattatgaaccgatgttatgatactcactaataataaaacactaatagcatgcattctttaaaaatttgtttttatttttaattattataggtgcctaatagatgtacatttatgaagtacatatgatgttttgatataggcatacgatgtgtattaatcacatcagggtaattgggatatccctcaccttaagcatttatcatgtttttataaatgttaggaacataccaattccactctttgattgtgattttaaaatatacaataaattattgttgactatcatcaagaaaacagtttttagaaacaaatcgaccttttcttttgctgtttttaaaaattgaattgctgtcttagaatttgtctaagtaggccaggcgcggtggctcacgcctgtaatcccagcactttgggaggctgaggtgggcggatcacaaggtcaggagttcgagaccagcctggccaacatggtgaaacctcatctctatcaaaaatataaaaagttagctgggtgtggtggcggggacctgtaatcccagctacttgggaggctgaggcaggagaactgcttgaaccagagggggtggaggttgcagtgagccaagattgcaccaccacacttcagcccggggaacagagcgagaccgtgtctcaaaaaataaaaataaaaataaaagaatttatctaagttttggtcataatccttgctgatagctatttagatcacacatgatctgttttcagaggctgtatatcccctagggaggaataaattagtacctagaatctgtaatcagagataaagaggcggggggagactggatggaagaagtcagcagtgaaactccagagcttattcaccttccatgttctcatttctgaaattccgtggaagtgtatctagtgctccagtgcttgatgcttctaggtcatttttcaaaactggtctgctaaagtaggtcagttttccaagaaccacagtcacctgaaaagagcagttagcttgccatcagatcaccaatcccattgccagactatagattaaaaaaaaaaaaaaagggaatagatagttccatttgcaaactatttgtgttaaataacactgtaactctgcaaaaagataggtgggtggcacaactatgaagtgaggtgtctataaagtccaaacatacatacagaaaactttaatattctataatagtccaccatagtcagacagacagccccttgctatcatcagaactggctcagtagaattgcggtggttgctactagtgttattgtatagacaacgtttaaatctttaattttaccattggttgttaagtgcagtttttgttctattaactgtaaagtgggggaaaaacattttctggattttttttttctgcaggttatgatgatggttcttcctttattgatatttgtgcttctgcctaaagtggtcaacacaagtgatcctgacatgagacgggtaagatgatggtccagctatggatttttttttttttaagagatagagcctctgttgctcaagctggaatgcagtggcacaatcagtttgagtggcctcaaactcctgggctcaagctatccacctgcctcagcctcccaaagcactgggattataggtccgaggcaccatgcctggccccacctgtgggtttttgaaccgtattgtgatgtttgctctgtcccatcgtagctgggtagcttagtttttctcaattttattctagttcccaagccaaattaatctagaggttgtattaacatagtatcatgtttatggcttttaattagttgcttccattagactagataaattgttagttctgcctggcctggatctctttatgtagctaaaacatcttactgcatcctagcctctttgtgtgccttactttttaaatagctgaaatgtacaatacttctggtatgctgaatctaaatattttacaaagtgattgttcctgtgatctgcctttactttacaaaactctcttcagagtacatactcagtttatgtgttcagacacacagatagaccaagggggatggataagtagaagagtgacctttgaattctgttccacaaaaccatactggttctgcagagggagaggatttgctaagtaggatgcttccaatttagtgccaccacattttctctttgaatattggcttctatttgaactcttcattttttcaaaaaaccatcatgcatttttccgttcaaccatcaacaagtatcttctgagtttcaaggttccccattttatttagtatatagatgtggtgacattttattcattcctgagtaaacatttatcaatttctagggtctagatactggagatacagaaatgaattataggccatacctgtcatcagtaggctcagtcccagttaaatgtagaaaatagaatggatttatcaaatattcttcttgctatcaggggattttgtgactttttcttttcttttttcttaatagaaatttgtcttatttcttaaagaaataaggtaaataaaaatgtttgctaaggtagtaggtgattatgttctgtggaaggtaataaggggtatattcaaagcaggaatggcagaaaaagattcataggaaaagaaaggtttttgatatttcaaaatgttttattggtgaatgtttgcatttttgcttcagtgttagactgaaagtaatacatcctgtgcattccttgtatatgttaagccaattaactgtggcatcagtagaaggaaacatcagaagtcacatttgattaaaagttcattctggccgggcgcggtggcgcaggcctgtaatcccagcactttgggaggccaaggcaggtggatcacctgaggtcaggagttcacgaccagcctgactaacatggtgaaaccccgtctctactaaatacaaaaaaattagccgggcatggtggcgcatgcctgtaatctgagctacttgggaggctgagacaggagaatcgcttgaaactgggaggcagaggttgcagtgagctgagatcgtgccattgcactccagcctgggcaataagagcaaaactccgttaaaaaaaaaaaaagttcattccttgtgaagtgctttgcacatagtaagcatcttaaaaagttgattcaagagcttcagaagctctcttccttggcactgcctgcagaggtggcaccatctcctacttggcatcatggctgccctcagatcctttgtgaagcccaagatcatcaaaaagacaactaagaggtttatctggcaccagtcagaccaatatgtcaaaatttagcttaactggcagaaacctagaggtgttgacaacagtgttcgtagaagattcaagggccagatcttgatccccaacattggttatgggagcagcaaagaaacaaagtacttactacccagtggcttctggaagttcctggtctacaacatcaaggagctggaagtactgctgatctgcaacaaatgttaccgtgctgagattactcacagtgtttcctccaagaaccacaaaaccatctggaaagagcagcccagctggccatcacagtcactagtcccaatgccaggctccacagtgaggaaaaggaatcaacggctctcatgcatgttttatttgtgtttaaataaaaccacaaaaactgaaaaaaaaaaaaaaaaaaaaggggagcttcagaattgaacagattcaaaaatagagttgatatatgtttgcagggactcaagagctgttaccatatacatttatttcttaattattggggcatgttaacatacttgatttatgtttacaatatttctttcgctagccttatttgtaaaagcaacttctcctttaaaatttaggaatcaattctacctttgtgggaaaagctcaagctaatatcccaacagtgttcaatttgaaatggaagcctagtgctgtgctgtgtgcctatagtcccagctgcccaggaagctgaggcaggaagatcacctgagcactgtctcctaaaaaaaaaaagaaaagaaaaaaatgaaagaaatgatagataatatagtatttgctatctttttcatgtatgaatgaactaaagtcaattttaagttcactttgagaatgtcacttaaaatttaaatgaagcagatgttacattaatattatataactatcaaacagtactttatagatttttggctcaattaaaggggaggacaaatactcaaaagtgccaagtcctatcctgttttgccaatgacttctttgtaacagtgtgttgcttgctttagagtctaattgaagtcatgcaagccatacagcattcatagatttactactgaggcttataaatgaattcttagaaatattgcacttattttccaaactgtactgataccttgatatatagttaaaaattaatattctggttatatgcatctaaaggaagcatgaacttaaaaatgtactcattaaaacaataagaaatcactttaatcagaaaacataaaataagagaggaatatgatcaaatatattcagtatcagaaaaaagtgttctttattaagacaagcagaatcacacgaaagggaacatcacacacagggcctgttgtggggtggggggaggtgggagggatagcattagaagatatacctaatgttaaatgatgagttaatgggtgcagcacaccaacatggcacatgcgtacgtatgtaacaaacctgcacgttgtgcacatgtaccctaaaacttaaagtataataataaaaaaaaaaaaaggcaagcagaatcaaaccctaggcagtcatttattggacatttactaagagtcaaaatgtctagtggtataaaggagatatggaaaatagttactaatgatatataggtgaagtactactgagtatgatgttgcatcattgctcagaaccagtacctttcacttgttctactcctttactttttccttaataggaagtgttaggagttaaaagactcgaaggatcctacatatcattgtgccttgtcttcttgcaggaaatggagcagtcaatgaatatgctgaattccaaccatgagttgcctgatgtttctgagttcatgacaagactcttctcttcaaaatcatctggcaaatctagcagcggcagcagtaaaacaggcaaaagtggggctggcaaaaggaggtagtcaggccgtccagagctggcatttgcacaaacacggcaacactgggtggcatccaagtcttggaaaaccgtgtgaagcaactactataaacttgagtcatcccgacgttgatctcttacaactgtgtatgttaactttttagcacatgttttgtacttggtacacgagaaaacccagctttcatcttttgtctgtatgaggtcaatattgatgtcactgaattaattacagtgtcctatagaaaatgccattaataaattatatgaactactatacattatgtatattaattaaaacatcttaatccaga

SEQ ID NO: 157 - DNA, 32744 bp, Homo sapiens
  source 1..32744: mol_type = other DNA
ggggcgtggccacgtcgaccgcgcgggaccgttaaatttgaaacttggcggctaggggtgtgggcttgaggtggccggtttgttagggagtcgtgtacgtgccttggtcgcttctgtagctccgagggcaggttgcggaagaaagcccaggcggtctgtggcccagaggaaaggcctgcagcaggacgaggacctgagccaggaatgcaggatggcggcggtgaagaaggaagggggtgctctgaggtaggtacgggagaaagctgctgggggctgggcctgagaggacacggcctggtaggtaatagaaggctccgctcggagcagtcgagggggagatcggcaccgtcagaacagaccccaccggagcctccttccttttggagtagaatgccggaggtggaggtgaaaacgcagtggactgagggcacgtgcgaatcctgccgcatccagcttcaaagcgaagaaggctgcgggaccccagcggaacaaagagtttggaagttgcaatgttgtctgtttgtaactcagctcagccacctgctagttgtttgaccttgggcaaatcgtttgtatggaaaatgctgatgttaatgctgccttacgtggttctgggggaattcaaagtatttgttaagtaactgcttccaaataagcgctcaacaaatggcaggtgctatgccaatagcacagagatctgaaagcctttagccaatatcatagagatctaaattatgccaataacatagagatctaaaagcctttttctgcatgtttgcggcttttccttgtattaaaaaaactatattgcagttctaggttggaaatctgtatgtgttttcactgtggtgcccgcaatacctagataagtgctatgtcatgggctctttcattcatgtaacaagtatttttttggctaagctctgagtgcagcaaatatacagacacaaaaatctcaaccctcatgaagcttaagttctggcatgggatgaaggtgggggagtcagacaataaagacaaactgttaggtggagatgtggtcagtactaaaaaaaataataaagcaactgggtgtagtgaatattgggggtggggattggtgcaatttaacttgaacactggagtctcactgaggagatgtcactttggtcaagacttgaaggaatctcaaaagctagaggttctatatctgaggagagtacaaaggctgagggtgagagctaggggaggaagttgcacctggcatgtccaaggccattgtcactggagcagaattaactagaagagtaaaaggatattatgtaaaaatggtgaagatgcagattgtaaggacttagcttttactctagttgtaatcaaaagtcattggaaggttttgagcaaaggaaagacataatctgacttgggtttaaatggggtcactttggctgtagtgttgaatacactaaaggcagcaaaggatggaagcaagggacaccagttaagaggttattgaaataattcagctcaaaagtgagttgagccaggtggaaaacagtggagatgatgataagtggttgatttctgtatatattttgaaggtagaaccagtaggacttgctgactgactgaggggtatgagaagggcatcaaagttggcactaagatttttggcttgggtaactgaagaatgggattgccatttatttgagaaagaggaagactgtgggaggagcaggtctgggaggaagtgggggcagtcttagctcaatttgggatatttaactgagatagtgtaattcactatttttaagagcaagagaagaaagttcagatgaattcaacaaacagggcataatagtgttatatctcgtattagatcatgggcatacaaaaataaatggcatagcccttacctttacagagttcacacaatatagagcaggtcctggtataacatcgtttcgttataatgttgatgagaaaaaaaatcaattcattgcggggctgctgtgtatgtggagttttcatgttttccgcatgtctgcatgggtttccttaggtactccagtttccttctacatcccaaagatgtgcctgttaattggcgtgtctaaatgatcccagtctgaatgggtgtgaatgtgatgctccctgtgatggagtggtgtcctgtccagggttggttcctctctgagttgctgagatgggctctggccaccctcaaccccgaactagaataagtgagttggaaaatgaatgaaggaatgaatacaaattactgtaaaataaaaatctgtaaaggctgggagcggtggctcacacctgtaatcccagcacttcgggaggctgaggcaacaggattgcttaagctcagcggttcaagaccagcctgggcaacatagtaaggcctgtctctatttaaaaagtttatataaagtgtgtatgataatcatataaatgcatgacaataaacaatgccttatgaaagtgcccagcatgcccactatagtgttactatttgttttttgaactttgtggtggtaggaggtacttcttgaaattttcactctcaaacatttattccttgagttaacccaccaacactatgactgcagtcattcactgattcgccaaaaattgggtaaatgattattttttgttttcattaaatgttcttaagtgtacggatagctcacatttatttcaatatttagtattaaaaatgtttgtttcgagtctttattcagaagtttggtgacgtttttgtgaccagaaatatgccataggaacttaacttttgtttatgtcgatcagcctgtggtaaaattggttttgttacatgtcattttgattaaagtcatagtttccaagaagctgtctccaacgagttttcagtgctcatctagactgaagtcacatataactttcactctatttcaaagattagtgccaatgtgtctctctttttgttttaagtccagaggtaatgtctcttagaaatagtcttctatctaaccattgcagggctctgaattgcagaatacgtaatgggaattacctccaaaacgtttcgggggttttctcagtaggcttgctagaattgggtgtgaggatgcagggaattgtgactagtaaactgtgtttgtttgcttctgcttttagctacttatatgtacaaacttcagttttgaatcatcattgaaacatgggacattagtctcacccacactttgctaattttaatgttttttttttgagacagggtcttgctctgttgcccaggctgcagtgcagtggtgtgatcatggctcactgcagcttcgacccctgaacccaagcaatgctcccacctcagtcttctaagtagccacgaccatgggcgtgtaccaccacgcctggctaatttttcactttttgtagagatgggggtcttcctatgttgcccagggtggtgttgaactcctgggctcaagcacttctcctgactcagcctcccaaagtggtaggattacaggcatgagctaccacatccggcactaattttaaattaaactagatgatgcattcaatggtaggcatagaattacttgttgcctttttgtctactttgccaaatttataacacttttgttcccttcttttctttctgccttaagccctattcatttttctttttttttttttttttaaagaaagaggcagggtcttgctatgttgcccaggctggtatcaaactcctggctcaagaaatcctcccacttcggcctcacaaagtggtgggattacaggtgtgagccaccgcacatagccatgccctattcttatagtactgtctacgatatccttgccaagttgtcttctatcaggcaatactgtagccataaacttgaaaaacagctaacaaagaagcttaggcatataataataataataattatgtgtcagtccactatattcaacccaagaccatgaataatcacctttcggaagacatttacaataatctagtgctataatagtcaatgttggtatgagatttacatttgtttccttcttcacagtgaagccatgtccctggagggagatgaatgggaactgagtaaagaaaatgtacaacctttaaggcaagggcggatcatgtccacgcttcagggagcactggcacaagaatctgcctgtaacaatactcttcagcagcagaaacggtgtgtagaatggctgagtctcaacctgtcgtcattcatcctaaatgttgtagataacgtgggtgtggatccatgagagatggcataatgagtacttttcaaaaattggtagtatgagaatctgttctctacctgctttcgtatcacatgacagctatctgaagatgtcctcaggtataattaagaacaagggctataggatttcatttcactgtggtgcagcgaaactctttttatcaatagaaatacattttatacagggggcagtgataagcatagtaaagcaagtattatattgcaatgcttcccaaaagtattatgttaggaacttatttttgagagtatgacaaaaaaagaagtggtctccaaagacatgtaaacctcagaacaattgaatttataccagaaagttctcaataattttaacaaactctggataaataaaagctgaaaaatactcttatgttattcaaatggacctgtggatctcctttaactaatacatgttttgataaatatgctttttaaaaaaaaaggtaaatcagagtatcagtttctaccttcaatctctgacaaaaagaaatactgccattactggcaaaatatcataatttgggattataatgcaatgactattcttattcatctctttggattttttttttttttttaatatgacagggtctccctctatcacccaggttggagtacagtggcctgatttcagctcactgcaacctctgcctcccggttttaagtgattctcccacctcagcctcccaaatagctgggattacaggcgtgcgccgccacgcctgggtaatttttgtatttttagtagagatgggtccttgccatgttggctgtgctggtcttgaactcctgagctcaagtgatccgcccaccttggcatcccaaagtgctgggattacaggcgtaagctaccgcactcagcctcattcatcatattttttcatgttacatgcatcagtagattgctctttttattgctgaataggatttcatttatttattcaccaattgatgaatatttagattcttccagttttgtgctttataaataatgttgctatggacattcttgaacaaggctttttgtagacataattttctctctctctcttttttttttttcttttagagacggagtctcgctctttcggccaggctggagtgcagtggcacgatcttggctcactggaagctctgcctcctgggttcacgccaatctcctgcctcagcctcctgagtagctgggactacaggtgcctgccaccacgcccagctaattttttctattttttagtagagacggggtttcaccgtgttagccaggatggtctcgatctcctgaccttgtgatccacccgcctcagcctcccaaagtgctgggattacaggcgtgagccaccgcgcccagcagtagacataattttcatttcccttggagtggaattgttggaccatagaatagatgtatgtttaactgttgaagaaactggtttaccaaggaggttgtgacattttacatttctaccagcaactcatgagagttcatttgtaccaaatccactccagtatttggtgttgtcgatctttttcgttttagccattctagttttgtggagttgtgtctcattactttgcatttccctggtgactaataatggtgaacgttttttcacatgctttttggccttttgtatatcttcttttgtggtgtatctgtttagatattttgcccagttttcaaattgtgttgtaggggttctttatttacttttcccaggagtatagattcaagtttccctgattcaagtttcaggagcatagattcaagattccctgaatctatgctcctcagtaggggttctttataaagtctctatactagtcttttatcaaatatatgtgttgcaaattttttttccctcacccatggctgtttattttctgggtgtttttttttttttaaactgcttagttttaaattttgatgaagttcaattaattagtatttttcttttatggttagcattttttgtgtcctcttcaggagacttttgcctaccccaaagtgacaaagttactctcttatgttttcttttactagcttcattttagctttttttttttttttttttttttttgagacggagtgttgctcttgttgcccaggctggagcgcaatctcagctcactgcaacctccgcctcccgggttcaagtgattctcctgcctcagcctcctgagtagctgggattacaggcacgcaccaccacgcctggctaattttttgtatttttagtagagatggggtttccccatggccaggctggtcttgaacttctgacctcaggtgatccgcccgcctcggcctcccagagtgctgggattacgggcatgagccactgcgtccagccaagcattattttagcttttatgtttaggtgtatgatttttcttaaatttttccttgtatatggtgtggggttggagtaaacaagtttttttcctctcatatgggttatctttctagttgttctgcctcatttgttagatttttttttttcctttcctcactgaattgcgttggggcccttttcaaaaatcatttgaccacatatgtgtgggttatttctggactctatattctgttccattgatcaaattgtctgtcctttcaccaataaaatacactgttttgattagttttacatagcaagtccagcagagtgagttctacagcttttgttcttttcaaaattgctttagttattcttggtcctttgcctttgcaaacaaagtttgaaatcatcttgtcaatttctagaaaagagcctactgaaaaagaaaaaaaaaaaaaaaggctgggcacggtggctcaagcctgtaatcccagcactttaggaggccgaggcaggcggatcacctgaggtgaggagtttaagaccagcctgaccaacatggagaaaccctgtctcaactaaaaatacaaaattagccgggcgtggtggcgcatgcctgtaatcccagctactcgggaggctgaggtaggagaatcacttgaacctaggaggtggaggttgcagtgagccgagattgtgccattgcactctagcctgggtagcaacagcgaaattccgtctcaaaaaaaaaagaaaaggaaaaagagaaaagaaaagagcctactgggattttgattacattggtttgaatctatagatcaattggtaggattgctgatttttatcagtagtgccttagattttattgttttaccatttctgcagataatctcattatttcacactttaattgccatattagcctcataactgtggtcccttcttctaatgcctggctatccttataaagttgcttgattaatctttctgaaatcttatatttaagatgccctccaattaaagaaccaatagtggctggagtagatggaatccaaagtctttaaatttacatttaaagcatgtgcttcttacttctccaggggtctccatttgctctcggtactgactttatgttatagcttagggttcactcaccttcctttggatgagctcttccaccttcgtaattttattcaatattagtttccctctgtcttgaaaaaactgtttttctttcaaattccatggttctttcagagtctcaccttctgaggctgcttctgtgatacctccttttgacttaaagcctttactatccattcttggcaactgtaatttagtatcctgctttgtattactagttcatttttcatttgtgtactttgtttttcttattagagtataaattcccatgtgtcagggactaattatttttagatcaaacataactgcttatccaatttttattaatcattatccaaattctggcttattacctaattcttcccctctattctaactggtcagtcttaatttggtcttagccctctgcctttcccagctttttatagtcatattttaccctttttttgaggtattctccaaattatttatagtattattcttctctgaccaatgttacccatggaagttttttttgaactttaaaattcttatttatatatttgttcatgtgtgtaaaccctttacatttaagactagtcaacctaataagaaagtactattattatccccattttacaaatgaggaaactgaaaacagagttttaagtagcttgtccgtgttactcagcttgtgattggtggagctgaatttgaatctaggttgtcttgttccagagttcttaactgctgtgtagtattaatactacttttctgtatgttgtcttgaaatttgtttctctaatttctatatattttctctctcttcttatgttaagtagaatcttaattatttctattcttttttttttttttttttttttgagacagagtcttgctttgttgcccaggctggagtgcagtgctgcaatctctgctcactgcagcctctacttccaggttcaagtgctcttcccacctcagcctcccgagtagctgggattacaggtgcttggcaccacacccagctaatttttgtgtttttagtagagatgaggtttcaccatgttgcccaggctggtctcaaacttctaacctcaagtgatccaccccacttggcctcccaaagtgtcgggattacaggcatcagccaccatgcctggcctttttctattctataacaaacccataaactctagtgcaataatttagatcaatattacctacttattacatgaataaaaatggaagtgatacttgttcattggctgttgtcactattgcatatgctaactttttctgtttacatttcagggcatttgaatatgaaattcgattttacactggaaatgaccctctggatgtttgggataggtgggtctttttatttcacaaggacaatagaaacattaacagataagtccttatggccatgtttctcaaattggggtatatggagtgtgtgtcagagtagacagtggtgtcctgggggcacagagatccagaataatcataatatatcttcctgaggtgtttaagattcaagaaatttcaagtttatgatgtacaactttgaactacacccttctatccctatcctcagttttccccagaagcatgtactagagatactttggagaagtttgagggatacaggcttagggtatgtcattgaggacctcaaaagaaacatactttacttctgctaaaatccagaatgggtcttggagcaagaacaaaagtacatgttcaatttaaaatgtgttcttatctttttcctcccatttaggtatatcagctggacagagcagaactatcctcaaggtgggaaggagagtaatatgtcaacgttattagaaagagctgtagaagcactacaaggagaaaaacgatattatagtgatcctcgatttctcaatctctggcttaaattagtaagtctttctcaagtgccatctgagttttaaatattaaactaagagattttctctagaggtatctggtataccaaaaaaaaagtaaaacagccattttgaaccatttagtagattggaaacatttaataaatatgcaatacttcttaaattggttctacttaaaggtggacttaaatatagtataataaggtattttcgcccttttaagattgatcgcaaagtctgtagatctctcagtgagtatggattaataatttattttatattttgaaacaaggtctcactctgtcacccaggctggagtgcagtggctccatcatggctcactgcagtctaaacctcctgggctcaagcaatcctctcgcctcagcctcgtgagtagctgggactacaggtgctgtgccattacgtccagctaattttttaatttttaatagagatgacttctctctctgttacccaggctggtcttgaactcctgagctcaagccatcctcccaccttggcctcccaaagtgctgggattataggcgtgagccaacacccctagtccggattacttatttatttattctaaacataactgggtgcagtgtttcatgtctgtagtcccaacactttgagaggctgaggtgggctgatcgcttcagcccaggagttcaagactagtcagggcaaaattggtgagaccccatctcataaagtacagaaattaaccaggtgtggtggcacagcacctgtagtcccagctactcaggaggctgaggtgggagggtcgcttgagcccgggacgtccagactacagtgagctgagattgcaccactgtccgccagcccaagtgacagagcaagatcctgtctcaaaaaaacaaccaaaacagaaaaacataattgggccattcaactgtactggaggaggaggtgcaggagctaacatttggcagcagtgtggttgtttggggaaaaacttccctctgtgattctggtatccctttcactcctttatgaaagtcatcaacacaaagaagtgatattttagttttttattggtctttggacttttttcacctagtatattgctacagccaaaaatgtctgcctcagctgggcatggtggctcatgcctgtaatcccagcactactttgtactgtcttacttgacatgtaggaaaaacatattttttattaaaaaaatgaccaccgtttgttagacattaatattactgcttttattctaaaataaatttaaaaaaataaacaataaatatttggaattatttacaaccaccacaatatgatgaaatattgacattaaaactgataagatttcttactaaaataaatctcttggcattaaaactgataagatttcttaataaaataaagtaagaaataaatttcttactaaaataaagaaataaatttcttactaaaataaagtaataaagtaagaaataaatttcttactaaaagtaataaagtaagaaataaatttcttactaaaataaagtaataaagtaagaaataaatttcttactaaaataaagtaataaagtaagaaataaatttcttactaaagtcttaaggaggactgattttaaacttccaatacagttgacccttgaacaacacagggcttaggtgtgcccacccctcacccagttgaaagtctgcatataacttttggcccccaaaattattaatagcctactgttgaccagacgccttaccaataacataaagttgatgaacacatagtttgtatgccatatgtattatatctttttttttacaacaatcttagctagagaaaagaaaatgttattaagaaaattataaggaagagaatgtatatttaatagtcattaagtggatgattgtaaagatcttcatcctcgtcttcacattgagtaggctgcggaggaagaaaacgggttcgtcttgctgtctcacgggtggcagagatggaagaaaatctgtatatgtgaacctatgcagttcagacctgtgttgttcaagggtcaactgtagttacaagtatagaaaattaggtaaatcctgaagccatgaggtatcttgatttcctcaggacattcgacaaatatttttacatccttagtgaaaggttggagaaattaccctatggatattagttacagaaacttataatgaagaatggcacccaaagaatgctaaacagatttgttagcctggagtctgtggaccctggtggtgtaacaatggattttgtccttcatttgtcactagcctaaataatatctttacatgtaatttattataagattggagactgggtgtggtggctcccacctgtaatcccagcactttgggaggccaaggtaagtgtatcatctgaggttaggagttcgagaccaacctggccaacatggtgaaacctcatctctactaaaaatacaaaaaatgcaaaaattagccgcacgtggtggtgcgcacatgtaatcccagttactcgggaggctgaggcaggagaatcgcttgaacccaggagacagaggttgcatgaactgagatcatgccactgtactccagcctgggcgacagagcgagactcagtctcagaaaaaaagataaaaaaaaaaaaaaaaaaaaaagattggactagctgcacctctaaagtgacttttaatcccaggattctatgattatatttaattggagttgttaaaagtaacaattaattagaataatttatctgtttatttttgataacctggtgcttgtactgaagaagaataatatcatgaagtaaaaagcataatctagatcagtgctactgaaagaagggtttgcatactgtttgagataagttcaaaaattgaaagtgagcttttggaaactttggtaacaatttgatattgccgggacatccaagcacatcatcattctttgagtaacttctgtttttattgtactttatatcagtccataatggaacacacacatacacacaataaaactggccccttcgccacagattttttgagaagcacgggtatagacaaccatcaaattcaaatgatcagcactagaatgatcagcaataatctgaactttgtatgtggctaacgaggtacatattaaactattgctttttctttgtgggtctggtcaagaggagtaacagatgaattcttcacactactttctttcgctttgcagaaggatttctccagtcagttattttatgtgactcctacagtctagctaaggaaaaaattgtttctggaaaacttctggtatttttatttaaaggtataaaattattttagtttggcaatttaagggttaccaaaaaaaaggtttatttaacttttagatctattaatctaaccatatagtccttttatttatgttatttcttaagtgatcttattcagcactctgaataacctgatctttactggctgtcccacgcacaagaacaccagaaccattcagaaagctctcaaaatagtgaaatcaatgttaagctatatttatgtagtgacagatatcaaagactggatcttatgctggtagcacattcagagttataacttttcttgaaacaccaccacatatgagaaaacatcactaatttaaataagcaagaaaaatccatttactgaattactgcaaaattaaactataaaatactaattatttttgttaaagatataaataaaacattccatttatttagcatttgttgtactagaccatgattaagggctggcatatcatagcaatgtcttctgagtttgtagagcttagtttatctgaaagacaaatatgaagccattaattgtaactgtaacagagagaaaattacgagttctataggaacaaatacaagacggacttaacctgggctagacaattaggaacagataaataggagatatttggtaaagtaacaaatggtagcttctctagtagtaacagaactcctaactagaacattgaaatgctatttttgaccaggcatggtggctcacacctgtaatcccagcactttgggaggccgaggtgggtggatcaccaggtcaagagatggagaccatcctggccaatatggtgaaaccccatctctactaaaaatacaaaaattagccagccgtggtggcgggcgcctatagtcccagctactcgggaggctgaggcaggaggatcacttgaacctgggaggcggaagttgcagtgaggcgagatcgcgccgctgcactccagcctgggcgacagagtgagactctgtctcaaaaaaaaggaaaaaaaatgctatttttatgtgaatttagggattgtttttaatagcttctaatgctgattagagtctggtggaatgagtatttttgcgaattattaaattttagcattaacaatttttacaaccttctcagaaagcaatttgttaccttttaacatagttctaggaatttctcttaagggaataatgtaaaatgtgaaaggttgtatgcatgaagttattttttatagaattatttataattgggcaaaattagaagttgtttaaatatccagaagtagatgaacaattaaattatggaagctctattagatgaaacatgatgcattcatttaaaaataatagtgaaaagaattcgaggttgcagtgagctatgattgcgtcactgcagtccagcctgggcaacagagcaagaccttgtctgtagaaataaaaaaaaattaaaaataatggttaagtgtaagcagcagcgtggaaaagtgaatgatgcagtattatagtggaataaaagcaaattttattatgatcaaaactttataagataatacatatcctttcatccttaagggaaaaaagactgaaaaaatttatcaaaatgtttgtgatgtgaggtttttagtgatattttcctccctcttgctaatagaattatctacattgtatatggtctcataatgtcccttctaaaacacagatttgactatgtcattcctttgcttatcgctcacccaccctaacacatacaacaattactattaggcagattcaaaattgattagcttgatattcaagacctatcacagcctttttctccagacaactatctagcctggacccctacataacttttaattttctgtatctttgcttatgctattttctctggctgaaatacccttcccttcccattttccacctgataaaagtccatttctccttcagggctaagctcaaatgttaaccccttcctcccccctttttttaattttctttagagacagggtctcactctgtcacccaggctagaatgcagtggcaccatcatagttcactgcagcctcaaactcttgggctcaagtgattctcctgccccagcctcctgggtagctaggactacaggcgccttccaccatgcccagctaaagttttaaattttgttgtagagacagggtcttgttatgttgcccaggcttgtctcaaactcctaacctcaagcgatcctcctactcctacctcggcctcacaaagtgctgtaattacaggcagaagcgactgcacctggcttattactccttcttgaagcctttactctccaactcttcttacaaatcgctcagttttgcctcttttttaggtcctcccagtatggtccttatcacattgtaataatagatttttttttcaatacaggaattgcatgtagtatctccagtgattgtttggcaactaataggcattcaatacgtgagtagaaattggttaactgttaacacttctgttacaggggcgtttatgcaatgagcctttggatatgtacagttacttgcacaaccaagggattggtgtttcacttgctcagttctatatctcatgggcagaagaatatgaagctagagaaaactttaggaaagcagatgcgatatttcaggaagggattcaacagaaggctgaaccactagaaagactacagtcccagcaccggtaaactttctttggagcttgtcttaactctaaaaataatagaaataaattatctcttttttgcatctgaataaagtgctttctggtggattggcatgttaagtttacttagttactattcaatttttttaaagatatattttaaaaattttatttatcatagagtaaaatccactctttggtatatggtactaggagtaaaaagacttgtgatcatcatcattaacaagatacagaataatttcacaccccccaaaagaattccctttgtaattagtacctatgctgaacccaaacccctggcaaacactgatttattctccagcctgtggttttgccttttccagactgccatataaatggaatcgtataatatatagccttttgagtttggcctgtttgatttagcataatgcatttgagttgtaaaagttctttatagattgtaagtataagcctttgtcagatatgtgatttgaaaatattttctctcagcttaagcctggtctgttcattttcttaactgtcttttttagaacagaagtttttaattttaaagaagtctaatttacaagtttttcttgtatggatcgtgcttttgatgttgtgtctgagaattttttgtctagccaaagattgttacagagattttcatcttcaagttttcatcttcaagttttataatttcactttttacatttagatccctgatccattttgagttaatttttgtagaggatagaggttaaggttcttttttagcatattaatgttcatttgttccaatgccaattgttgaaaagactaacctttctccattgaattgcctttataccttgatttttaaaaaatcagttgatcatattcatgtaggtttatttctattattctattttttctaccgatgtacgtgtctatccattagtgtttaccatgctatctagattactataccttttatagtaagtctagaaatcagataaaatgagtcctctaactttattcttatatttaactctggtagttcatttgactttctatataagttttagaatcagctttctgggattttgattaggattatacaggaatatggtataattctccatttatttaggcttttttttttttaagtaaactttggtagatttttgtctttcaaggaattgatccattcatccaagttaatgagtttgtgggcatagagttgttcataatattcccttattatgcttttaatgtctgtaggttatatagtgattctccctttctcctgatactggtaatttatgtcttctcagtctggcttggatatcaattttactgattgttttagaaaaccagcttttgggttcatttcattgattttttttttttttctcttaatgattttctgttcttaattttatttctgcactttatttcttcccgcttgctttggatataacttgctcttctttttgtagtttaaggtgaaagcctagatcactgattctagacctttctctttttctaatataagcatttaatgctctaaattcccttctaagcactgctttagttgtatcccacaagttgtgatatactgtattttcattttaatttagttcaaaatattttctagcttaccccgtgtcttccttttgacccatgagttacttagaagtgtattacttcagttaggaagtgtttttggatttttcagatatctctgttattgatatctagtttaattccatagtggtcagagaacataaggtatatggtttcaagtcttaaatttgttaaggtttgttttatcacccagattatggtttatcttggtgaatgcttcatgtacacttgaaaaatatgtgtattctgttttttagagtgtaatattctgtaaatataatttagggcaagttgactggtagtctgttctggtcttctgtatcattgatgactttctgtctacttgttatatcaattactaagaagggttttgaagcctctttgtgattttgtctatttcttttagtcccatcagttttgcctaatatattttgaagttcttttagatgcataaacatttagaattgacccctgtatcattatataatgtctccctttatccctgataatactccttattcagaagtctacctggtctgatattagtacagctattccagcttcctttttgtttgcatgatacatcttttccctttctttactttttaaaaaccacattaaaaaaaaaccactcttagagttgtataatcatcattacaatctaattttagaacatttttaacaccctaaaatgaaccccatgcccattagcagtcactctccattcctacttacctcgctcctaggcaaccactactctgctttttgtctctatggatttgcttattctggacattttagttaaatggaatcctacaatacatggtcttttgtgattggcttcttttacttagcatactatttcctttttttttttccagggagggaagggtggaacagggattttcagcatactgttttcaaggttcatcataaatgaacatagttgtgacatgtatcagtactttattcctgtttattgccgaatgatattccatcatatgaatattatttatccattcatcagttagtgaacatttaggttgtttgcaccttctggctattacaaaataatactgttatatttgcgtaacaggtttttgtgtcattttctttttacccttttgttaagctagttgaatttagcagtggagggttatataccaactttagtgacacttatgttaattagcttctttaacttttaacctatgtctttatattttttaagtgggtttcttatacacagcaaatagttgggtcttgttttttctgtgaactctaacaatatcttttttgttatgttgagaccatttaatagaatttttaatattgttgggtttaggtctactattttattatttgttccatgccttttgttcctcttcagcctctttcctaccttcttttggattatctgagtgttttttagtatttcattttaatttgtgttattggctttttgcctcttacaactttaagtggttgctataaggtatataatatacctaaactttcacattctacttaatgttttaccatttaaagtaaaatacagaagctttataaccataaaagttcctttatattccctacccttttggtatacttgtcataggtattacatctatatgcattgaaaaccccaccagacaatattttgttttgctttcaaaagccatatatatatatatatatatatctcttaaataacttaggaaaatagtctgttgtgtttacccttttttttgttgttgttttttcttcattcctgaagctccaagttcccttctagtatcatttcccttcagtctgaagaacttcttttagccactttcttttagagcaggtccgttgtcaattaattctcctagtttttcttcatctgagaatgtcttcatttcatcttctttcctgaaaaatatttttactggatatagaattctgggtcaacgtttcgtttcttttttttttttttttttttgagatggagtcttgctctgtcacccaggctggagtgcaatggatggcacgatttcagctcactgcaacccccacctcccaggctcaagtgattctcttgcctcagcctcccgagtagctgagtagctgggactataggcatgcgccaccacacccggctaatttttgtagttttagaagagatggggtttcatcacattggccaggctggtctcaaactcctgacctcaaatggtctgcccaccttggcctcccaaagtgctgggattacaggcatgagccactgtacccagccaacatttcttttctttcaccactttaatgatgttatcccactgtcttctggcctccttggtttcttttttctttttctttttttttttttttttttttttttgagacggagtctcgctctgtcgtccgggctacagtgcagtggcgcaatctcggctcactgcaagctccgcctcctgggattacgccattctcctgcctcagcctcccgagtagctgggactacaggtgcctgccaccacggctggctaatttttgtatttttagtagagatggggtttcaccatgttagccaggatggtctcaatctcctgatctcgtgatgagcctgcttcggcctcccaaagtgctgggattgcaggcatgagccactgcgcccggccctctctggtttctaataagaaatctgtagtcatttagtagttcctgacctatacataatgtgttgattttcctctggccttgtccaagattttttcttgtttagttttggttttcagaagtttgattgtgatgtgtctagatgtgatttttttttttttttttagacagagtctagctctgttgcctaggctggagtgcagtggcacgatctcagctcacagcaacctccacctcccgggttcaagtgatcctcctgcctcagcctcctgagtagctgggattacaggcatgcgccaccatacccagctaattttctatttttagtagagatggggtttctccatgttggtcaggctggtctccaactcccaatctcaggtgatccacccgcctcggcctcccaaagtgctgggattacaggcgtgaaccaccacgcctggcctagatgtggttttctttacatttaatctgggcttcactgggccttttgaatttgtaaatgtatgcctttcacaaaatttgacaagttttcagccgttatttttaaaatgattttttatacctattatctctttcttctttctctctctgagacttcagttgcacaaattttagaccatttcccccgactctgctaccaataatctgtccaaattaaaccttttgatatcattccataggtccctgaagctctgtttaaccatttttctttttgtttttcagattggcccatttttattgctctgtcttcaggttcacttattcttttctcttccatctccatcctgctattgaaaccattcaacataaattttttatttcagatactgtatttttcaattctaaaatttctgtttcattcttttttataatttctgtttctctgttgagaatttctgtctctccattcatttcaaatgtttttaccttcatctcatggaacatagttatattaggtactttaaaatctccaggctgggcacagtggctcacgcctgtaatcccaacacgctgggaggccaaggcgggggaatcacttgaggtcagcagtttgagaccagcctggccaatatggtgaaactctgtctctactaaaaatgcaaaaattagctgtgcatggttgtgggtgcctgcaatctcagctactcgggaggctgaagcaggagaatcgcttgaacccaggaggcagaggttgtagtgagccgagattgtgccactgtactccagcttgggtgacagaatgagactccatctcaaaaaacaaaataaaatctccatctgaaaactataccatctgggtcattttatgtttgcatttgcttattgttttttcctttgaaagttggtcacatttttctagttctttgtgtgtcaagtaattcttgtaccctggacatttatcctgaccatatgttataagactctgatcctgttggccaatattccctggagaatatctatgtttttgtcttagtagacaaccacacttcagatattacaagttctttgtcatcttgtgtggctgttggttccactgtcagttcagttttcaagacctttgctgtgttgctttgggtctgtcccatgcatgtcctgcttaagggttaatctggggcttgggcagtggtttatatcattgttcagttctcaaagccttttctgtgctgctttgaatctaccctgtgcatgcatagctcaagagggaacctaagatgtatgccaattcacatacagaattaggagatcctcttgttcagctcattcctttgcagttctcctcccatattctttggccttcagagtcctcttttcccagtcctcaggccagaaagatggggtttctctgagttttacattcacataccaccactgcaacagttcaaaaccacaagagaaaatagaagaataaaaaaacaggaaacaatcctgcgtgggttgtttcttcaagttttgacccctctccacagtctgcttgcttttgttgacttttcagagccctcagttagttgctttttttgtatatggtctatagtttttaattcctatcagtgagagaaagagaaaaggtacagtgggcatactccatcttggccaacacctgcaatttattctgggttttttggggttttttttacccttatgataatactttttaaggctagttaaatgaagcagtggtaggaatggagaatctcttctgataatacttaaaactgtggcagcagcataggaagtttacttttcaaacttctgccagctttgctaaagtacaatgtcatgtcatatgcaacttcatttcatataggtcaggagaaaccgtatatgtgtgtgcgtgcacgtgcgcgcatgcatgtgtatagaaaaagagacacagtgataaaatagatgtggcacagtgttaacaattggtgggtcaagttttctaataaaaagttagtgggaaaactctaatcttaataaactctgtgatcttagtcttaataaccctaacctgatcctcagatcaacttaatggtgattttcagaataatttaaattggtcaaacttgggcatttaaagggagagttaaataattctagccaaaacttttcatgatcttaaggtgactctctttacttctgagagaataaacatgttctttgggatatttctgcattcttcccccagcctgctcttctaatttgtttactttaacaaattggaaattttgagtctggtaaaatagtggtcacctcactaaaagttgtgcattctgctactttagacaattccaagctcgagtgtctcggcaaactctgttggcacttgagaaagaagaagaggaggaagtttttgagtcttctgtaccacaacgaagcacactagctgaactaaagagcaaagggaaaaagacagcaagagctccaatcatccgtgtaggaggtgctctcaagggtaagtttgttaaacgttatttcggaaaactgttagtttctagtggtaaaatcatgtaagaagataatacataaatatacctgtggacacttctagtttgctgaatactgagtagcaaaaagaaggaagtcaaaggagagctaatattacagtgtgcagtaaaatcaaaatgcatcagtaattttgtgtcttaattaagaaagacctaacatttaggaagcatcaagattttctgagtttgaattgttagttgaaagaagatatgtagtaacatagcaggtgttgttaaagtgaagcttacatataccaaagcctcagagaatgatactaatatggttaagaaccctgccttcagagccctttgggaccagaaattagactctctatatacccaaagatcagcaataattttttttaattaacatggactttttttttttttgagagataggttctcgctctgttgcctgaaacgtggtagtgcaatcatagctcaccgcagcttcaaactcctaggctcaagcagttcttttgcctcagcctcccaagtagctaggattataggtgtgagccactgcatctggacaacactgactattttttagagtagttttaggttcatagcaaaattgagcagaaggtacagagaataataagcttttatttactaaatttatagcagttagacatgtaaaccaggctgtttttttaatctcttatttctttcctggtatcaatttatcaataatcagaatgttacttggtggttctagaattaggatatagggagtgtatggtcccaaaggctatttcatccagatcatgatgaagcttggttaataaccagccccacaacagagaaaacccctaataaatgggttaattttgtattctctagttccagtatatctctgctgatttccattgagagaaaatttaaaactgaagaataaaacttaggttagtttctgataaaactagataatgttataatgatgactgaaggaagatgcagaatgtcttttttggaaatttgtgaataaaagatgtggggtgactggaggagggaaaagaaggcagaatataagtaacaaagaatggataaaacgattctatttttgatttattaatttttttaaagattatttttaaaatttctttttttttttctgttgtagtggaaatactgtccttgagttgaggaagaataggtatactttatctggcatctaagttaataatgaaacattttacatgaggttttaatatttttgctcctagctccaagccagaacagaggactccaaaatccatttcctcaacagatgcaaaataatagtagaattactgtttttgatgaaaatgctgatgaggcttctacagcagagttgtctaagcctacagtccagccatggatagcaccccccatgcccagggccaaagagaatgagctgcaagcaggcccttggaacacaggcaggtccttggaacacagggtaaggactcttagatccagtgctttgctgacacaacaaagacttcacatttagggtagagaagtatttttaccatctcttttaattcctcttgaatatttagccatggtctatatatgctgtctgagaacataaaactatggtaattttagttttcttcttcatctccagcctcgtggcaatacagcttcactgatagctgtacccgctgtgcttcccagtttcactccatatgtggaagagactgcacgacagccagttatgtgagtgtggtttttggatattttgaagtgggaattattaagggtgggcagaggcacctattctacttcccaaaggcagtttcttctttatgaagatgaaagtaaccaggccaggcgcagtagctcacacctgtaatcccagcacaggctgaggcaggaggatcccttgagcctaggtgttcaagaccagcctgggcagcctagtgagaccctgtctctatttattaaaaaaaaaagtaaccagacaaaattttgtatatcctttatgtttgtattcctttgagtatgttagggttaaaagaccatttgttaatattttattaaggaataaacattaattaggtttatattttcattactgaacattgctttaggaaaatcaatggtggctattctggaagatggattgaacatacataaataagctattggaatagttcaggcaaggatattaaggggcggtatttgggcagggtagtggtaatgaaaggagaagggagcttggatgggagaggcttcagcagtagagttagaagatttgtctgatgggataatggggatgtagggaaaagataatgtgatttaaatgagacgttctcattttgtcattgatagtaatgagaaattatgatagttttccctcttatcctgctttttccttctggacatatttttcctctttcttcctaatccttagcatttctgtttttaagaaaaagtatagtagctggtggttaaataaacaagccagcctgagatttagtctaatgcttaacattgcctagttctttttttttttttttttttttttttgagatggagtctcgctgtgtcgcccaggctggagtgtggagtgcagtggtgcgatctgggctcactggaagctctgcctcccaggttcacgccattctcctgccttagcctcccaagtagctggaactacaggcatctgccaccacgcccagctaatttttttttttttttagtggacacggggtttcaccgtgttagccaggatggtctcgatctcctgacctagtgatccgcccgccttggcctcccaaagtgctggaattacaggcgtgagccactgcgcccagccctagtcctaatactaggttgaattctgtcccagtgcaagagttacctcataactaatttataactcccactacatgctaggaatgcaaaaataataattaagattttgagcaaaaattctgcctaagtgctcaggacaaggggaaggctattttttttctttttttttttttctttttaaacagagtcttgctctgttgcccagcaggctgaagtgcagtggcaccatctcagctcaccgcaacctcgacctcctggttcaacgggcatggcagcccacgtttgccatcccagcactttgggaggccaaggtaggagaatcactccaggccaggagttcgagaccagcctgggcaacatagcaaaaacctgaccctacaaaacaaatttttttttttttgagacggagtcttgctctgttgcccaggctggagtgcagtggcatgatctcagctcactgcaagctctacctcccaggttcacgccattctcctgcctcagcctcctgagtatctgggactacaggcgcctgccaccacgcctggctaattttttctattttttagtagagacgggatttcaccgtgttagccaggatggtctcgatctcctgacctcatgatccgcccacctcagcctcccaaagtgctgggattacagatgtgagccaccgcacccggtcaacaatttttttttaattagctgggtatggtggtgggtgcctgtagtcctaactactcgagtggctgaagcaggaggatcacttgagcccaagaatttgaagctacagtaagctatgatcatgccacagcactccagcctgggcaacagggcaagaacctatctctaaaaaataaatcaattataataataaagaaaaatcagcttggcatcgtggctcatgcctgtaatttcagcactttgggaggctgaggtgaaaggatcgcttgagcccaggagttcaagaccagcctgggcaacacagggagaccctgtctccacaaaaaatttaaaaattagccaagtgcagtggcttgcacctgtggtcccagctacttgggaggctagggatcacttgagcccaggagtttgtggctacggtgagctgtgactgcaccactgcactctagcctgagtacagagtgagaccttgtctcaaaaataaataacgaaaataaaaaagaaaatcctatgagcctttatagaaatggataacatacatttgtagatgtctggtttttctaatgtttcaagtcattttgtagaaacatgacttatgttaaaattaatatggtacaggaaatattaaacttattatttttgagacggagtctcactctgttgcccaggctggagtgcagtggtgcaatcttggctcactgcaacctccacctcctaagttcaagcaattctcctgcctcagcctcctgagtagctgggattacaggttcgggccaccacgcccggctgatttttgtatttttagtagagacagggtttcaccatgttggtcaggctggtctcgaactgacctcgtgatctgcctgtctcggcctcccaaagtgctgggattacaggcatgagccaccatgcccgacctaaacttatttttattttaaattcttttccatggatgttttatttgacctctccacacatttttctttaggttgcgttttgcttagtgatgtatagaagctcttcatagatgaagaaaatcagctaaaaatctataatacgagttgcaaatattttccccctactttgtccttgtcttttggcttcatgtagcagtaaccattatgcttttaattatcatacagtcaaatttaagttttctttttttttttttttttcgagacagagtcttgctctgttacccaggctggagtgcagtggcgccgtctcagctcactgtaacctccgcctcccgggttcaagcaattctcctgcctcagccacccgagtagctggcattatagacgcccgccacgacgcccagctaatttttgtatttttagtagagccatggtttcaccatattggccaggctggtctcgaactcctgacctcgagatctgcccgccttagcctcccaaagtgccgggattacaggcatgagccactgcactcagccttttaaagcttttttttctttttttttctaaacttcatcgaaatataattccgtggcttttagtatgttcacagagttgtgcaacccttaccacaatcaattttagagcatttttatcactccagaaagaaccttgtacccatacctgtaagactcgattccccaccattaccccaatccccaccctagcaaccaactgtttttttctctatagataatttaccaattctagacatctcgtgtaaataatataatatgtggtctttgtttttttttgtttgtttgttttttgtgttttagacagagtcttgctctgtcgcccaggctggagtacattggtgcaatctctgctcactgcaaccttcgcctctccagttcaagcatttctcctgtctcagccttctgagtatctgggactacaggcatgtgccaccactcctggctaacttttgtattttcagtaaagacaggctttcaccacgttggccaggctggtctcaaactcctgacctcaagtggtccgcccacctcggcttcccagaccgctgggattataggcgtgagccactgcgtccaggcagtgtatggtcttttctaactggtttctttcacttagggtagtgttttcaaggttcatccacgttgtgacatgtatcagtacttcattattttttattgccaagtagtattccgttgtgtggcttcacaacattttatttaaccattcatcagttgatacaaattttaattgttttcattttttggctattatggataatgctgctgtgaataccgtgtatacatttttgtgtggacatgtgttttcgtttttcttggctgtatacctaggagaggaattgctggatcgtgtgattaactccatgtttaatattttgaggaactgtcaaattgttttccaaaaaagctgtaccattttaccttctcacattcccctaatgtacgagtactccaattccttcccaacacttgttattatgcttttttggttattgtcattctaacagagatgtgaagtggtatttcgctggttttgatttgcattttcctggtgactaatgatgttgagcctattttcataggtttattggccttttgtatatcttctttggagaaatgactgtttaaatccttggcctatttttcctttggattacagtagtccctccttatctgtaggggatacgttccaagactccagtggatgcccgaaacttgatagtaccaaaccatttatatactatgttttatcttatacatgcactgtggccataacttttgcagtttgaggtatgacagcaaaactaactttttttccttcttcacaatttcactgatagaagattcattcttactgtaaatcttatcaacttcagcatgtgatttattttttatttttattttattttttttagtgaaagttgaggctgggcatggtggctgatgcctttaatctcagcactttggctctgggaggctggggcaggaggattgcttgagaccaggagttcaagaccagcctgagcaatatagtgagaccccatctctactaaaaataaaaatacactggctgggcatagtggcacatgcctatggtttccgttactatggaggatgaggtgggaggattgtttgtgcccaggagtctacggctgcagtgagccagggtcacgccactgtactccaccctaggcaacagattcagatcctgtctctaaaaataaaataaaacaataaaataaaagttaagaactttcacctttggcatatccaaatcatcagcatcgctactcttgtgctttggggccattattaagtataataagggttacttgaacacaagaactgcaatgctgggacagctgatctgatacgagtcagctgctaagtgactaatatgtggatgctgaacaaaaggatgattcacatcctaggtggaacaaaatgggaatatatgggatttcatcaggatagtcagaacgccttgtaatttttttttttttttttgagaccgagtctcactctgttgcccattctggagtgcagtagtgccatcgtggctcactgcaacctcagcttcccgggttcaaccgattcttgtacctcagcctcccaagtagctgagattacaggcttgtgccatcacacccaggtaatttttgtgtttttagtagagacggggtttcgccatattgcccaggctggtctcgaactcttgggctcaagtgatccacccgactcagcatcccaaaatgctgggattacaggcatgagccactgcgcctggccagaatgacttgtaatttaaaactgatgaattatttctggaatttttcacttaatatttttggaccaccattgaccatagataactgaaactgctgaaaatgaaaccatgagtaaggggaaactactctatttggttttttattgttgagtttaagagtcttttatgtattctagatacaacttcttttcggatacatgatttgcaaatattttctcccattctgggttgtcattttattttctcaatgatctcttttgaagaccaaaagttatttaaaattttgatgaaatgcaatttatctgttttttaaaattttgtccctgagctttcactgtcatatctaagaaggctctgactaatccaaagtcatgaagatttgcttttatacattttcttctaggagttttatagttttagctcttatatttaggtctgtgatccattcttagctaatttttgtgtatggtataaggaaggagtccaaattcatttttcttcatgtggatatccagtggtcccagcaccacttgttgaagactactcttttgctattgaatggtcttggcactcttgttgaaatatcagttgaccaaaatgtatgaatttatttctagactcttaattctattccattgatctttttgtctatccttatgtcaataccacacagtcttttttttttcccctacacgatctcgattactgcagatttgtagtaacttttgaaattgagaaggatgaatccaactttgttcctctttttaaagattgttttgactattctgattctcttgtaattccttatacattttaagattagcctgtcaatttctgcagaaaagccagctggaattttgatagtgattctgttgaatctgtaggttaatttaatgatattgacatcttaaaaatattaagtcttctggtccatgaacataggatgtctttccagttatgtatgtctttgaattctttcagtgttttgtaggtttcagaatacaagttttgcacttctttttctttaattaatagactttattttttagggcagtgttagctttgcagaaaaatggagtagaaagtacagagagttcccacatactccatccccacccctcaaccctgtacacagtttttcctattactaacatcatgcatgagtgtggtacatttgttataattgatgaaccaatattgatacattattattggttaaagttctttgtttacattaggattcactctaatgtgttttacagttctgtgtgttttaacaaatacataatattatctatccatcattacggtgtcattcagaattgtttcattgtcccagaaatcccctttgctccatttgttcatccctttctctctctccccaaatcccctgtaactattgatcttttcattgtctttatagttctgccctttccagaaaatcatgtagctggaatcatagtatatgtagccttttcaatctggctccttccacttaacaataaggttcctctgcatcttcttctgacacaatacctcatttatagtgctgaatgatattccattgtatagatgtgccacgatttgtttatccattcgcccacaggaggtcattttggtgacttacaagttttagcaattatgaataaggttgcggtagacattcatgtgcaggtttgtttgttttaaatagtcttgttctttcacctacgctggagtacagtagcatgatcctggctcactgcagtcctgactcctggactcaagtgatcctcccacctcatcctccctagtagctgggactacaggtgcatgccaccatggctggcttattattttttttttttaaagatggggtctcactgtgttgcccagcctggtcttgaactcctgggatcaagtgatcttcctgcgtcagcctcccagagcactgggattacaagcatgagtcaccacacccagccaggttttggtgcagacataagttttcaactcatttggctggattgtataataagactaattttagccttgtaggaaagtgccaagttatttttcaaagtagctatactgttttgcattcctaccacccatcaatgagagcttctattgttccacatccttggcagcattcagtgttgtcaatattttagattttaaccactctaataggtgtgcagcagtatcttattgttttaatttgcaattccttaatgacatctgggaagcatcttttcatatgcttactatcatctttttttttttttatatgcttattaccacttttttttttttttttttttttttcccttagagacagtgtctcactctgttgcccaggctgggctcaagcaatcctcctgccttatccatcctggtagttgggactataggtgcatgacaccatgcctggctaattttttttttgaagacagggtctcagccgggcgtggtggctcatgcttgtaatcccagtactttggaaggtgaggcaggtggatcatgaggtcaggagttcgccaacatggcaaaaccccatctctactaaaaatacaaaaattagctggg

SEQ ID NO: 158 - DNA, 32744 bp, Homo sapiens
  source 1..32744: mol_type = other DNA
gatttgaatacttcactgaggcgagccgggcgttgtgagcggactgctagaggcggctgtctgtttccgctctaaggaaactcagagcgtgtggaccccaaacaagtctgcgcaaaatttgtcgaggaggtttgccgcggcaggtaaagagaatgactctttcgttctgggcttcagggaaggcttcgggttttgtctgggcgccctgaagttcctgcggtgggaggtagggtacgctccctcagcctggcggcctccgttagcgccgggccgagtagacgcccctgccccgggccgggcacactgtgccctttttcccctcctcggcctgtacgttgtgccgcctcccgcttccctaacacttctccgcctgcacctcggcccctccggccacccggctcgggttgcttgtccgtcgctctcttggcgtcctcttccgccccgccctgccgtcctctgtcagggctcgcggactcttcttgcacccctgccgctcttccctagggacctctcggctgtttgtatttctcacttaagctttttttggctctaaatgaagtgacagcaatgagtgattttaaaattctcagctcttcgtggtttaaggtgtctgctcggagtgctggccgcacgtaacagatttttcgttttctgcaagtataataaccttaacaaatgaagtcaatattagtactgcgcaaattagtttttaaaaatcctcttctgttcattattcctcaggatttaagcccttattcttcacgtttatttaaatactcaagtttgagggaggaaaaagtattgccgattggaattttacagataggtttaataggcattaacagataaaggatgtggatgaagaccaaagcagaagcttattccagtctagatattaaaattgatgttttcacttccgtcgaatcctgtagatatttattgggttccttatcctgtgatagggccggggacagatgattcccaaacctagaggggtttacaaagggaaataactaatatacacaaataactagaatacaagacagaatgtaaaagattataggacattctaaagtggtgtgggagcacggaaaagggagagcttatttgatgcttttggtgatggatttgtggagaagaccgcatttgaggtggacgttggttggagagatgatttacagatgggagttaatatgtggtaaaattttggtaattaaaggttagggtcaaagcagtataattcttgactttgcgaatggctggaaatctttacaagatgataaatacatgtaaattgaattaaaatgtttggaatggtagtattaatgatgtgttcgatgttaaataatagactgtaaaagatactgactctagatattgccagtaaagcagtgctgtccaacagggcttcctgtgaaaatggtaatgttttatatgtgcactccaacatactacccattagcgacatgggactatggagcacttgaaatgtcattattgtgaccaaagaactgattattaaattttattttattttcattaatttaaatgtaaataactactatattggacagcacaggtctagagtctctgtcatttcactcttatcctcctacaatcccggaaaatactaactctagatatcggtcgtataaatgtaggagtgggcaaagagccagatagtaaatatttcaggctttgcaggctacatggtctttgtcacatattctttgtttagttgttattgcttgccttgttttctacaatccattaaaagggtaaaaaaacactcttagctcaaaggctaattgggctcagtcgctgtttgaggacctacggattatttagagtagtggttcccaaattttcttgatgcatggcaccctgagatcaaagaaatacctaacagtctatttattgagtacagtggttgggtccaaacattaagtatatatgtcccaaacttagtagccatttaaaaaaatacagaaattgaaggaaaatatgatattttaaattttatttatttatttattcttttttgtgagacggagtctcgctctgtcacccaggctggagtgcagtggtgctatcttggctcactgcagcctccgcctcctgggttcaaatgattctcctgcctcagcttccgcagtaactgggattataggcacccgccaccatgcgcagccaatttttatatttttaagtagacacggggtttcaccacgttggccaggctggtctcgaactcttgacctcgggatccgcctgccttggcctcccaaagtcctgggattacaggtgtgagccactgtgcctggccaaaattttattattaaataatcacacttactgattggatatctgtgcctgttggacactgcacaacttctgaaactttggaatcagtttataccctgtcaccctcatttcctgtagtactttaataaaaaatacttgcttttgggccgggcacggtggctcacacctgtaatcccagcactttgggaggccgaggcaggcagatcacctgagatcaggagtttgagaccagcctgaccaacatgcagaaactgcgtctctactaaaaatacaaaattagccaagcgtggtggcgcatgcctgtaatcccagctacttgggaggctgaggcaggagaatcacttgaacctgggaggcagaggttgcagtgagccaagattgcgccattgtactccagcctgggcaacaagagtgaaactccatctcaaaaaaaaaaaaaaaaaaaaaggtacttgctttttatcacagcaactgcaaacagtttatctttacagtgatgttattaaaactaatgtaatgcaaatgtactgttttgatctagtagttcacacagtacctgacaggtgttcagaactgctgtgcatctctcaaaatttttaaatatcccaggacaccattgtgagtatgctgcagcacccttgggtgccaggtacacagtttggaatcagtaacttttttgtttttttttcttttcgagacagagtctcactcactgtgttgcccaggccagaatgcagtggtgccatctcagttcactgcaatctctacctcctgggttcaggggattctcctgcttcagcctcccaagtacctgggattacaggaacacgcttccatgcctagctaatttttttgccctgctaatttttttgtaattttagtagagacagaggtttcaccatgttgtccaggctggtcttgaactcctggcctcaagtgatccacccacctcggcctcccaaagtgctgagattacaggcttgagccatcgcaccaggccccgggaaccagtaacttaatgtgtcaataatcaagagtttggccgtaccagtgttttataaatgaggcttaacttgtgagtctggagtctcctatttgtgttgaaagtggaacttaacagttacagaatattttaaaagggggacttcagtaagtttgaattttatcagttaattgctaactgattggtctacagattggacaggaattatgcttaatgactgttttaaacaacaaagatatttaggtgatcttgagttgatagtagttattatctgtgaattttgaacatgtgcactgaatttgaaaatatttcccctgggcgcggtggctcacgcctgtcatcccagcactttgggaggccgaggcgggcagatcactaggtgaagagttcgagaccagcctgaccaacatggtgaaaacccgtctctactaaaagtacaaaaattagctgggcgtggtggcaggcgcctggaatcccagctactctggcgggtgaggcaggaaggagaatcacttgaacccaggatggggatgttgtggtgagctgagatggcaccattgctctctagcctgggcaacaagagggaaactccgtctcaaaaaaaaaaaaagaaaaagaaaaaaaaagaaaatatttccaaaggagaaaaaatatgcgagttggtggtcaaataattgtttcttaattactcattcagcaaatgtttattgaggctgggcctgctggcttataccggtaatcccaacactttgggagcagagctggaaggattgcttgaggccaggagctcatgacaagcctgggcagcctagtagactccagctctacaaaaaataaaaataaaaaaattagccaggaatggtggcaggtgcctgtaaccccagctcctcaagaggcttgaggattacttgagcctaagagtttgagactgcagtaagcctagatcacaccactgcactccagcctggacaacagagcaagaccctgtctccctgccccctccggccccccaaaaaaaacaaaaaaatgagtgggttggggatattggggatatatattggaaatcgaattagatgttggattgaatagaagtaaatggctgtcatactttttggatcttggaaagttttcaaagtttaactattaagttgatctttcctattagttttttgaatatatactgttaacttaccttctatttctcgtttgctgtattaaaaagaaatttttttaaatttgttttcgagacagggtctagctctgttgcccaggctggagtctagtggcgtgatcacggctcactgcaccacctaccttccaggctcaagctatcctcctgcctcaccctcccaagtagctgggactacaggcatgtgctaccatacctggttaattatttttatttttagtagagacaagatctcactatgttgcccaggctgctgtcaaactcctggagtcaagcagtcctcccaccttgacttcccagagtgctgggattacaggcatgagccaccatgcctggcccatttgaaaaaaaaaattttttttaaacaactatagctttaaaaaaagagtatttttcaaaaaattagctgagcatggtggcgggtgcctatagtcccagctactagggaggctacttgggaggcatgaacccgggaggcagaggttgcagtgagccaaaattgcgtcactgcactccagcctgggtcacagagcaagattctgcctcaaaaaaaaaaaaaaaaaagttttgttttgttttgtttttttaaacaggaaaggatgttaaaattcattaagcatcctcccccaccccccgagacagggtctttctctgttgcccaggctggagtgcagtggtttgatctctgctcactgcagcctctgcctcccagggtcaagcgatcctcccacctcagcctccagagtagctgggactacatgtgcgagccaccatacccggctaagttttgtatttttcgtagaggtggggttttgccgtgttgtccaggcccctttggactcctgagctcaagtgatcagcctgcctcggctgcccaaagtgctaggattacaggtgtgagccactgcccccagcccttaacttttttcttcatctgttgagatgattatatgatttttaccttttaatctgttagtaaggtaaattgcaaggttgattttctgatattaaaccgattatgtattcctttttttttttttttttttttaaagagacggggtctccctatgttgcccaggctggagtacagtagctattcacggttgcaatcatagtacactgcagcctggaactccagggttccagagatcctcctgcctcagcctcccaagtagctgggactgcaggcacattgccccatatctgcccacccaattttgcatttctgcaataaaaccaacatgaccgtgatatattatccttcttacaaattgctggattctttttgctgatatttatttgggattccttttttttttttttttttgcaatggaatctcactttgttgcccaggttggagtgcagtggccccgtgttggctcactgtaacctctgtcccctgggttcaagcaattctcctgcctcagcctccttagtagctgggattacaggcacccaccaccatgtcgactagtttttatatttttagtagagacggggtttcaccatgttggccaggctggtctcaaactcctgacctgaggtgatccatccaccttggcctcccaaagtgttgggattacaggcatgggccaccacgcccggctatttgggatttttatacttttgagaatggcatgtaatctttccttggtgtgtgtgtatgtgtgtctcagaggtggttgcaggaaaggaagttaaattttgatctcccatggtgggaagacagacagtttaatggctaaaactagaaaaatagctgggcacagtggctcatgcttataatcccagcactttggaaggcagaggcaggtggatcgaagcacatcaaatatctttcaggtacctgtttacttattgctaaaagcaagaacattgatcctgtttatgtgtattgtattaatttagtgttgtggtggaaatgctaatatggttgagtcaaaatctctagctattcttttttgaaatctgcagtggcatttttttcttatccaaggatgagattctaaagttaatacataaagtgaaaatcaaatatagggaggcaggaactgagaccagttcaggaaacttcacgttatgcctctaagttcatattctttccagggcaaatactcactgagtgaaatttaaagcattatcagctatgctaataaggtgctattttcatgtgttaaatttttttgctgagtacttatcgttgactttccctcagataaatatacatatgatgcaaattcactatatttagatatctaattcaggtgtccccaaccccctgggccgtggaacggtataggtccactgcctggatggcacagtgggagatcagtagcagcccagcattagcggcctgagctccgccttctgtcggatcagcagtggcatttgattctcacgggagcacaaaccctgttgtgaactgcgcacacgagggatctaggttgcgggctccttacgagagtctaatgcctgatgatcagaggtggaacagtttcatcccgaaaccatcccccatcacaccctcctggtctgtggaaaaatagtcttccctaaaactgatccctggtttggaaaaggttggggaccacttatctaattgatgtccactttgggagtggattattaaataatctgcaaactcttataagctaggccaaatttttatttgaaccagtaaagtccctagcatcctgatcaaagttagtcactgatttttatcttgagtgtgataattttccaggaatattaattataatagtggtttaaatttattaaaatgggccaggcggggtggctcacgcctgtaatcccagcactttgggaggccgaggcgggtggatcatgaggtcaggagatcgagaccacggtgaaaccccgtctctactaaaaatacaaaaaaaattagccgggcgcggtcgtgggcgcctgtagtcccagctactcgggaggctgaggcaggagaatggagaatggcgtgaacccgggaggcggagcttgcagtgagccgagatggcgccgctgctctccagcctgggcgacagagccagactccgtctcaaaaaaaaaaaaaaattccttaaaaatgcatcttttttttttttttttttttttttttgagacagattctcgctctgtcgcccaggctggagtgcagtggtgcaatttcggctcactgcaagctccgcctcagcctccctagtagctgggactacaggtgcacgccgccacgcctggctaatttttgtgggtttttttgttttgtttttgttttttttttgagacggagtcttgctctttcgcccaggccggactgtggtggcgctatctcggctcactgcaagctccgcctcccgggttcacgccattctgcctcagcctcctgattagctgggattacaggcgcccgccaccgcgcccagctaatttttttttttttctatttttagtagagacggggtttcaccgtgttagccaagatggtctcgatctcctgaccccgtgatctgcccgcctcggcctcccaaagtgctgtatttttttttttttcagtagagacggggtttcaccgtgttagccaggatggtctcgatctcctgaccttgtgatccacccgcctcggcctcccacagtgctgagattacaggcatgagccaccgcgcccggccaaaatgcatcgttttatatcttcataatgtagtttttttccttccttttttttttttttttttttttggagacagagttttgctcttgtcgcccaggctggagtgcaatggagtgatctcagctcaccgcaacctccgcgtcctggattcaagcgagtctcctacctcagcctcccaaatagctggggttacaggcatgcgccaccacgcccagctaattttgtattttggtagagacggggtttctccatgttggtcaggctgatctcaaacttctgacctcaggtgatctgcctgcctcggcctcccaaagtgctgggattacaggcatgagccactgcgcccggcctttccttcccatctttggtcttccctcagaaagtaaccctgaagtcaccatctgtactcttaatcttttcttagactgtagttgctcttcctttttcctcatgttttctaatattgtatatttgttacagaaaagttttcttcaaaaatggatggggtgtcttcagaggctaatgaagaaaagtaagttcatttaatgcagctaaaaatattatattctatcagagaaagatatttttctaattagtaagacctatccataacttctgagatctttttccattgtgttccaagaaaaagtagtagtttttttttttaaattatactttaagttctagggtacatgtgcacaacgtgcaggtttgttacatatgtatacatgtgccatgttggtttgctgcacccatcaactcatttacattaggtatttctcctaatgctatccctctcccagtccctcaccccctggcaggccccggtgagtgatgttccccaaccctgtgtccaagtgatctcattgttcaatttccacctacgagtgagaacatgcggtgtttggttttctgtccttgtgatagtttgctgagaatgatggtttccagcttcatccatgtccctacaaagtacatgaactcatccaaaaagaagtagatgttacagactcatagctttccttgccattgccataactttgtataaactcatctactctgggcatggtggctcacacctgtagtcccggcactttgagaggcttaggcccagtaacttgagaccagcctgagcaacatagtaagacacccccgcccccccatctctacaaaaaataaatttttttaaatggagggctcttggctttaccagccagggaggatgcttggctttgcccaggaaagaattcatgggctagccagcggtgttaaacagcacttttattgaagtggcatagcgtaaagcagcagcactggtatagctccttgcagagcagggctactctgtaggcagtatgcccagagtagcagctcagaggcagttctgcactcatatttatacccatttttaattatatgcaaattaagaggtgttttatgcagacatttttagaatgagggtagtaacttccagcttgtcaggtcattgccatggaaagggcaggtaactgctgggtttttgccatagcaatggtaaactgacaaggcaccctggtgggagtgtcttgtggggaggtgcttttgccccagacctgttttagctagtcctcaatttggtcctgtgtccaagccccacctgtggagtcaagttctgcctcctacctcaagaccctgtctcacatatcatcatcatcatcatcatcatcatcatcatcatctcatctagggtcaaatctgagagggactttagatactatctcctatctcttcaatttaaggatgagaaaattgagaaccaggaaaattgagaacctatctcttcaatttaaggatgagaaaattgagaaccaggaagaaaaatgatttgtctaaaattgacatcacaacctggtggcttgtttgcagcctgcagtcataagtttttggcttatacatagtattttttgattgtttctttttaagagactgtgtcttgctttgttgcccaggctagatttggactcctgggctcaagtgattctcctgccacagcctcctgaatagctggaagtatagacatgggccactgtggctggctttggcctacacatattttttagtttttgaattagttgccaaaattttaaaatctcaaaattttgtacaatcgggttttcagcttctcttgaaaaatcaagcgtggcaacactgggctcctattcttgtttggcaacaactaaccacagcagaggaatgactgacctttaggtgagagaggaattctctagattattataatctcaacactacctatttttcttgctcctaaaaaattatctgtttagcctcataggcatttgaattttcaaaacctggtctaaaaatcgtatagtagtaaaaccaaagctagcgtctcttgacttatagcccatttatcttattattatacctctataaatatggtaaattatgttgtactgataattattcaagagatagtctcgtagtacacaatatgtattttaaaacactgaattcctaactgaatttaaagtcttgtatataaattttgcttgccagagtgctaagagaaagtgatgaccagtttgaaagcatgtaaggggtgctgtgatgatgccttttgtgaattcatttttttaaatcactgtgtatataattttgttttcctttttcagtgacaatatagagagacctgttagaagacggcattcttcagtaagaaagactttcttgaattaataattgtcagcttttatttaatgataaccatatatcacagtagttttgactgtggcttcaccatcctacccttactggcttcctgttgctctctagataaagactcaaatatttaacgtggttatacaattctgtaaatataccaaaattcatactttatgaattttgtagtaattttatgaattttatgctatgtaagttatacttcaataaagctgtttaaaagatatgtttaacctgtggtacaaagctgttgcaagagacagaagacctacccaaactgcttttgtgtttttgagatagagtctcgctctgtcgcccaggctggagcgcagtggtgtgatctcggctcactgtaacctccgcctcctgggttcaagcgattctcgtgtttcagccacctgagtagctggaattacaagcatgtaccacgtgtggctaatttttttattttttagaagagatgaggttttgccatgttgcccaggctggtctcaaactcctggcctcaagtgatcctcctgcctcagcctcccaaagcgctgagattacaggcgtgagccactgtgcccagcccaaactgctttaagcacaaaatgtgttgggttatgatactaaaaaatccaacgaagggatggctttaggcacacttactgaccagagattctaaccatgacaccagtactaggatttccttttgctttttctactcttagtgcttcctctgggtaatctccagcagatagattctttccctataattactgtgatacatctagctcttttacttccaggcccaagtcctacgtgaagaatagtgtctttttcctgaaaacagaaaagactcagaattgaatcatgttagcttgattatcctgatatgggtcaagtcctcattcctgaacaaatcatcattgacaagagaatatcagattgttctagacagagctatgtgttttaccctagagttggtgtggcattcactcagaccatgtgggatgagagcgggtagaataattggagaggatgggcaggtagaagggaatagatgtcagatatttaaatctgccacacggtatagcattgagcagaatgaatttgaggagtttcagagtttttaatgaaaattttagctttctacctatgatataacttgaaataaactgattcttaatagatatgccagattttttttgaataattctaattgttaccctagatattgaaacccccaaggagtcctcttcaggacctcagaggtgggaatgaaagagttcaggtaagtcttttgtgcaaatactttatagatgactattttcagttatatttttaagtcaagaagtttattagctatttgaagaggaaatgtgtaagcatcccatgagtttccaaacacttgaatatactggcattcttgatttttcatttttcttcttttttctaggaatggcatctccctctcttacccaggttggagtgtagtggcacaatcataagtccctgcagccttgcattcctgggctcaatcaatcttcccgcctcagcctcctgagtagctgggactacggcacatgccatcatacttagctatttatttatttatttagaaacagggtctgactgttgcccagactggagtacaatggtgcgatcatggctcactgcaacctcctccccctgggctcaagagatcctcccaccttagcctcctgagtaactaggcctacaggaacatgccaccatgcccggctaattttttattttttatagagacaggatttcgccatgttgccccacgctggtcttgaactcctgggctcaagtaatccacccaccttggtcttccaaagtgctggcattacaggcgtgagccactgtacccagcccttaaaaaatttttgtttttagtatagacagggtcttgctatgttggctgggctggttttgaacttctgggctcaagtgatcctcttgcctgggcctcccaaagtgtgggtattataggcatgagccatcgtgctgggcctttcttttttcatgtcagatgtataatgtgccaacatcgtaacaaagtttgaagaaagcacatctcacacatgcgtgtgaaaacccaatcacacttatgaactacgaaaagatcagtattcttttttttcagtaagaaatatattagtctctgttagtcccagtgtttaccatgtcagtattgtcatattaagctcaaggctacctgtagcatcttctagggccttaatcacatcactgctttgatgcagaggggttaccatttctgattctttattataataagacttatggttaggtattcagaattaacccagtaaaactctctgtggattttgtttctgtcttttgattattattattattttatgtttttacttgacagcaagctcatccttaatgtcttttagtttttgtgtatggtatttatgtgagtagaaatgtttgctcttgttaaagaaggtggggaaggaaggtaaaaatagtgtattctaatgaagagatgctcaacatcattgaccattagggaaatgtaaatcaaaacctaaatgagatatcacctcacacccattaggatggttaaagtaaaagacaataacaagtgttgatgaggatgcagagaaattggaacacttgtgctttcttggtgggggtataaaatggtacagctgctatggaaaacagtatggcaattcctcaaaaaattgaaaatagaattgccatatgatccaacaattccacttctggatatatatccaaaagaattgaaaggagagtttcaaagagatatttgtacacccatgttcatagcggcattattcacattagctagaaggtggaagcaactcaagtgtccattgatggatgaatggataaacaaaatgtggtaatatatacatgcagtgaaatatcattcagccttgaaaaaaagaaggaaattctgacacatactacaaaatgtgaagaagtaattcagaataagacttgatctctggccgggtgcagtggctcatgcctgtaatcctagcactttggaaagctgaggcgggaggatcacttgaggtcaggagtttgagaccagcctagtcaacatggtgaaaccccatctctactaaaaatacaaaaaattagaggttgagacatgaaaatcacttgaacctgagaggcagaggttgcagtgaactgagatcgagttactgtactccagcctgggcgacagaacaaaaccgtcttggaaaaaaaaaaaaaaaaaaaaaagacttgtctgggtgcaggggcccatggctataatcccagcagcactttgggaggccgaggtgggccgatcacctgaggtcgggagttcgagaccagcctgaccaacatggagaaaccccatccctactaaaaatacagaattagttggtcgtggtgacgtatgcctgtaatcccagctactcgggaggctgaggcaggagaatcgcttgaatccgggaggcagaggctgtggtgagccaagatcacaccgttgcactccagtctgggcaacaagagcgaaactccatctcaaaaaaaaaaaaaaaaggacttgatctctgtctatagtactctggagatgtaattcacagtgattttattaagaattataccatatattctctgcccttaggaatccaatgctttgagaaataagaaaaactctcgtcgagtcagctttgcagatactataaagtaagttgaaagcagaaataactaaaatattataggtactggtattttgtgtatcaaaccaaatgtattggtactgacttgaataatctgttttgattaaacattagttattcttcaaagggttattcagtattatgtttaaaagagaaacaaagcattccctctaaagtcaggaacaaaacaatgatatccaactgttatttgacattgtactaggggccgggtgtgctggctcacgcctgtaatcccagcactttgggaggttgaagccagaggattgcttgaggccaatagttcgagactagcccaagcaacttagcgagatcccatctctacaaaaaaaaaaaaaaaaaaaaattagctaggcatgataccctgcacctgtagtcccagatacttaggaggctgaggctggaggattgcttcagttcaggagttctaggctgcagtgagccatgatagtgtcattgcactccagcctgggcaacagagtgagaccctgtctcaaaaaagaaaaaagaatagcttctatatagtgagtgatacctaatattagcagaattagaatgaactggtcggattcaaggcagatgtcaaatgctccttgaagcttattcttaaccagcccagtgaaaagggatcccttcctatggagtccatgctaccatacctgaactgttaataacaaaagccagtgaaataatgtttataatcactgttctagctctatttatagtggaagctccttgagtcaaggatcatgtgtttgtatcccaggccctagtatgataccaggtatatagtgagtgtttaataaatacttgttgaattaaatgaatattttaggtgattgagagggatataataattactaagtcagagctcatttaaaaattataacctctgcagtaacaaatggctcagaatcttagttaaaaataaataaataaataaataaactataacagcattgtctctactagaaataaaaaatattagtcaggcttgttggtgaggctactcgggaggctgaagtgggatgatcactttaacctgggagattgaggctacagtgagctgtgatcgcaccactgcaatctagactgggcaacaaagcgagaccctgtttaaaatcaaaaataaaaacaaaactatagcagattttattgtggtaaactacttttggcatttgaaatactaggagtatatggcatagcaaagaggaagctaaaatcaaagtattatcttgacctatctcaacacagactataaatcaacaccaaaagataatgattacaaattgcaggttttcaataatctttattttctcttctagggtattccagacggagtctcatatgaaaatagtgagaaagtcagaaatggaaggtaagtatgttactataattcctgctaaatctgctttttaaaaaattttactgtagctatctaaccagacaactaatataacttattgtctatcttattgcttaaaaaatatatgatgggccatgcatagtggttcacacctgtgatcccgacactttggcagtctgaggtgggaggatcgcttgagcccaggagttcaagaccaacctggatagcatagtgagattctgtctctacaaaaaataaaaaattagccaggtgtgggggtgcattcctgtagccccagctactcaggaggctgaggtgagaggatcacttgagtccagaagattgagactgcagtgattgcaccagtgcactccagcctgggcaacagagcaagactctgtctcaaaaacaaaaaaagtataccttgagtcttgggagtagagagtagagtggatagtaagtaaatttatttatttatttattttgagacggattttcactgttgttccccaggctgcagtgcaatggtgccatctcagctgcaacttctgcctcctgggtttaagcgattctcctgcctcagcctcccaggtagccgggattacaggcatgcaccaccacacccagctaatttttgtatttttagtagagacagggtttcaccatattggccaggctggtctcgaacccctggcctcaagtgatccgcctgccttggcctcaaaatgctaggattacaggcgtgagccaccacgtccagcagttaataatttttttaaatgttgttaatgtccttaagtaattttttaaaaattttattgtattttttttttttttgagacagagtcttgcttgccctgtcgcccaggctagagtgcagtggtgcgatctcggctaactgcaatctctgcctcccaggttcaagcaattctcctacctcagcctcctgagtagctgggattacatgtgcacgccaccacacctggctaatttttgtatttttagtagagacagggtttcaccgtgttggtcaggttgatctcgaactcctgacctcgtggtccacccgtctcggcctcccaaagttctgggattacaggcatgagccaccgggcccagctgtccttaagtaatttttctaatgctttatcagtgtatccttggacaaatttaattttaattttatttttagaaacagaaacaggagaaaatcttcttttgatacagtaagtaatattcaaattatatttaaaaagttataaattaatattatttttatttcttatttttgtgttccttttgtggaatacttaggattaattcagaaaaccagttatttgcagaatttagtatactgctatatctgattaatatggccattgtactgtttatagttttaatagtgatgaaacaatataatatataaacctttatatttattaactaatataaaacaatagatagcaagtctttagtttttttattaaattaatctttcttataatattattacatagaaaggcaaataccagtagctcttcaacaaatgaaaagatggttatctttattcatcataagagaagtacagatttgattatattgagatatttttggctggacgtggtggctcatgcctgtaatccgagcactttgggaggccgaggctggtggatcacctgaggtcaggagttcgagaccagcctggccaacatgatgaaaccccatctctactaaaaaaatacaaaaaattggccgggcacagtggcttacgcctgtaaaccaagcacttagggaggctgaggcgggtagatcacgaggtcaggagatcgagaccatcctggccaacgtggtgaaaccccatctctactaagaatacaaaaattagccaggtgttgtggtgggcgcctgtagtcccagctactcaggaggttgaggtaggagaatcacttgaatctgggaggtagaggttgcagtgagccgagatcatgccactgcactccagcctgggcgacagagcgagactccgtctcaaaaaaacaaaaaaaaccccaaaaaattagccaggtatggtggcactgtgcctgtaatcccagctactcaggaggccaaggcacgagaatcgcttgaacccgggaggcggaggttgcagtgagctgagatcatgcccctgcactccaacctgggcagcagagcgagactctgtctccaaaaaagaggtttttttgctgttgttgttgtttgtttgttgtttagacggcatcttcctctgtcgccaggctggagtgcaatggtacgatcttggctctctgcaacctccgcctcctgggttcaagtgattctcctgcttcagcctcccgagtagctgggactacaggcgcctgccaccacgcctggctaattttgttgtatttttagtagacacggggtttcaccatgttggccagaattgtcttggtctcttgacctcgtgatccgcccactttggcctcctaaagtgctgggattacaggcgtgagccactgtgcctggcctaaaaaagagatatttttatccagtcagttaaggaaataggtaaaaagtcactccgtgctagtgggagtataatttgtagaaggcaacttggtaatatcgttcagaattttaaatgcacatgccctttgacttcagttttatgtctggaaattatctcaccaatatacgtgtaaatgtttgaaatgatgaatagataaggttattcacagcagcgtttattataatagtaaacgttgtgaaaggtcctgaaggtccatcagtaagggcctggttaaataaattgtacattttccatataattgactatgcagccggaaaaaaaattttatgctaaatagagaaatctctaagctatattacttaagataaaaagcaagacgcaaaacaaagtatatcatgtattaccacttgggtaaaacagggaagaagaaaagcgtgtgtgtgtgtgtgtatcttctcgtgtgtgtacatgtataatgtatgtatatgtagtgacttatgcatatatatgcataatatctctggaagaaactagtaagattgcctacagagaaaagaaccttgctataggttacatgttggctttgtggtttattaatttaaaaccatatgaaagtattacctattacattcttaaaattgttgaaacgaagaaatggaagtaatagtagtcatggtttagaaaaggtacagaatcaactccaacagaacttaaaggaaaaataattttttaaataaaaaggtacagaagtatatacattgaaaagtaaaaattattccctctttccctcttctttcttttttgtgagacggggtttcgctcttgttggccagactggagtataatggcatgatcttggctcactgcaacctcagcctcctgggttcaagcaattctcctgcctcagcctcctgagtagctaggactacaggtgtgcaccactacacctggctaatttattttatttttattattttattttattttattttattttgagatagagtctcgctccgtcacccaggctggagtgcagtggcgccatctcggcccactgcaagctccgcctcctggtttcacgccattctcctgcctcagcctccctagtagctgggactacaggcgcctgccaccacgcctggctcatttttttgtatttttagtagagacagggtttcactgtgttagccaggatggtctcaatttcctgaccttgtgatccacccgcctcggcctcccaaagtgctgggattacaggcgtgagccaccacgcctggccccccttttttttttttttgagatggagtcttgctctgttgtgcaggctggagtgcagtggcctaatcttggctcactgcaacctccgcctcatgggttcaagcaattctcctgcctcagcctcccgagtacctgggactacaggtgcacaccaccacgcccagccaatttttgtatttttagtagagatggggtttcaccacgttggccaggctggtctcgaactcctgacctcagtttatctgcctgccttggcttcccaaagtgctgggattttaggcatgagccaccacacccggcctaattttgtatttttagtagaagcggtgtttcaccatgtcggccaagctagtctcaaactcctgacctcgggtgatctgcctgccttggcctcccaaagtgatgggattacagacgtgagccaccacacccagcctattccctcttcttcaggtgactcactccttacagataaccactgttgacaatttttggtgtacttgcagaaattttttttgtatgtccaagtgcatgtttagcttttatttttttaaacaagacaaaaatgggattgcctagtaatatgtcttatagcactttctatgttattacataaagatttacctcagtctgttacaatctcttgtatggctgcaccaacatttagtgaactccctattgatggacacttgagtggtttctttcatgtactttttgttttaaggctcaagttttagaaaaggaattgctttataggtcattttttgaaaaaataagcaagcagtatatattaagcatatttttctagtttatttttttgagatggggtctcactctgtcacccaggctggagtgcagtgacatgattatagttcattgcagccctggacttcaggtctcaagtgatcctcccacttcacgctcccaaagtgttgggattacagatgtgagccaccacggctggctgataatattcttgaaattagcaaaccattaagaccaatctgaaaagtatcctttagttgccttgtaattccttcagccagtattagatgagtctttttttaaaaagatgtctttataattttctgcattagatgagtcttttttaaaaagatgtctttataattttctgctagtcattctatgaaagtctttcaccttctgtactctttcagctgttattgaaagattcttggtaattgtttggggtatagattataaaaatactttttaatttttaggaataagaaattagaagataattactgtgaaattactggtgagtatgactagaatacttttcttatagtaagatagtctattcatctaggtttcttgatcactattatgtacaagaaaccatgaaccacgaaaaaaaagcaaacagaggccaggcacggtgctcacgcctgtaatcccagtattttggcaggctgaggcaggcagatcacgaggtcgggagatcgagaccatcctggccaacatggtgaaacccagtctctactaaaatacaaaaaagtagctgggcgtggtggtgcgctcctgtagtcccagctactcggggctgaggcaggggaatcgcttgaacccaggaggcggagattgcagtgagctgagatcgcgccactgcactccagcaatggctccaaacagagctttgttctttttttttttttttctttttgagatggagttttgctcttattgcccaggctagtgcagtggcacaatctcagctcactgcaacctccgccttctggtttcaagcaattctcctgcctcagcctcccaagttgctgggattacaggcgcccgccaccacgcccagctaatttttttgtatttttagtagagacagggttttaccatgttggtcaggctggtctcgaactgctaccctcgtgatctaaccgccttggcctcccaaagtgctgggattacaggtgtgagccaccgcgcctggcccagggctttgttctttacacattgtcttcaatttaaaatttcacaggctcactattacttctttttttttttttttgagatgaattttcattcttgttgtccaggctggggtgcagtggtgcaatctgggctcactgcagcctctacctcccgggttcaagcaattctcttgcctcagcctcctgagtagctgggattacaggtgcccaccactacacccagctaattttttttgtatttttagtagagacagggtttctccatgttggccaggctgctctcaaactcctgacctcaggtgatccacccgcctcggcctcccaaagtgctgggattataggtatgagccactgcacccagccaactcactgttacttctttcaaacctgctgtttctcctgttttctctgtcttggactcccactcattcagtcattcactgaagtcaggaatcaagaagtcattttcaattcttcctttatgtctaatggccatttggcctactttctgttttgtctcctaaatgtcttgaaaatcgttacctattctgtattccttctgtgactgctttaattcaagttgttattattttttcttgggctactgtatttcatttcttatccttccaatccattctccatatttctaaatttgattatgttacctcccagcttaaaatggttcaatgacactgttttgcttacagaataaagcccatactccttagcaatgagttagaatgtcctttatcacttggcctgttttcttctccaaacttatctcctacccattatataggtatcccatgctctagcccatgatgaattatttgcagttcactatataaactctttttctgcctatatgcatttatttttcattttatttcattttatttttttgagacggagtctcactctgtcacccaggctgaagtgaggtggtgcgatcttggctcactgcaacctccgcctcccaggttcaagcgattttcctgcctcagcctcccgagtagctgggattacaggcacgtgccaccaggccgagctgatttttgtatttttagtagagatggggtttcaccatgttggccaggctggtctcaaactcctgacctcagatgatccaccgccttggcctccagagtgcttggattacaggcgtgagcctccgcactcagcccctatatgcatttataaatgctattttctctatctaaagtgatctttctactccagtttgcctatcaggcttctcatttttcacttcacttagtttaacttcagtgctatccaaagtgtccagtccacaaactaactgctcagtccatgacagaaaaggaatttgtaccataatgtgccttaactgtggcattaagccacagtttagtttagtttacacttttttcctagcaattattattatatgatttatgtttgccgccagctccttatctcgttatgaataggtaacaagcagttcacagtctggcaccatacttcaagtagcactggcttaaatggaaccctctctggcaaaactaaggagttagtcagatgttctgtgctcccataacacctcttttatttttcagtatattttagaatttatcacattgtactttaagtatttctggctgtcttattaaagaggccaaactttttttgcaggcggtgggagatactcctccttgaggagcacagctaccccataggcagtgtgctcagaatagcctgaactaccatctctgagagtccagaaattcagaaattttgtcttgttcttctttataccttagtagacatttgaggtgtgttcgtttgtttgttttgttttttcatgtaataggttctgaaccaacatttgttgaaaaaatgaatggaagcctgaaatataaataaggcttttagtaaaaaaaaaaaaaaaaaaaaaaaaaaaaaaaaaaaaaaagcttataattatttcattatatgtactcaagctcgtcatacattctttaatgtgttctaaagatttgcctttaaactttaaatgtaagtatttttaaatgtatttcctgttttaatatagccttttgaatcccttccttatttacaaagtctgatttgtagttctaaaataagtcttgagtctaatcctttatttccattttcattgctctgttgccctaacatgacctcttgcgttaatctgaactattgtagtaacttccttattggtttatcttctcttgaatcaacttctccttattactttttactatttttctaaaatgcattatattttataatgggattatttttataaagcacatgtgtcttatcatgggaatatctagattccttaacatagaataaaagacccttcagaatcctaccctaacctttcagtctcatcatttgatactcttctccatgggacttctactatccaggaaataaaaatagagaagtgaataataataataataataagtagtagtccaaactttccatctttaaaatcaccaccacattataaaaatatttcagccacacagaggatacaataattattggtctctctgtcactaacataggataattaagtcttatgaaattttatatgttcccaacacaaaagataaatgtttgaggtggtggatattccagttaccctgatttgatcattacacaatgtatacaagtatcaaaatatcacatgtaacacaaaaatatgtacaacaatgatgtatcaatttttaaaaaattaaaaaaatttaatacgtaagttcttaagggcttagttactggtaaattctagtaaatacttgtaactgatgaagaacctaagaaaaggaaaatcaggctcagtgttatattttctgactacagttttttcttttttctaaatagggatgaacacattgctttctgctcccattcatacccagatgcaacagaaggaggtatgagttcatgcaaataccttcatattgtaatgtcatttgattgttaaaacagaaaacacaattcaatgataatggcatagtttagggatgacttaaaaaaatgaatcagcataaactggaaaggcttcctacctttccagttaacttaaggatagttaagtcacagccagtttaagtaatgggagatacagtataccagtacctctcaaagtttaaagagcacatgagtctttatttctatttccttagtgatactagtacacaagtccataggccatactttcagtagcaaagagttaatctgtgtcctcactgagaaaactgttgtagcacacagtgtaatatatatatatatatatatattttaggctatctcctacaagaaggattttttttggttgttgttagacacagtcttacactgttgcccaggctggagtgcagtggcacaatcttggctcattgcagcctcaatcttctgggctgaagcgatcctcccacctcagcctcctgagtggctgggactacaggtgcatgccaccatgcctagctaattttgttcatttttttgtagagacaaggtctcactctgttgcccaggctggtcttgaactcctgggctcaagggatctttctgccttggcttctcaaagtgctgggattacaagtgtgagccaccaagcccagtctagaatgtaatatagattagccatcatgggcttatgtctttcctagacttttaaaatttaggataagaatgacctattcaatatagtaattagaatttttgtcatgtttacatttggtgctgtcagtgtttttaattttttagtcattctagtgggtgtataattaaccttgaatttttaatttgtcccaaaacactaaaaagtaaattactcgcagactttagatttctttttcttttcctaatagattgggtattactctgttgccgaagttggagtgcaatggtgtgatcctagcctatgacagctcaaactcctggactcgagcagtcctcccacctcagccttcctagtagctaggacaacaggcatgcaccactgtgcctaatttttataattttttgtagagacaggatcttactttgttactcctggcttcaggcaatccccctgcctcagccttccaaagtgcttggattacaggcgtgagccactgtgcctagcctagaataatttttttttttttttgagacagagtcttgctctgttgcccaggcagtggtgcaatctcagctcgctgcaagctccgcctcccaggttcacaccattctcctgcctcagcctcccgagtagctgggactacaggtgcccgccaccatgcctggcttattttcttttttgtattttttagtagagacggggtttcaccatgttagccaggatggtctcgatctcctgccctcgtgatccacccacctcggcttcccaagaataatttttaatgacaaattatatgcaacatgctacaccattgattcaagcaaaccaacgtgttatgaaaccatcactgaggattttttatataatacatgttgtaaaatgcctttttaaaagtttgcttttgttctgatctcttatattttgctttcattatagttttcaattatagaacatacccgtgaaaggaaacatgcaaatgaccagacagtcattttttcagatgaaaaccagatggacctgacatcaagtcacactgtaatgattaccaaaggccttttagataatcccataagtgaaaagtccaccaagatagataccacatcatttctagctaatttaaagcttcacaccgaggactcaagaatgaaaaaagaagtaaatttttccgtggatcaaaacacttcttcagaaaataaaatagatttcaatgacttcataaaaagattgaaaacaggaaaatgtagtgcttttcctgatgtgcctgataaagaaaattttgagatacctatttattccaaggaaccgaacagtgcctcttctacacatcaaatgcatgtatctcttaaggaagatgaaaataacagtaatattactaggctctttagagaaaaagatgatgggatgaatttcacccagtgtcatacagccaatattcagacattgattcccacatccagtgagaccaactcacgggaatctaaaggtaatgatattacaatttatggcaatgactttatggacttgacatttaaccacactttgcagatcttacctgcaacaggtaatttttctgaaatagaaaatcaaactcagaatgccatggatgtaacaacaggttatggaactaaagcttcaggaaataaaacagtttttaagagtaaacaaaatactgcttttcaagacctttccataaactctgcagacaaaatacatattaccagaagtcatattatgggggcagaaactcacatagtctcacagacttgtaatcaggatgccagaatattagccatgaccccagaatctatatattctaatccatctattcaaggttgtaagactgttttctattctagttgtaatgatgccatggaaatgaccaaatgtctctcaaatatgagagaggagaaaaatttgctaaagcatgacagtaattatgctaaaatgtattgcaatccagatgctatgtcttctctcacagagaaaactatttattccggagaggagaacatggacattaccaagagtcatacagttgcaatagataatcaaatttttaaacaagatcaatcaaatgtgcaaatagcagctgcaccaacacccgaaaaagaaatgatgctccaaaatcttatgaccacatcagaagatgggaaaatgaatgtaaattgtaactcagttcctcatgtatctaaggaaagaatacagcagagcctgtcaaatcctttgtctatttcattgactgatagaaagactgaactcttatcaggtgaaaatatggatttgactgaaagtcacacaagtaacttaggaagtcaggttcctcttgcagcttataatctagcaccggagagtaccagtgaatctcactctcagagcaaaagctcttcagatgaatgtgaagaaattaccaaaagtcgtaatgaaccatttcagcgatcagacataatagccaaaaacagcttaaccgacacctggaacaaagacaaagattgggttttgaagattttgccctaccttgataaagattctcctcagtcagctgattgtaatcaggagatagcaacaagccataatatagtctactgtggtggagttcttgataaacaaataactaatagaaatacagtatcatgggaacaatctttgttttctaccacaaagccattattttcatcaggacagttctctatgaaaaatcatgatactgctataagtagtcatacagtgaaatctgtactaggccagaattctaaactggctgagccactgaggaaaagtttaagcaatcccacacctgactattgccatgacaagatgattatatgttcagaggaagagcaaaatatggatctaacaaagagccacactgtcgtcattggatttggtccttctgaactacaagaacttggtaaaactaatttagaacacactactggccagctaacaacaatgaacagacagatagctgtaaaagttgaaaaatgtggtaaaagtcccatagaaaaaagtggagtgcttaaatctaactgtattatggatgtgttagaggacgaaagtgtacagaaacctaaatttccaaaggaaaagcaaaatgtcaaaatttggggaaggaaaagtgttggtggaccaaaaattgataagactattgtattttcagaagacgataagaatgatatggatatcactaagagttatacaatagaaataaaccatagacctttattagagaaacgtgattgtcatttggtgccattggcaggaacttctgaaactattttatatacatgtaggcaggatgacatggagatcactagaagtcacacaactgccttagaatgtaaaactgtctcaccagatgaaataactactaggcctatggacaaaactgtagtgtttgtagataatcatgttgaactagaaatgacagagtcccatactgttttcattgactaccaagaaaaggaaagaacagacagacctaactttgaactatcccaaaggaaaagcctaggaacaccaacagtgatatgtactcctactgaggagagtgttttctttccaggaaatggtgaaagtgaccgtctagtagcaaatgacagccagctaacccctctggaggaatggtctaataataggggccctgtagaggtagctgataacatggaattgtctaaatcagccacttgcaaaaacatcaaagatgtacaaagtcctggatttctgaatgaacctctatcaagcaaaagtcagagaagaaaaagccttaagctaaaaaatgacaagaccattgtattttcagagaatcataaaaatgatatggatattacccagagttgtatggtggaaatagataacgaaagtgccctggaggataaagaggacttccatttggcaggggcttctaaaactattttgtattcatgtgggcaggatgacatggagatcactaggagtcacacaactgccttagaatgtaaaactctcctgccaaatgaaatagctattaggcccatggacaaaaccgtattgttcacagataattacagtgatctggaagtcaccgattcccatactgttttcattgactgtcaagccacagagaaaatacttgaagaaaaccctaaatttggaataggaaaaggaaaaaacttgggtgtttcctttcctaaggataatagctgtgttcaagaaatcgctgaaaaacaagcactggctgtaggaaacaaaatagttcttcacaccgagcaaaagcaacaactctttgctgctactaatagaactactaatgaaatcatcaaatttcatagtgctgctatggatgaaaaggtcatagggaaagttgtagaccaggcctgtacattggaaaaagcgcaagttgaaagctgtcagttaaataatagagatagaagaaatgtggactttacaagtagtcatgcaactgctgtttgtggatccagtgataattattcctgtttaccaaatgttatttcctgtactgataatttggagggtagtgccatgctcttatgtgataaagatgaggaaaaagccaattattgcccagtgcaaaatgatcttgcttatgcaaatgattttgccagtgaatattacttggaatctgagggacagcctctctctgctccttgtcctttgttagagaaggaagaagttattcaaaccagtaccaaaggacagttagactgtgttataacactgcacaaagatcaagatctgattaaggatccacgaaatctattggctaatcaaactttagtatatagtcaagatctgggggagatgactaaacttaattcaaagcgagtatcttttaagcttccaaaggatcaaatgaaagtctatgttgatgacatttatgttattcctcagcctcatttctcaaccgaccaacctccattacctaaaaaaggacagagtagtatcaataaagaagaagtaatactgtctaaagctggaaataagagtttaaatattatagaaaattcctctgcacccatatgtgaaaacaagcccaaaatactcaatagtgaggaatggtttgctgcagcctgtaaaaaagaactgaaggaaaatattcaaacaactaactataatacagctctagatttccacagtaactcagacgtaactaagcaagtcattcaaactcatgtcaatgctggagaagcaccagatcctgtaattacatctaatgttccatgttttcatagtatcaaaccaaatctgaataatttgaatggaaaaactggagagtttttagcctttcaaactgttcatctaccaccccttccagagcaattacttgaattaggaaataaggcacacaatgatatgcatatagtgcaagctacagaaatacataatattaacataatctccagcaatgctaaagatagtagagatgaggaaaataaaaagtctcataatggagctgaaaccacctctctaccgccaaagacagtttttaaagataaagtaaggagatgttctttgggaatctttttgcctagattgcccaacaagagaaattgtagtgtcactggtattgatgacctggaacagattccagcagacacaactgatataaatcacttagaaactcagccggtctctagcaaagattcaggcattggatctgttgcaggtaaactgaacctaagtccttctcaatatataaatgaggaaaatcttcctgtatatcctgatgagatcaattcttcagactctattaacatagaaactgaggaaaaggccttgattgagacataccaaaaagagatttcaccatatgaaaataaaatgggaaaaacttgcaatagccaaaaaagaacgtgggtacaagaagaagaagatattcataaggagaaaaaaatcagaaaaaatgagattaagtttagtgatacgacacaagatcgggaggtgagctctgtcttgaaccaaagaatgttcttgaattttgggttttgttttgttttcttaaattgtgggtattctcaaattttaatcttagtctcgggtaggcagaaaataattatttccacttagagggctggagaaatattcttatgtagaaccttcagaaattaattgactaacagctagacttcaaagcaatttaaagtgacaaatagtcacaaaaaaattaaatggaaaattgtacaaaaagtagccaaagttaaaattgtataatttcaaaaatttcaaaaggtatgtatactgtcacctctagtgatttgtcaatttggctttatataagaatctctagggaggttatatatagcttgaaaagtcatcttcagtgttgttatatttggggagtaaaaagctttttattttgccaactgcatgaagtaaagcttgactgaatttccttggctgacaaggatatgtagaagttgagagtccattttctttattatttaattttatttttattttattttatttttgagacagagtcttgttctgttgcccaggctggagtgcagttgtgtgatctcagctcactgcaacctctgccttctgggttcaagtgattctcctgcctcagccttccgagtagctaggattgcaggtgcctggcaccacacccggctaatttctttctttttttttttttttgtatttttagtagagattgggtttccccatgttggccaggctggtctcgaactcctgatctcaggtgatccacccaccttggcctgccaaagtcctgatattacaggagtgagccaccacgtccagcctgcattctattttcgataaatatatagattatctgctatgtcttaggcactgttttatgtgctgggaatgcagagaaaaatctgctgtcatggagtttacataatatttattcatttatttatttttgagacagaccctcgctctgttgcccaggctggagtgcagtggcgcgatctcggctcactgcaacctccatctccctggttcaagtgattgtcgtgtctcagcctcccaagtagatgggagtacgggtgcacaccacaatgcccagctaatttttgtatttttagtagagacgaggtttcaccacgttggccaggctggtctcaaactcctggcctcaagtgacccacccacctcgacctcccagagtgctgggattacaggcataagccaccacggcccataatggcgtttatttatttatttttgttttgttttgagattaagtcttgctctgttgcccaggctggagcacagtggcgtgatctcagctcactgcaacctccgcctcccaggttc

SEQ ID NO: 159 - DNA, 23353 bp, Homo sapiens
  source 1..23353: mol_type = other DNA
gagctgtgcttggggcggggcctggcgtgtattcgaaaggaaggcgccggctgcgggaagatggcggctcagccgctgcggcatcgctcacgttgtgcaacgccgccccggggggacttttgtggtggcactgagagggcgattgaccaagcttcttttacgacctccatggagtgggatacgcaggtggtgaaggggtcctcgccgctcggccccgcagggctgggggctgaggagccagccgccggcccgcagctgccgtcttggctgcagcctgagaggtgcgctgtgttccagtgcgcacagtgtcacgcagtgctcgccgactcggtgcacctcgcctgggacctgtcgcggtccctcggggccgtggtcttctccagtgagtgcagtgaagcgttcgggaaaggcagaggctagcccgagagggtgttcccgctttctccaccgggtggcggagaaccacctggggaagaaaacgggatgaaaagttggaagcaaataactccttggcctggggatggggcagggaatcggggagtctcctgatatttacggccaggatgagtctgtctagaggagagattttccatttcaaggcccgcagagtatgggttctgacccgtgtttgtcttcctaggagttacaaataacgtcgttttggaagcgcccttcctagttggcattgaaggttcactcaaaggcaggtacgtattgataattacattggtctctagtccctgactttatgagactgaggatcgtggaactgacatgtacgaggagaaaacagtttgggatgctgcttttacctgtttgactcttatatgaacttgatgtattaatgaaatgaaaaagttgtatttgtgtattggttttaggatcttcctgagggccacttctcccaggtggcttgtacaagtgaagtgaggctaagaaagatgtatctagtagtggacaaaagaaaaaaataaccttttggtttacagtgagaataacatactataaactacaatccttttagatattagaactttttgatacagggtcttgctctcgcccaggctggagtgcactggtgcgctcatagctcactacagcccctaccttcctggctcaagctatcctcccaacctcaccctccggagtagctgggactacaggcacacagcaccactcccggctaatttttaaattttttgtagaggccttagtatgttgcccacgcttgatattagaacttttaagtttgcgattatggttagtttgtaataagctatgccagggctaattcttcagtaaccccagaaactggagaaaaacacaactagaatgttatgtacttgaatactgcctggtaaactttgcgacctgcctgtactatgatttacaagtgacaataaagtagtcagtgaatttggtattgcaaggctcctcaattttgagttttggctttaacattgagacaattcatttcattctgaccagtttgattcaacgttacggttaaaatataggaattcttagttgctttgtccagtaaccaggaagatttctgcagcttggacaaacttcaaaaacggagttagacccacagctccctttctttttcctgaataaaagacactccctatcgctataggagtccccttcccacccaaaggggacaaagcaagaaggagcaattgcctgcttggaattgggtgtattctggggccagaggcagaaggttcctgaatgtgctcttggagaggaggctaatgaatctagacccgtgctgtcctatactgtaatcactagtcatatgtagctattatatattattaaatctgcattgagatatgctgtgaacacagaatacacactggatttcaaagacttagtacagaaaaattaatcatttacaaatactgattacgggccgggcgtggtggctcacacctgtaatcacagcactttgggaggccgaggcgggcggatcacaaggtcaggaaatcgagaccatcctgactaacacggtgaaaccgtgtctctactaaaaatacaaaaaattagccaggcatagtggcgggcgcctgtagtcccagctactcaggagactgaggcaggagaatggcgtgaacccgggaggcggagcttgcagtgaccgagattgcgccactgcattccagcctgggcgacagactccgtatcaaaaaaaaaaaaaaaaaaatactgattacggctgggagcggtggcttacgcctataatcccagcacttttgggaggccatgacaggcagatcaccagaggtcgggagttcgagaccagcctgaccaaaatggagaaaccctgtctctactaaaaatacaaaattagccgggcatggtggcacatgcctgtaatcccagctaggctgtaatcccaggaggctgaggagggagaatcgcttgaacccgggaggtggaggttgtggtgagccgagttcacgccattgcactccagcctgggcaacgagagcgaaactctgtcttaaaaaaaaaaattgattacatggtgaaatgacatttttgatatattgggttaaataaaatatttaaaaactaatttcacctgtttttattttattttttaaagcaaaattaggccaggcgccgtggctgatgcatgtaatcccagcactttgggaggccaaggcggatggatcacgaggtcaggagttcaagaccagcctagccaagatagtgaaactgtttctactagaaatacaaaaattagctgggcgtggtggcgggcgcctgtaatcccagctacttgggagactgaggcagagaattgcttgaatctggtaggcgggggttgcagtgagccaagatcatcccactgtactccagcctgggcaacagagcgagactcttcctcaaaaaaaaaagcaaaatgaatagaaaatttaaaattacatatgtgactcacattatattcctattagacaatgcttgtttagatgctttgtaaaaaactggaggaaggccaggtgcagtggcttacacctataatcccagcactttgggaggccaaggcaggcagatcacaaggtcgggagttcgggaccagcctggccagtatggtgaaaccacgtctctactaaaagtacaaaaattaggggggcgaggtggcaagcgcctatagtcccagctacttgggaggctgaggcaggagaatggcttgaacctgggaagcagaggttgcagtgagccaagatcgcaccactacactccagcctggacgacagatcgagactccgtctgaaaaaaaaaaaaaaaaaaaactagagggaaagccccatgtgtttctgtatttgtggagtaagatgagctatatgggacttacgaagagggttatgaaatggcacagctcaagacaacttgatttttttctaagtgtaggttcattacctagatggggtcagagaatgaattaagaggatgattaatgatgcagctaaaagagcataaattttagagacagcagactcgggttctttttattcttttttttttttttttttttttttttttgagatggagtcttgctctgacccaggctggagcacagtggcgggatcttggctcgctgcaacctccgcctcccgggttcaagctattctcctacctcagcctcccgagtagctgggattccaggcgcacgccactatgcctggctaatttttgtatttttatatttttagtagagacggggtttcaccatgttggccatgctggtctcgaacttctgaccttgtgatccacctgcctcagcctcccaaagtgctgggattacaggtgtgagccaccgcaccaggccttaactttactcttaatgaggcatgtgaaataaattgatccctctcaatctgtcatatttgaatactcctaaaatatactccctccgacatttatttaaacattctacaattggcatgaacctcttagattcaaagtcataaagtagacagatacaaggttacttccgtctacattttattgttctcttactggtagaggatttattgtaactaattttaaaaaggattattatagtatgttgacacttagaaatagcttttttaccctgagcttttgttgtgctcaacagcatatttaaatggaattttgtttgtattataagtgaagtacatttttttctaattgttatggcaaattcaaacccgagagaagaatataatgaacctctgtctacctgtcactaaactagagcacttatcaactcttggccaatcttgtttcatctaaaatcatagttggcttatcatgctggctcacgcctgtaatcccaacacttttggaggccaaggtgggaggatcacttgaacccaggagttcaagaccatcatgagcaacatagcgagacttcatctctaaaacaaaacaaaatatctatcctccacaatgttttgaagcagatacctgaaattacatcattccatccataaatattttggtaaggatctttataagaaacttttttctatttatttattttttgagatggagtctggctcttttacccaggatggagaacaacctccgcctcccaggctcaagccatcctttcacctcagcctcccaagtagctaggactataaggcatgcaccaccatgcccagctaatttgttgtagagatagggtttcaacatgttgcccaggctggttttgaactcctgaactcaagtgatctgcccacctttgcttcccaaagtgctggcattacaagcatgagccactgcactcagcctttcttttcaattattttattttattttttatttttttgagatggagtcttgctctgtagcccaggctgaagtgcagtggcaggatcttggctcactgcaaactccgcctcccgggttcaagtgattcccctgcctcagcctcccgagtaactgggactacaggtgcatgccaccacatctggctaattttatgtattttagtagagacggggtttcaccatgttggccaggatggtcttaatctcctgacttcgtgatcctcccacctcagcctcccaaagtgttgggattacaggcgtgagccactgcgcccagcctcttttctttttaaagatatatcccaattctggctgggtacagtgactcacgcctgtaatcccagcactttgggaggccgaggcgggaggatcacgaggtcaggagttcaacaccagcctggatgacatagcgaaaccccatctctactaatacaaaaatttgctgggcgtggtggtgggcgcctgtaatccctgctactggggaggctgaggcaggagaatcgcttgaacccaggaggcggaggttgcagtgagccgagatcacaccattgcactccaacctgggtgacaagaggaagactccatctcagaaaaaaaaaaaatttaaacataccacaaacactataataagccccaggtacccagtttcaacagttattaatattttgacaattattttcctctatactcttcacttttttttttttttaattcctggagtattttgaaacaaatcacatacagtaaatcaactcttcatcactttggtattacttcctgttgtcttgtagattcacagactgttataaccaaaaaaataacataatctagttgacctcattctactgataaggatatggagaaacagttgtatttggtagtgtattggaagtattttcctcctataatattctccagtgcccatgatccaatgtaatgatggaaggcccagcaagctaggtgatgctaacccttagtggcagagcaaggcaacccaaagcagctcagcacggatggttagagacgtagtacctactgtggtaagattgttaaaaacatggggccgggcacggtggctcacacctgtaatgccggcactttggaaggcctaggtgtgcagatcacctgaggtcaggagttcgagaccagcctggccaacacggggaaaccccgtgtctagtaaaagacaaaattagccaagcgtggtggtgcacgcctgtaatcccagctactcacttgggaggccgagtcaggagaatcacttgaacctaggagacggaggttgtggtaagccaagatcacgccattgcactccagcctggggaatgagcgaaactccatctcaaaaaatcacaaacaaaaaacaataaggagccacagactatacacatgatcagaggcaaagtgtgggaatgaagttctttttttcttctacagtggtcaacttaggataaatttttttaaatcataaaccatggtttagccactgaggcaccgctatatcattaatctcactatctgaacttattgcaattttcttttccttgttttatagtaatattcaataaaatatactgtgttttactgcacttgcagatactgcttttttgtttgtttgtttttttgagatggagtcacactctgtcacctaggctagagtccagtggcattatctcggctcactgaaacctctgccccctggcttcaagcaattcttctgccttagcctccctagtagctgggatgacaggtgtgccctaccacacccagctaacttttgtattttcagtagagacagggttttgccatgttggccatgctggtcctgaactcctgacctcaagtgatctgcccaccttggccttccagagtgctgggattacaggtgtgagccactatgcccagcccaggtaatgcaattttttttttttttttttgagacggagtcttgctctgttgcccagacagaagtgcagtggcatgatcttggctcactgcaacctccacatcccgggttcaagcaactctcctgcctcagcctccctagtagctgggattacaggtgcgtgccaccacgcccagctaatttttgtatttttattagagatgggtttcgccgtgtttgccaggctggtcctgaactcctgacctcaaatgatccacctgccttggcttcccatagtgctgggattacgggtgtgagccactgcgcccagcccagggactgcatttttttttttttttaacaaattgaaggtttgtgacaagcttttgttgagcaagtctgttgacaccatttctaacagcatgtgctcactttgtgtctctgtgtcacatgttggtaattctggcagtttttatttttattatttatttattttgagacggaggctcgctctgtcacccaggctggagtgcagtggcgtgatctaggctcactgcaagctcagcctcctgggttcacaccattctcctgcctcagcctcccgagtagctgggacttacaggggcccgccaccacacccggctaatttttttgtagttttagtagagatggggttttaccatgttagccaggatggtcttgatctcctgacctcatgacctgcctccctcggcctcccagagtgctgggattacagccactgcgcccggccaattctggcagtttttaaaaccttttcatcattatgtctgttaacactgatctgtgatcagtgatctttgctgttactattgtaattgtgggatgccacaaaccgcacccattgaagatagcaaacttaatcaatacatgcctgtgttttgacttccaccaactagccattcagtcttgccttctcaggccaattaataacccaacaatggcctttaagtgttcaagtgaaagaaaaagttgcaagtctctcattttaaatcaaaagctagaaatgattaagcttagtgaggaaggcatgtgaagtcatgccaaattgtgaatatgaagaaaaaaaatggggttaggcgcggtggctcacgcttgtaatcccagcacttttgggagactgaggcgggtggatcacatgaggtcaggaattcaagaccagcctgaccaacatggtgaaaccccatctctactaaaaatacaaaattagccgggcatggtggcgcacacctgtaattccagctctttgggaggctgaggcaggagaattgcttgaacccgggaggcggaggttgcagtgcaccaagaacacaccattgcactccaccttgggcaacaagagcgaaactccatcaaacaaacaaacaaataaataaatggaaattaaaagtgctattccagtgataagctgatatggagaaagtttgagtggtatgagtagaagatcaaatcagccacaacattcctttaaactaaagcctaatccagaacaaggccctaactctgttcaattctgtgaaggctgagaggtgaggaagctgcagaagaagtttagagtatcaaatgttggctcggtgcaatggctcacgcctgtaatcccagcactttgggaggccgaggtgggtggactggttgaacccaggagtttgagaccaacctgggcaacatggtgaaatgctgtctctacaaaatacaaaaaaatttagccggatgtggtggcgcacacctatagtcccagctgcttgggaggctgagaaggaaggctggcttgagcccagagaggtcgaggctgcaatggagctgtgattgtgccaccacactccagcctgggtgggtgacagagcaagaccatcttaaaaaaaaaaaaaaaaaaaaaagcagaggttggttcatgagatttaaggaaagaaaccttctccataacaaaagtccaaagtgaaacagcaagtactgatgcagaagctacagaaaatgaaagtgggtacactaaagaacatattttcagtgcagatgaaacagccttctgttggaagaagataccatctcagactttcataggtagaaaggagaagtcattacctggcttcaaaggagctggtcacagtgactcacatgtgtaatcccagcactttgggagaccaaagtgggaggattgcttgagcacaggagttcaagaccagcctgggcaacatagcaagaacctgtctctacgaaaaatttaaaaattagatgggcattttagtgtgtacctgtggtcccagctacttggaaggctgaggtgggaggatcacttgagtctgggatgtcaaggctgtagtgagctgtgattgtaccactgcactccatccaaaagaaaaagaaaaaaaagcttcaaaggacaggctttcttgttaggggctattgcagctggtgactttaagttgaagtcaatgctcatttactattactatctatagctactatagatagttattcctctgatggatctgggcaaagtaaatcaaaaaccttctggaaacccagctaaattttgtatttttagtagagacggagtttcaccatgttgaccaggctgttctcaaactcctgatctcaagtgatctgcctgcctcccaaaatgctgggattacaagcgtgagccattgcgcccgaatggaaattaaattaatttccactgagacatttgtttataagtactgtgctttgtctgaattaattaattcctacgtggaatttcaaattaatgacactttatttcatattttgctttttggttaactatattcacaagattacattactatatgtgtggtgtgggtgtgggacttcatttaccaataaactcaatatattgttatttgttcttttttagtatccactgacatgaatatttctttttagctatgtgatttttttttttcttttttaagatggagtttcgctcttgttgcccaggctggagtgcagtggcacaatctccgctcactgcaacctccgcctcccaggttcaagcgattctcctgcctcaccctcctaagtagctgggattacaggcacccgccaccaggcctggctaatttttttatttttagtagagacagggtttcgccacgttggccaggctggtctcgaactcctgacctcaggtgatccacccgccttggcctcccaaagtgctgggattacaggcgtgagccatcatgcccgggctagctatgtgatttttatgttgtattttgttaatagaattctcctagcctgggaaacaaagtaagaccccatttctgccaaaaaaaaaattagtagggcatggtagcatgcacctgtagtcccagctttgggaagctgaggcaggtagatcagttgagcccaggaattcaaggctgcagtgagctatgattgtatcactacgttctaacctgggcgacagagcaagaacttgtctcaaaaaaaaaccaaaaaaaacttcatactatatattaatacaatttatttttcctttaccaaaccactttaaaattgcttttagcacatgcatgatgaaatattttcttaaagtgcttttcttgtaaaacatttatttattttttaagacggggtattaccatgttgcctaggctgctctcgaattcctgggctcaagctatctgcccactttggcctctcatagtgctgggattacagtaggtgtgaaccactgtgcctgaccaaaatgtttctttctaatatttaaatatgtcttatataccagcaaatatgatgacttgctcaagaattgtaatgagagctaaaatcaacatctgactcttcatcagtaatcttttcagaggataaggaaaacaaaatagatggcttgctagggtaataggattcccttttctttctcttttagtctgcgcatttttttcttttttatttatttatttatttatttatttttttattgatcattcttgggtgtttctcgcagagggggatttggcagggtcataggacaatagtggagggaaggtcagcagataaacaagtgaacaaaggtctctggttttcctaggcagaggaccctgcggccttccgcagtgtttgtgtccctgggtacttgagattagggagtggtgatgactcttaaggagcatgctgccttcaagcatctgtttaacaaagcacatcttgcaccgcccttaatccatttaaccctgagtggacacagcacatgtttcagagagcacaggattgggggtaaggtcatagatcaacaggatcccaaggcagaagaatttttcttagtacagaacaaaatgaaaagtctcccatgtctacttctttctacacagacacagcagccatccgatttctcaatcttttccccacctttcccccttttctattccacaaaactgccattgtcatcatggcccattctcaatgagctgttgggtacacctcccagacagggtggtggccgggcagaggggctcctcacttcccagtaggggcggccgggcagaggcgcccatcacctcgcggacggggcggctggccgggcggggggctgacccccccacctccctccaggacgggacggctggccgggcggggggctggaccaccccacctccctcccggacggggcggctggccgggcggggggctgacccccccacctccctcctggacggggcggctggctgggcggggggctgaccccccacctccctccccgacagggtggctgccgggcggagacgctcctcacttcccagatggggtggctgccgggcggaggggctcctcacttctcagacagggaggctgccgggcggagggtctcctcacttctcaagatggggcagccgggcagagacgctcctcacctcccaggcagggtcgcggccgggcagaggcgctcctcacatcccagacggggcggcagggcagaggcgttccccacatctcagaccatgggaggccgggcagagacgctcctcacttcctagatgggatggcggccgggaagaggcgctcctcacttcctagatgggatggcgggcgggcagagacgctcctcactttccagactgggcagccaggcagaggggctcctcacatcccagacgatgggtggccaggcagagacgctcctcacttcccagacggggtggcggctgggcagaggctgtaatctcggcactttgggaggccaaggcaggcggctgggaggtggaggttgtagcgagccaagatcatgccactgcactccagcctgggcaccattgagcactgagtgaacgagacgagactccgtctgcaatcccggcaccctgggaggccgaggctggtggatcactcgcggttaggagctggagaccagcccagccaacacagcgaaaccccgtctccaccaaaaaaatatgaaaacctgtcaagtgtggcggcgcgtgcctgcaatcgcaggcactcggcaggctgaggcaggagaatcaggcagggaggttgcagtgagccgagatggcagcagtacagtccagctttggcttggcatcagagggagaccgtggaaagagagggagagggagaccgtggggagaggagggagagggagagggcgcatttttttcattaactttcttttttaatataagcaaaagacaaaccttgattttagttctatgaacaatttgtttagtaaggccccagtcaacttgattatttttcaacaactgtgaatttatataatgatagccattttacatgatttgtagttttaaatgtttaaatgttaatcagattagttagctctttttgtgtttattaggggtaaattacctttctcttctgaagcgacaattatacatccatgattgctttgaccagaatatacgagggtatccgcaatccagcatgtaattaaattacaatctgagttaccctttcttgaatgtgacattctttccgtctcattcctattacaatgtaattttcaccctgacttaggtgttaggaatgcttcagagactagttattttttatttcttatatgattttttattcttacccatattgtgtttttccccacccctagtacttacaaccttttattctgtggttcttgtgggattcccgttggtttccatctgtattctacccatgctgccctggctgccttgagaggtcacttctgcctttccagtgacaaaatggtgtggtgagtagacttagatattgatcatcaaatacattttattttatttattttgagacaaagtccatcaaataaattttaaaaggtttttcaggaaagacaaagtaggctgagcacagtggcttatgcctgtaatcccagcactttaggaggctgaggcggtggatcactcgaggtcaggagtttgagaccagcctggctaacatggtgaaacccatctctacgaaaaatacaaaaattagccaggtgtagtggtagacgcctgtaatcccagctactcaggaggctgaggcacgagaattgttggaacctgggaggcagaggctgcagtgagctgagatcacgccactgtgagatcacgccactgcactccagcctgggagacatagtgagattctgtccaaaggaaaaaaaaaaaaaagtagctgggcatgctagtgcacacctgtaatcccagctacttgggaggctgcggcaagagaattgcttcaacctgagaggtggaggttgcacagtgagctgagattgcaccactacactccagcctgggtgacagaacaagactctgtctcaaaaaaaaaaaaaagaaaaaagacaaagtgtttgtaccaaaaagatgctaaagtcaggcactgtctttgacaaaaagatagcagtgggccaggtgtgatggctcgcgcctgtaatgccaatgctttgtgaggccaaggtgggaggactgcttgagggcaggagttcaagacctccatgggcaatatagtgagactcctgttttttttttatacaaaattttaaaaaattagctggatgtggcggcgtgcccctatagtcccagttacttgggaggctgaggtgggaggatcacctgagcccaggagttcaaggttacattttgctgtgatcataccactgcattccactttgggtgacaaaaaaaaaaaaaagcagtgggaccaaaatataatcttataacattatgattatcttccatgtcttatcataccatatcttaaaagtcataccatgggaaaattcagagggtattctttcattaaagaaacttgttgccagatgtggtggtgtgtgcctgtaattctagctacccaggaggctgaggcaggaggatcacttgaatcttggtgtttgagaccagcctaggcaacatggtgaagcctcccatctcaaactgctcccttatgggccgggtgcagtggctcacgcctgtaatcccagcactttgggaggctgaggtcgggggttcacctgaggtcaggagttcgagaccagcttggccaacatggtggaaccccatctccatttaaaatacgaaaataagccaagtgtggtggcacacgcctgtggtcgcagctactcgggaggtgaggcagaagaattgcttgaacccaggaggcggaggttgcagtgagccaagatcaagccactgcacttcagcctgggtgacagagctagactctgtctcagaaaaaataaaaataaataaaagataaaaagaacattctagaaggcaagcttttgcaaaataatgttgcagtagataccttttgggtttgtgcccagcctctctctccctctaataggtggggccttgtatatttgtatcatgtgtgatttgtatcatgtgtgattcccactcccaggtactggatcaagaatgaatacctggccaggcatggtgggtcatgcctgtaatctcagcactttggaaggctgagttggaggattgtttgagcttaggagtttgagaccagcctaggcaacatagcaagactctgtctctacaaaaaatttaaaatattaactgtgtatggtggtgtatgcctgtagtcctagctactctggaggctaaggtgggaggatagctacagcccaggagttcaaggttacagtgagctatgattgtgtcactgtattctagcatggggagcagagcaagaccctgtctcttaaaaaccaaaaacggtgctgggcgtggtagctcacgcctgtaaccccagtactttgggaggccgaggtgggcagatcatgaggtcaggagatcgagatcatcctggccaacatgggaaaccccgtctctactaaaaatacaaaaaaaattagctgggcatggtggcgcatgcctgtaatcctagctacttgggaggctgaggcaggagaatcacttgaaccggggagtcagaggttgcagtgaaccaagatcgcgccactgcactccagcctggcaacagagcgagactctgtctcaaaaaaaaaaaaaaaaagaaaaatggatacctgacccaaactaagccaaccagttttctaccttaggaatttgaaacaagggcccagaaataccagttacgtgtagatagtactagtgttgaagtttggaagtgaaagctctatgtatgggatagctatttcccatgtgatgcatgtagctgcagggaagtcttctctgcagtaaaacatgaagcagacacagagaaaagtaaaaataatgatcatgtagcctcatagtgtcagaaaaactaccctactggttatcctttctcatgaattacattggctatttcattattttcctaataaattgcacttttaacttaagcttttttacttattacaagaaactgaaacatccttagaagtctttccttgaccattaaaaaacaaaaacaagcattgacaacctagtttatgtaggcattatgcttatatcactgagttcttaatatagtttaagaaaactagggctcaaagaggtggaagagctgagatttgagcatgtcttaactcaaaagcttattttcctttcataaaactaaaaggtttcctttttctcatgtctttttttttttttttttttttgagatggagtcttgctgtggcgcccaggctggagtgcagtgacgtgatcttggttcactgtaagcttcaccccctgggttcacaccattctcctgcctcagcctcccaagtagctggaactacaggcgcccaccaccacgcttggctaattttttgtatttttagtagagacggggtttcactgtgttagccaggatggtctcgatctccttgacctcgtgatccgcccgccttggcctcctaaggtgctgggattacaggcatgagccaccgcgcccggccgctttttctcatttcttatgcttagatagatgtttttagctgagttatggttgactaaacaataaaacttatcagccagtcctttaccatgggttgctcactgtgcattaggtataccatttgttcttcattgcaaatttccaacacaaaatatatacctgagatcctgagatggattgatcattctctttttttaaagacggagtctcactctgtcacccaggctggaagtgcaatggcatgatctcagctcactgcaacctgcacctcctgggttcaagtgattctcctgcctgggcttcccaaaatgttaagattacaggcattaatcaccatgcccagcctcaatttttagattctttttttttttctttgagacggagtcttgctctttcgcccaggctggagctggagtgcagtggcaccatctcggctcactgcaagctccgcctcccaggttcacgccattgtcctgcctcagcctcccgagtagctgggactacaggcgcccgccaccatgtctggctaatttttttgtatttttagtagagacggggttttaccgtgttagccagcatggtcttgatctcctgccttggccacctaaagtgctgggattacaggtgtgagccactgcgccaccaatttctagattcttaagcaatttctatttagaattaactttaaagtgggaaaaaaaactgtaaatgtgtgctgttagtaatcccacatcttttttagaaatcagtacaaaagtaaatgttctagagaagcaataattgcatttttgttagggcagtaagcttttagtaacatatttttaacataaatttgaaaagcattatgggattttggttaatttcttaatctttaaaatgagttggataaaaggtcaggacattctttttgattaagtagaaactttggccttttcctcttggattcgggatggctgctgcaattacagtcattacatctattgatgatagcatcctaaacatgaaggaaaaggatatggagagtatgggaacacaagaaaattcccccttttcatcagcataaattttttttttttttttgagacagagtcttgctctgtcacccaagttggaacacagtggtgtgatctcagctcattgcaacctccgcctcccaggttcaagtgattctcctgccttgcctcccaagcagatgggaccacaggtgcgctccaccacagcctgctaatttttgtatttttattagaaatggggttttaccatgtttgccaggctggtctcaaactcctgacctcaggtgatccccccgcctcggcctcccaaagtgctgggattacacgcataagccactgcgccccgccagcataaattttcttaatcttttttttattctttttttttttttttttgagacagggtctcactgtcacacaggctggagcgatcatggttcactgcagcctcaaccttttgggttcaggtgatcctcccaactcagcctcccaagtagctgggactacaggcatgccaccacatctggctaatttttgtattttttgtagagatggggtttcgctggccaggcatgttggctcacagctgtaatcccagcactttgggaggctgaggcaggcggatcacttgaggtcaggaattcaagaccagcctgtccaatatggtgaaaccctgtctctgctaaaaatacaaaaattagctgggcatgatggtgggcacctgtaatcccaactgcttgggaggctgaggcagaagaattgcttgaacctggaaggcggaggttgcagtgagccgagatctcgccattgcacttcagcctgggtgacagagtaagactctgtctcaaaaaaaaaaaaaagagatggagtttcgctatgttgcccaggctggtctcaaatttctgatgtcaagccatctgcctgcctcagcctcccaaagtgctgggattataggtgtgagccagcacacccatcccattttcttacccttgttggccagaactatgtcacatgatcacctcatctgagaaagcaaatatgtaacagtaggctcatggcaaaaatctggattctgttggcaataaagaagtgaggaaggctgggctcggctcacgcctataatcccagcactttgggaggcccaggcagggggatcacctgaggtcaggagttcgagaccagcctcgccaacatggtgaaaccccatctctactaaaaatacaaaaattagctgggcgtggtggcgcaagcctgtaatcccagctactcgggaggctgcggcaggagaatcgcttgaacccaggaggcagaggttgcagtgagctgagattgtaccactgcactctagtctgggcaacagagcgagactccatctcaaaaaaaaaaagtgaggaacagctactgggaataggtgaccaacactatgtctcatactgggattactttctttcaaactgtgctacaggatcctactgatgaagtgtaaagcttataatcatcgtaattattcatatgagcctggtttttgtctttaatttaccctgagataattttgtctctggtgggatgcggcagagatcctctccaatttgtttatttttgaatttgtttttccaagaaaatgcagtcatccttcagtatctgtggttccaggacctcaccagataccaaaatccatggacactcaagtttctgatattaagtggtgtaatatttgcatattacttttggatatcctcctttttaaagtataaaagtatatattttatactttaaaataatctccagattacttatgacagctaacgtaatgtaaatgctatgtacattacaaatttacataggaaatttacaaagttgttgtaatgttaagggaatgatgacaagaaaaagagtgtacctgttcagtacagacacaatccagtttttttttcctgaatatttttagtctgtggttgtttgaatccatggatgctatacccatggatatggtgggccaactgtaacatcatgagtcttgaaatgaaaatcattaagaagccaggctttttttgacacatactttctttagaaggtaagtttggttcttttataatcttaaccatggtatgacactaatatttttcttttttcctatctagctatctcttaaaaacaaaagccatagtaaatgcatcagagatggatattcaaaatgttcctctatcagaaaagattgcagaggtaaaatttcatgatggttgtatgcttttttaaaatacagacaactcttgataacttctaccaatgaacttggggatgatgaaatggcatgatgctcaataatcctttttacttgatttgaccttccctattgaatttgtaatgaaaaacaaaatactaaaaccacactgtaaggtatagttcaggaagaaaggaaaagctgctcaactgctgcactcctgcattctcctttgtgctgggaatggatatcatcatcttgccatagaggtgtcttctttgcaaataccttgtaattgctcaactgtctcagacataagagtgatgaaacagttattaagaattcctggccgggcgtggtggctcacgcctgtaatcccagcactttggtaggccaaggcgagcagaacatgaggtcaggagatggagaccatcctggctaacacagtgaaaccccatctctattacaaatacaaaaaattagccgggcgtggtggcacgtgcctgtagtcccagctactcgggaggcagaggcaggagaattgcttgaactgggaggtggaggttgcagtgagctgagattgcgccactgcattccagcctgggcaacagagcaagactctgtctcaaaaaaaaaaaaaaaaaaaatttagccggtcatggtggtgggcgcctgtaatcccagctacttaggagactgaggcaggagaatcgcttgaacccaggtggtggaggttgcagtgagccgagactgcgccactgcactccagcctgggcaacagagcgagactgcgtctcaaaaaaaaataattcttgcctgggcgtggtggctcacgcctgtaatcccagcactttgggaggctgaggcggatggataacccgagatcagtagttcgagaccagcctgaccaacatggagaaaccctgtctctactaaaaatacaaaattagccgggcgtggtggcacatgcctgtaatcccagctacttgggaggttgagacaggagaagcacttgaacctgcgagatagaggttgttgtgaggcaagatcatgccattgcactctagcctgagcaacaagagtgaaaatctgtctcaaaaaaaaaaaaaagaaaaaaagaaggctgggcatggtggcttatgcctgtaatcccagcactttgggaggctgaggcaggcagatcacctcaggtcgggagtttgagaccagcctgaccaacatggagaaatcccatctctactaaaaatacaaaattagccgggcgtgttggcgcatgcctataatcccagcttttcgggaggctgaggcaggagaatcgcttgaacctgggaggcagaggttgcagtgagccgagagcttgccattgagagcgaaactctgtgtggaaaaaaaaaaaaagaattcttattggctgggtgcggtggctcacacctgtaatcccagcactttgagaagccgaggtgggtggatcatgaggtcaggagttcagcctggccaagatggtgaaaccccgtctctactaaaactagaaaaattagccaggcgcagtggcaggcgcctataatcccagccccagctactcaggaggctgaagcaggagaatcgcttggacctggatggcagaggttgcagtgagccaagatcacgccattgcattctagcctgggtgacagtgagaatctatttcaaaaataataataataataattggtatgggaaatgactttggaatggcagtatgaggagttccatggataggatccaggaagaatattataaaggaaacaaccatcttaagtctgtggaaattttcttcaaggtatatggcaaatacagaaacatttatttgtttatttatttttgagacaaagtctcactctgcctcccaggctggaatgcagtggcacagtcttgggtcactgcaaccccctcctcccgggttcaagcgattctcccacatggagaatccttgtctctactaaaaatactaaaaagcctcctgagtacctgggactacaggcgcgcactaccgtgcccagataatttttgtatttttagtagagacggggttttaccatctctgctaaaaatgatggccaggctgttctcgaacttccgagctcaggtgacccacccgcctcggcctaccaaactgctgggattacaggtgtgagtgccaggttcaagtgcttctgcttcagcctccccagtagctgggaacccagttgcccttgcccccagcttgcttgtagggtggaaatcctatgctgggaggggcgaatggagattatcagaagccactgctcttgccctgctgagtaacaacactaaatttcatgctaaatatagctgtaagaactcttaaaaattacctaattgcaacagttatctgttctaaacctaataaccagagttaactttgcagaccattagtagaatgttaaagtcagagaggcatttgttactgttaacaaagtgttaaaagaaaagctaaattcttgccactggaaaaggaggagaagcctgtctccacaaagcactgtgaccagactttattcatcttcacagtagcagtgctgctcagcaatgttttgtcttttttcacacgaaactttacatctgaggatcttttttttttttttttttgagacggagtctcgctctgtcacccaggctggaatgcagtggcacgatcttggctcactgcaagctctgcctcctgggttcactcattctcttgcctcagcctcctgagtagctgggactacaggcgcccgccaccgtgcccagctaattttgtttttgtatttttagtagagatggggtttcaccgtgttagccaggatggtcttgatctcctgacctcgtgatctgcccaacttagcctcccaaagtgctggggttagaggcgtgagccactgcgcctggccacatctgaagatcttactgtgcgctacgttgttgtataaagttcttccagaattagaagaaatttattcctcaaatgcatttagacattgccagctcccaattactagatataaactagcttaaatttgaaatggtgtttgtgaccagcaaattgacagttaagcttaaaatgcccagatatccatcttggtgtggtggctcatgtctgtaattccagcactttgggaggatcactgactgccaggagttcaacaccagcctgggcaacaaagcaagacccccatctctacaaagaaaatttaaaacacatgactgtagtcctagctaatcaggaggctgaagtgggaggatcacttgagagcaggagcttgaggctgcagtgaactatgaatgtgccactgtactccagctcaggcaacagagtgagaccctgtctcttaaaataagtaaaaataaaaaaagatgccctgatatctatatatttctcttcctagctgaaagagaagatagtgctaacgcacaatcgcttaaaatcactaatgaagattctgagtgaagtgactcctgaccagtccaagccagaaaactgatcctgtaccaaagcttgagtgtcaggttcaggctttattgctgtcttcaacaacaggtgctgcttagtcatttcttgaaaaagattggcttcaagaatggaggggaaatgcagtttctatttacctttaggctgattttccaaattatttgtgaagctgtttttagaagatgagagactaaggattcttctcttttatagctatttgccttaagaacttactttagattcttattgaattcataatacttatctctgaaaatgtctttgactgtaaatttaggaattaagatgcagagtcccatgtgtcctctgatctaaagttgcatggttggtctgaaaatagagttgggcttaatgttgacttctattactcctgcatggagcagttgttatgaatactaatacatcactttttaacttctgtaaaatacagatcataatattctataggtaatgtttaataaattgcctgaataatataca

SEQ ID NO: 160 - DNA, 32744 bp, Homo sapiens
  source 1..32744: mol_type = other DNA
cgttacaggccctttggcgcctgcgtattcgtgaagtgtgaaaaaagcgcgcctctgttgggacgggaaatcagcctttctattggtcagggttagaaaccccgcctttgaggcattttcaaccaatggaagcgcggcattcttcatttaaactgtctataaatttctgcctagtcaaagttaagagtggcgccagggatttgaaccgcgctgacgaagtttggtgatccatcttccgagtatcgccgggatttcgaatcgcgatgatcatcccctctctagaggagctggactccctcaagtacagtgacctgcagaacttagccaagagtctgggtctccgggccaacctgagggtacggcgctggcggtgcgggtccctgggcgggcgcggcgggaatagcggcctcggggagatgcggtgcgaagggaccgagagggaagcccgggactgaggcagctctccctgcccctcgggcagtagatgtggttcacggtagtcccagttagaactctgataaacggaagaggaactgtagttttcacctcattttgaagctggcttgtctgggtgctcacatgataagctctattccgagggatggtttattgttttttgttttgttttgttttgaaattactgtatacctctcagggcgtcgattacgaaactcaggcccagaaagcacaaggggtgtcgttaatcgttagacaattaagtaaataattggctcagcttctggaaaaccccaaacagactccagtgatttgtaatattgccgataatctcttgatactttattgatggacctgtcagaaaaaaaaaatcgacttttaggggagcacctccttgggtaaatttttattgatgactgttgggttgatggtctctatcaaaaccagtaaggtctttgactccgaggctacaagatgtttggagagttggcccggcgctgtggctcacgcctgtaatcccagcactttgggaggtcgaggcaggcggatcacctgaggtcaggagttcgagaccagcctggcccttaaaaaattagccgggcgtggtggcacacgcctgtgatccaagctttttgcctgtgatcccagctacttgggaggctgaggcagaagaatcgcttgaacctgggaagccgaggtggcagtgagccaagatcgcaccactgcactccaacttcggtgacagagagagactcagtctcaaacaaaacaaaaacaaacaaaaaacccaagatgttagaagaagatttggggatttaatgtaggatagcggttttatatattttgttaatagttgagacttcccacataatactgctatatactctggaggtttctcctgcaggctgtgatactgacagtgagtaaatgcttaaatcaatcgtcacaattttttttttatttgtttgtttgtttgttttttctttgagacggagtcttgctctgtcgcccaggctggagtgcagtggcgccatctcggctcaccgcaacctccgcctcctgggttcaagcgattctcctgcctcagcctcctgagtagctgggattacaggcgcgtgtcaccacgcctggctaatttttgtatttttagtagagatggggtttcaccatgttggtcaggctggtctcgaactcctgacttcctgatccgcccgcctcagcccccaaagtactgggattacaggcgtgagccaccccacccgacctaaattgtttaaacaaaataatcagggcctaagtgcctgttggggctgaatgaccaaagggttttccttggggatatttctgggctgtagtggttagtggctcctctatacttcgtaaacaaagccttaatatctcagcctaaattccttaggcttttttgctgcctagctagaatcttttatccaaggctgcatccctgaacacttggcacttttatctatctttgtcccattgctcattttgaccctctagcctcagatcaccttctttctcctttatctgcctggctgtgtgtgtgtgtgtgtatttttagtagagatagggtttcaccatcttgcccaggctggtcttgaactcctgggctcaagcgatcctcccgccacggcctcccgaagtcctgggattacaggcgtgacccaccacgcctggcccatatcaagtatttatatgtgaatcaagtatttataggtgaaatgttatgatacctgtaaaatttgctgtaaaatactcaaggaaaaagagagggaaactagatgaagtaagaacagaagaatgttaataattactgaaactggagataggtacatggggggattgcactattctctctacttttttaggtttgaaattttccataataagatgttttaaattattaacttggtacaacctaagagctcattaagtcaattgccttttgaaattttagtacatagcaaaaaaattaataaattgctctgagaaattatcaagatttgattaaaatgaaacactacaatttaaataaattttactagcataaatatactagtataattatgctaataaaatttataatttatactagtatatactatatatattattactagtataaatatataatatatatactagtatatataaatatactaggatactaaatatactaaatacactaaaataaactaaatatataaatatactatatatactaaatatactatattaatatactatatgtactagataaatatactataaatatactatataaatatactaaatttacatatttagtatttagtgtgtattagtatatatatttagtatagatatactatatactaaatatactatatatactaatatgtatactaaatatatttaatatactaaatatattatactataaataaatataaatactatacttaatatactatatactaaatatactatatataaatatattaaatatataaatatactaaatataaatatactaaatatagtatgtatgtttagtataaatatactaaatatactatatttataccggtataatatactaaatatgctatatttataccggtataaatatactaatatactatattatactggtataaatatactaaatatactatattataccagtataaatataaatatactaaatatactatatttttatgtatactagtatatttgtactagtaaaatttatttaaattgtaatgttttattttaatcaaatcttgataattttactagtatgatattattaaaaataaatttatggccgggcatggtggcttgcacctgtaatcccagcatttgggaggccaaggcaggtgtctcacctgaggtcaggagtttgagaccagactggccagcatggcaaaaccccatctatactaaaaatacaaaatttagccaggcgtggcagggggcacctgtaatcccagctactcgggaggctgaggcaggagaggagaattgcttgaacccagggaggcagacgctgcagtgagccaagatcacaccattgcactccagcctgggcaacaagagcgaaactccgtctaaaaataataataataataataataataataaatatataggagataatattccctcttttgagagacttctcttaatggtatagcaatttgaaggagccagttattaatgttagtggggcgactggtcctgttgtcactcatgccctcacttcctttcttgcgagcttaaattacaaacactggcactatttccacttccttgcacctccctatactcacctggcaaaacccaagcctgattaaacccagctatgtgcttaatctttgcctatacctctgcagctaactctagttggagaaaacacctaactttgttgagcgaacttattttaaatatgcaacgctaaaccttaatatgggcatttgatcctcctccttttggtttttttttttttttttttttgagataaggtctcgctctgttgcctaggctgcagtggcacaatcaggcctcactgcagcctcaacctctcaggttcaagacatcctcccacctcagcctcctaagtagctgggattacaggcacgtgccaccacacctggcccattttcttcttagtcatgaactttcctacttttgaggataattactttttatcatcttgactcaacttggttcccttccctcccttgatgactttacctcataggtcatgggaaaatagatgcaatcaacagaaaactgccttatcgttcaaccaccaaatccccccctttttttcctttccttttctttttttttttttttttttttttttgagacagggtcttgctctgtcagccagcctggagttctctggagtgcagtggcacaatcaggactcactgcagcctcaacctcccgggctcaagcaatcctcccaccgcagccccctgagtagctaggactacaggcatgaccaccctgcctggccagtgtttttttgaattttagtagagatgaggtctgactatgttgccctgtctggtctccaactcctgagattcagcgatcctcgcgccttggcctcccaaagtgctgggattacaggcgtgagaccctaggcttggccccaccaccaaaccttttagccaccctgcatctacatccacatactctgcttctttgcctgtctaagggcaacctttccatttatgctgaagatcctgggccctcttgcttcccctaggactacattcctacaattagagcctctctcctcattaatttctccactctgctagcttatttgccataaggcatgcaatcatgttttactatcacccatcttttaaaaaaataaaaaagccaaaatcctctcctgatcccatgtcctcattccatctactgccctatttctctgttcttttctactgaaattgctttattaaggtcgccatcttacaaagcttgtgttccctctctcccctcacctgtgcctatcagtagcatttggcatgattgaacattcccctctgctccaggcactttctgttctaggctttgatatttcacgctgtcctgccttactagcacttctttctagtctccttggttggttcttcatctgccagatctctaaatgtggagtgcccccagggctctcttcctggttgtcttttctctaactatgctctatccctcggtgatcttatccaccccatttttttttcttttcttttttctttttttttttttttttttgagtcacagtcttgctctgtcacccaggctagagtgcagtggcgcaatctcggctcactgcaacctccacttcccaggttcaagcgattctcctgcctcagccacccgagttcctgggattataggtgcctgccaccatgcccagctaatttttttgtatttttagtagagacaggacttcaccatgttggcctggctggtttcaaactcctgacctcaagtgatccacctgccttggcgtcccaaagtgctgggtttacaggcatgagccactgcgtccggcccattcccataagttaaaatttacccaaaagctaatgcctcccaaacccacatctccagtaggacctctctctcccctgggatgctgactcgtgtatttaagtgcattttcaacaacacggtcaggtccaagcattgacagtctcttccccatctcagtacattgttcaggcccagtttggatcaccctggattcctctcttcttcacccacagccatccattcttgtcagcacctcctcctaaatagacctgaaatctgacctctgggcaccatctccagcgctgcaaacctgtgccacagcactctcatctcctgaccactgcctcagtctccctattgggcttcctgcctcaactcttacctcacaatagtgttctcttggtagttggagtgatatttgaaacttagggaaaagaaaaaaaagagagagagaccaggcgccaggcgcagtggctcatacctgtaatcccagcactttgagaggccgtggtgggtggatcacttgaggccaggagttcaaggccggcctggccagcatggcaaaaccccgtctctactaaaaaaaaaaaaaatacaaaaattagccaggcgtggtggcatgtgcctataatcccaactactcgggaggatgaggcacgaaaatcccttcaacctgagaggtggaggctgcagtgagccaagatcacggcactgcactccaccctgggcgacagagcgagactctgtctccaaaaaaaaaaataaacttagaacgtgtctttctgctcagtgccctccaatgacttccctcacatctaaaataaaatctaaactctttccagtgtaatgagagaaacttagtttgaccctgatttggagggaaatttttttaaaaagaaaatagctaaaattggagagaaggaaatttcattatgggccacatattaggtgatattaggaaattattgcttttcctgagtacactaatgcattagaggatcatgtggggaaatctcttatttttaggagatgtggctgatatatttagtggtaaagaatcatgatgtctggaacttattttcaaattctttcacaagaattatatattaatatagagaaaccaaatatgagacaatgcaaatgactattgaatcttggtgggaaatatgagtgtttattacattacttcgacttttcttttttttttttttttgagacggagtttcgctgttgttgcccaggctagaatgcaacggcatgatctcagctcactgcaacctccacctcctggattcaagcaattctcttgcctcagcctcccaagtagctgggattacaggcatgtgccaccatgcccagctaattttgtatttttagtagagacagggtttctccatattgttcaggctggtctggaactcctgaactcaggtgatctgactgcctcaggcctcccaaagtgctgggattacaggcgtgagccaccacacccagcctactttgacttttctataggcctgactttttttctaataacaatttaggggaagaaattaattttttttctatttttttattttttttgagacagactttcgctcttgtcacccaggctggagtgcagtggtgcgattccggctcactgcaacctccacctcccaggttcaagtgattctcccgcctcagcctcctgagtagctcagactacaggtgcccaccaccacgcccagctattttttgcagacatggggtttcaccctgttggccaggctggtcttgaactcctaactttgggtgatcttcctgcctcggcctcccaaagtgctaggattacaggcattagtcactgtacctggctgaaattcataatttttgctgtggcctttacctctctacttgacccagcctctggtcacatctctgatctccctgccctccatatacctcagtgttcaccatacttctaccataagggcagtttctgtctttcaactcatgagtccacctcagggctcctgttcttggcgctcgctctgctcggagtgctcttcacctgctgcctctttcctcattcacatctcgggaggcctttcccagccatcctaattcaggtagcatccccaccccaccccagttgcccagttttatttttgcatcataatacctgacgtcatatcattcatttctagctttcttgggtaactgtttcacctctgctagaagatcctggagggcaatcaccttgtctgtttaattaatcactctctagtgtctggaacagtgcccagcacaataaatgcttgttgaaggaatgcatgaatatatgctgataactaacatctgcaccttcagcacaactcttgaacaccacctcatatcattcaacctcctcactgggttctgccacaggtgcctcacttcatgcatttttgtatgtttggtgagattttgaaggtatattaagagagtattagaaaaatcaagaatgcctgaattctgccctgccaatcatccccttcccagagaaaacctcaagggtggttcaaggaacaagtagaaaataaggtaccactttattactagctgaaatagtgcctgatatcttgatgcagagcattctggtaaagtggattggagactgtggcttaggcttgcaccacaagcaaaagcttgagcacaaaccaaatttcaggatctctgctattctctactggacacatggcccatgataaaaggcatgagaagaatagagccaagcctggtggctgggcccaccttgagaaggatggctgtggccctcaactgcatggctgggtggaagaggaagaaaaaaagaacccaaccaaaaaacttgacttttgttttttaaacggagtcttgctctatcgcccagactagagtgcagtggcatcatctcctcggctcactgcaaccttcgcctcctgggttcaagcaattcttctgcctcagcctcccaagtagctgggactacaggcacacaccaccatgcccggctaatttttgtttttttattagagacggggtttcaccatgttggccaggctggtctaaaacccctgacctcgtgatccacctgcctcggcctcccaaagtgctggaattacaggcatgagccaccccgctcaaccaaacttgacttttaaagcacaggaaaatgtaaccaatcaaattaacattgttctttcaggaaagaacaagaagggaggttttcctaggctgggaagagaagctcagtgttcccttcccccggcagagacctacaaccatccccctaagaccccgtcaccttttgcattcctcatcttagggaccgtaccacacttcaccagctgtccaagccagaaacgttggcataacaaagtttccctcttcctcaactctcatgttcacactgatttcacttcctaagaaggttttgacttcatccatactgccttagccccgctccagttcaggccacagcatttctggctcatccccatcaaatgcatcttgcacattgtgcaggtagactactcattctgagtaatgcaaaattggtcacccactgccttgctgcaaactcttcagagactgcccttttctctgagagtaaagttcatactctttaaaggcttacaaggcctggtaacatcacggccctgctcactttcccaacattgtctcttactatctcctacaaacaggtccatgttccagccacactgaacttaagttcttcaaactccaccctcattgttgccttgctgtgccattcctctacctctttctctaccttctcttcatccttcagatctcagcaattagagacatcacatctttatctgagaactgccctgtgcagatacttgctgaagtctaacctagcagtcccaactttgatggccatgcctacctatgttctcatgacagcctgagcctcctagcgtgggcatttaccccactgtattgcaattgcctctttccttgtctaactttcccactcagatgtgaaattccttagagcagagacccattctttctaagtaatggttctagtcctatggtctgaccagagtacatttaatgaatacaagaacagcaaaaaatattcaacgtatcttccttgtttatttgacttttggctctaataataaggtctctcttgcaggcaaccaagttgttaaaagccttgaaaggctacattaaacatgaggcaagaaaaggaaatgagaatcaggtgagtaatgtttttcatgtttacctgttagctagcaaaataatcatatttggttaatgggcaattaacacacaactagtgatgatttaagacatgctgttggccaggtgttgtggctcacgcctatactcctagcactttggtaggcagtggcaggcggatcacttgagtccaggagttcgagaccagcctggccaacatggtgaaaccccgtctctactaaaaatacaaaaattagccagatgtggtggcgggagcctgtaatcccagctactcaggaggctgagacagggagaattgcttgaacccgggaggtggaggttgcagtgagccaggatcgcgccactgtactccagcctgggtgacagagcaagactccgttcaaaaaacaaaaaaaaagatatgctgtttattaaaaaagagatcattattggtaatagtgccaaggactgaatcctttcagattaactatctgctgttgtgaatggtgaaactgttttgcgccaagtaatctgttgaataacatgtttttacacagatacaaaggctgagtactagttgccaagtactacgagagatggcatgatttaagtagagagggaactggatttgaaatcagaaacaccttggtcaagtaccagctctcatttatttctctgcaacattagaaaactcaaactcctcttctttaaaatggaaataatatctgttctgctgaactgagtgttgtgagcatcacatgaagtagggattgtgaaagtgacttgtaagctataaaacactgctgatggctgatgggagttgtcatggccgcttcagacccacagcaaagatttttgataaggcatgactcctaaacggatgaatgagtgccccattagagccaagattcttttattctttttgttgttgtagttgttgagacagaatcttgctgtcatccaggctggagtgcagtggtgtgttctcagctcactgcaacctccatctcctggggtcaagcaattctcctgcctcagcctcctgagtagctgggattacaggcatgcaccaccacacccagctaattttgtatttttagtagacacagggtttctccatgttggtcaggctggtctcaaactcccgacctcgggtgatcccaccacctcggcctcccaaagtgctgggattacaggggtgagccaccatgcccggcccattttcttgtatttttagtagagatggggtttcaccatgttggccaggctggtctcaaactcctgacctcagttgatctacctgcctcagcctcccaaagtgctgggattacaggtgtgagccaccgcacctggcgtcaaatttatttttgattccaggctttaattaactgaaaatagacaagaactatttttgaattctagctttaaaagtttctatatcaatttcttttttatggttaagggtacatgattgtagtgccatttgaaattaaaattataggccaggcgcagtggctcacacctgtaatcccagcactttggtaagccgaggtgggtggatcacttgaggtcaggagtttgagaccagcctggccaacatggtgaaaccccatctctactaaaatacaaaaattagctgggcatggtggtgtacacctgcagtcccagttactcaggaggctgaggcaggagaatcacttgaatccgtgaggcagatgtagtgagcagagatcaaaccattgcactccaccctgggagacagaatgagactccatctcaaaaaaaaaaaaaaaaaaagaaacaacaactaaaaattgtctctttatattccagcaacatgtgtaactcaaaggtactgcttctaggttggtgcaaatgtaattgtggtttttgccattactttaaaaaatgacaaaaaccaggccaggcgcggtggctcacacctgtaatcccagcactttgggaggctgaggcgggtggattatgaggtcaagagatcaagaccatcctggctaacacggtgaaaccctgtctctactaaaaatacaaaaaactaaccaggcgtggtggtgggcgcctgttgtcccagctactagggaagctgaggcaggagaatggagtgaacccaggaggcggagcttgcagtgagccgagatcatgccactgcactccagcctgggcgacaaagcgagactccgtctcaaaaaaaaatgacaaaaaccaggctgggcacagtggctcacgtctgtaataccagcacttcggaaggccaaggcgggtggatcacctgaggtcaggagttcaagaccagcctggctaacatggcaaaacaccgtctctactaaaaatacaaaaattagccgagcatggatgcacacagctgtactcccagctactcaagaggatgaggcaggagaattatttgaacctgggattcagatgtcgcagtgagccaagattacgccgctgcattccagcctaggcaacagaatgagactccgtctccgaaaaaaagaaaaaaaaaccaccgcacttatttttgcaccaacctaatacatggaaacaatttctcttacttttttttgagacagggtctcactctaacccaggctggagtgcagtggtacaatcagggctcactgcagcctggaccccccaggctcaagtgatcctcttgcctcactcccctgagtagctgggactacagccttgtatcaccattcctggctattttttgtatttttagtagagacggggtttcacaatattgcccgggctggtctcaaactcctgggctcaagtagtttgcctacctctgcctcccaaagtgctgggattacagacgctctgccagtttctcctcttttactttcttctccgtgactatcagggagttggaaagtgggatccacatttttctattctcatgtaaaaacccctgctccttttttagctcatcttgaaaaggccaaagataaagggaaaaaaaatctcttctcctttgaaatttatgatcacctatttttttctttcttttttttttttctgagtttcactcttgctgcccaggctggagtgcaatgacacgatctcggctcaccgcaacctccacctcctgagttaaagcgattctcctgcctcagcctcctgagtagctgggattacaggcatgcgccaccacacccggataattgtgtatttttagtagagacggggtttcacatgtttgtcaggctggtctcaaactcccaacctcaggtgatcctcccacctcggcctcccaaagtgctgggattccaggggtgagccaccgcatatgcttacctattttaatctcccatctgctgagctcctagttactctctagtgttctctgtctcattgtcatcatttcctcatgtcttcatcttattttggacaagttcaaaggtccatctggatgtctcttcttactactgtggcctccttgtcccttaatgctagtgatctttgtttttgctctttatcaaccgtctacttctctgggcatatcctagaccttacaacacttggaactattccacttctgtaatattttacctctggttaaggccttttattctttttttttttgagatggagtcttgccctgagtaactgggattacagatgcacaccaccatgcccagctaatttttgtgtttttagtagagtggaggttttaccatgttggccagactggtcttgaactcctgacctcaagtgatgtgcccaccttggcctcccaaagtcctgggattataggcgtgagccaccacacccagccagtccttctattctttaagctttattctttcattcccaacagatatattttatatttttttatatattttttcttaattatttatttttgagatggggtctcactctatcacccaggctggagtgcagtggcataatcatggcttgcttttggcttgacctcaagcagtcctcccacttcagcctcataagtagctggaactgcaggcacactcactacaccttgttactttttaagaaattttttttgtagagactggggtctcattatgttgcctaggctggggaactttttaaaaatacggatggctgggtgcggtggctcaggcctgtaatcccagcactttgggaggccgaggtgggtggatcacgaggtcaagagatcaaaaccatcctggccaaaatggtgaaaccccatctttactaaaaatacaaaaattagccgggtgtggtggcacgcacctgtagtcccagctactcgggaggctgaggcaggagaatcgcttgaactcaggagccagaagttgcaatgagccaagattgtgctattgcactccatcctgggcaacagagccagaccccgtctcaaaaataaataaataaataaataaataaataaataaataaataaataaataaatactgatgtatggccaggcacagtggctcacgcctgtaatcccaccactttgggaggtcaaggtgggtggatcagctgaggtcaggagttcgagaccagcctggccaaaatggtgaaatcccgtctctactaaaatacaaaaattagctgggcatggtggcatgtacctgtaatcccagctagtcataaggctgaggcaggagaattgcttgagcctgggaggcggagattgcagtgagccgagattatagcactgcactccagcctgggcaacagaactagactctgtctcaaaacaaaaaaaatactgatgataggcctcactaaacctcaagccaaataaatagactatcaagggatggcctgtggccataatagtgaaattgactgactactaatagtgaaatagacatctggtagactgcctgtaatcagtctaccagatgtctcctaccctctaaaatattggaagatttctcattaaggaaattaaatagttatcagacaaaggctcctgcctttgggcattcaaggaaccaccagcataatggcctcctccctaaccaaggaatcctgccaaataacacacatttcctgcacactcaagctcctaatgaggtttttcctgatttgctatgaaatatgaatagacatggccgggtgcggtggctcactcctgtaatcccagcactttgggaggctgaggtgggcggatcacaaggtcaacagatcgagaccatcctggctaacaggcgaaaccccgtctctactaacaacacaaaagattagccaggcgtggtggcgggcgcctgtagtcccaactactcaagaggctgaggcaggagaatggcatgaacccaggaggtggagcttgcagtgagccaagatcatgccactgcactccagcctgggcaacagagtgagactccgtctcaaaaaaaaaaaaaaaagaaagaaaacggactgggcatagaggctcacgtgtgtaatcccaacattttgcgaggccaaggcaggaggatgacttcagcctaggagttcacaaccagcctgggcaacatagtgagaccccatttctacaaaattaaaacaattagcttacgtgtggtaacacatacctgtggacccagctgattgggaggctgaggtgggagggtcagttgagctccagaaattgaggccgcagtgaacttagatcaagccactgtaatctagcctaggcaacagagcaagaccttgtctctaaaaaagaaagaaagaaagaaaaagatgaccctaaaggaaatgaagataatacaaaatataactcctggcttagcctcctgagtaactgggattacaggcacttgccaccacgcctggctaatttttgtatttttagtagagacagggtttcactgtgttggccaggctggtctcgaaatcctgacctcaggtgatccaccagccttggcctcccaaaatgctggggttacaggtgtgagccactggcccggcttaatacatttttaataattttaagtagagatggggttttgccatgttgcccaggctggtctcaaagtcctgggctcgagtgatccacctgcctcagcttcccaaagtgctgggattacaggtgtgaaccactgcacctggcccaatttctgtatttattcacactaaaataactttgaatactttactaccctaatttattaatttgggttgctaagtgtgattatttctttttaaataatctataagggtttgtttgtttgtttgcttgtttgtttttgagacggagtttcgttcttgttgcccaggctggagtgcaatggcgccatcttggctcactgcaacctccccttgccgggtcaagtgattatcctgcctcagccttccaagtagctgggattacaggcatgcaccaccatgcccgggtaattttctatttttagtagagatggagtttcactatgtcaaccaggctggtctcgctaacctcaggtgatccactcgcctcggtctcccaaagtgctgggattacaggcgtgagccactgtgcctggcctaaatactctataattcttgtctttgcctacaatttaccgctagagagttttaaattttttcttttgcatatgtaatatgttttttattctgtctcaattctgattcttcctgagcattataactgtagacatagcacatagcagattaatacctctcttttcaggatgaaagtcaaacttctgcatcctcttgtgatgagactgagatacagatcagcaaccaggaagaagctgagagacagccacttggccatgtcaccaaaacaaggagaaggtgcaagactgtccgtgtggaccctgactcacaggtgaatggaaatatacaaactgaaaataaaccacctatgccaaaattggcatacttttatggagatttctttttaaattcccatgtgatgtcatgtgtttgtaaggttactgtgtgctgtaagctccatgaaagcccagacccaagtccagctgctcatcactgcatcccagggcttgggcctcaggaagcactttttaagtattaagctcacattaaatatttgttgtataaatatgaacattcattgagtgttcacttaagtgaggtgtagtaggtaggaaggaaagagaaacaagcattaaatgtgttttttgttgttttttcgtttgtttaaattctccttcctaccttgtccctggcctggtgatcaccctgtacttagtctttcagcagtgtgatcacatgattagcaaggggcttccctcgcttgctttccgtagactctggttttattcttttatcttatccttttattcaaatgtaatttttacaaagcacagtcttttttttcttttttcttttctttttttttttttttttgagacagagtttcactcttgttgcccagtatggagtgtgatggcaccatctcagcttactgcaacctccacctctcaggttcaagcaattctcctgcctctgcctcctgagtagctgagattacaggtggccaccaccacgcccaactaatttttgtatttttagtagagacgagatttcaccatgttggctgggctaatcttgaactcctgacctctggtgctctacccacctcggcctcccaaagtgctaggattacaggtgtgagccaccatgcccagccctgaaacacagtcttaattttcttttctatgttcatattgttgcagtaaactgaggaacggagagactaatacggagtacaggaggatttgtttattttaggcacgcaccggctcggaggattcacatctaaaagctgagccttgaacaaagactgagcgggtttttataagtggctttacagaagcaaaataaaagcaattaatcatacagtaacaggttacataatctatagcgtaacataacttgtgacttagccagtggccttgtagctgcattaaaagaaaaacaagaactggctaaatacagacatttgtaaaacataatcatgctaatcatgcttaagaagcccgggaaaagagtaacattaaaagaacttgtatttctcttttttttttctttcaaccttgctctggaaccaggggtcggggggagggtggtgtctggagcttattcctttggccttggctatttggacagcgttatcttctaactgtcttcaaagtgagctactaggcagaggaaaacttgttcttttctttttaactcttgccttgccacattctgggccttagtttttacttttcttggagtgaataaatgcagtacttattattatttaaatttctgcctcaatgtagtcacttgctcagtagactgtctaggtttcttcatttgtccttgctaacagagctaatcttgccatttctattttcctcttaatgtgccctagtatctcctgttctcaaatttacattctcgtgacagttgataaggcagagaaccaaatctgccaccaaaaatctcattctcctacttttcttcctttaaccccttttccccctcactttggtacttatctttggaaggcagcaattcttatttatcatcgaaatcttttatttcctttttaaatttgtagcagaatcattcagagataaaaataagtaatcccactgaattccagaatcatgaaaagcaggaaagccaggatctcagagctactgcaaaagttccttctccaccagacgagcaccaagaagctgagaatgctgtttcctcaggtaaacgtggaataaatggtatgtcaagtaactttaaaaaccaaaattgctagaagtagccaggtacattaatttcctaggactgttgtgacaaagcaccacaactgggcagcttagaacaacagaaatttactctttcatagttctagaggctggaagtccaaaatcaatgtgtcagcaggaccatgcttctctgagactctgggtggactccttccttgcctctgactactttgcgatggctgtcgacgcttggtgttccttggcttgcagctgcatcattaccagtctctggctctgacagcgcatgacattctctctctatgtcttcttaataggacagcagtcatattggattaggatccacccaaataggccaagcatagtggctggtgcctataatcccattactttgggaagccaagtcaggaggattgcttgagcctaggagttcaggaccagcctgggcaacatggtgagaccctgtctctacaaaaagtcaaaagaatcagccagccatgatggtgcacacctgtggtcccagctactcaggaggctgaggtgaaagggttgcttgaacccaggaggttaaggctgcagtgggccatcttcataccacttcaccccagcatggacagagtgagaccctatctcaaaaaattaaaagaacatccaaatgatgtcattttaaccttaatacatctgaaaaaaaattcccatatctaaataaggtcatatgacaggtaccagtggttaggacttcaacatatcttttagggggccacaattcaacccatagcaccatgttatagaatttcttttttttttttttagacagagtcttgctgtgttgcccaggctggagttgcaatggtacgatcttggctcactacaacctccacctcctgggttcaagcgattctccagcctcagcctcccaagtagctgggattacaggctcgtgccaccaggcccagctaatttttgtatttttaatagagacggggtttcaccatgttggccaggcttgtctcgaactcctgacctcgtgatccacccacctcagcctcccaaagtgctgagattacaggcgtgagccaccgcacccggccttcctttcgctttcttttgcctactaaacctctgctcttaaaaaataaaaaataataataaataaatgaaaataaaatatctcagtattagtttcacctgggcaaatctgctagggccctgagccttgccagaggaggagttagagagactgagagaggataattcattccagtatccaccaagcagttaaatctggaatttctaatcctgagccttctcattttccctaaaactttgagtgtcatactgaatctagaaaattacaggattccttgggtctgagatgggcttgggaatcttcagtttttaacaagtctcccaggtaatttttaatttttatttatttatttatttatttatttttgagacagggtcttgctctgttgcccaggctagagcacagtggcacgatctcagctcactgcagcctcagcctcctgagtacctgggactataggcatgcaccaccacgcccggctaatttttgtatttttagtagagacagggtttcaccatgttgcccaggctggtctcaaactgctgagctcaagtaatctgcccacttcagcctcctaaagtgctgggattacaggtgtgagtcaccatgcccagccagcattttttaatacaggccagttttttgtcctctgagttggtttgtctaatatgtcctcatgcttagaatcagactatgggctgttggcaggaatcccaaagagcaatgctgttgcttcctcagtaagcaccctaggaggcacaagtgctggtttttcctatggctagtcacgttaacttccatcagttagttatggtggtgtctgctaggttgtttctttgtgaagttactcttttaccacttggaattagtaagtatcctgtggagagttactctacataaatatcctttctttgttttgttttgttttgagacagagtctctctctgttgcccaggcgggagtacagtgacaggatctcggctcattgcaacctttgcctcccagtctcaagcaattccactgcctcaacctcccaagtagctgggattacatgtgtgcaccaccatgtttttgttttttcagtagagacagggtttcaccatgttggccagactggtctcgaactcctaatctcaggtgatcggcccacttcggcctcccaaagtgccaggattacaggcgtgagccaccaaaccctgccaaatatcctgtttctcatgaaactttcaccttctggttttatagccaaagtctaagcagaagcccctgcgaccattccaacactgacagaacattcctctgccttgttttacggatacattggggaaacttaaggatgagaactttagaaatggtatttcttggaaacccacttgcttgtaaatcagtggttgaaagaaaagaaaaaaataattaaaaagagatgaaagctcattgcatatttttaaaatagattgcctgaagttgaaaaagatgtaagattgaggctttcttatatttgtaagattagactcatagctctatagcatattatacggggccctttatggtttaacccgctacctgtcctattctcaacgtcctccactccctcttatgcaccctacacttcagcaatttcagcctacctcagtttctctgaatgtcattatttccactgtactacagctttatatatcactattgttccctctgcctggaatggttcttttccatccttgcctaataaattccattaaggtcaaaaaaataaagaaacgacagaatttggaaaatgattatggtaagtgggaaaaaatacctaacctaatatataccataatttcaactgaagttaaaaaataataataataagctggctacagtggcacatgcctgtagtcccagttactcaggaggctgaagcagaagtatcacttgtgcccaggattttgaggccagctgggcaacgtagtgagaccttgtctcttcacagaagcaaacaggccaggcgcagtggcttacgcttgtaatcctaacactttgggaggccaaggtggatggatcacctgaggtcaggatcgagaccagcctgggtaacatgacaaaaccctgtctctactaaaaatacaaaaattagccgggtgtggtagctcacacttgtaatcccagctacttaggaggctgagacaggagaatctcttgaaccctggaggcagaggttgcagtgagccaagatcgcgccactgcactccatcctgggcgacagtgtgagtccgtctcaaaacaaacaaatgacaacaaccaaaataagtataggaagcagaggaccagaggaaatatgccagacgttaatggtgttttctttggctgattggattacgtgacttttatcactagttgtaacaatattatgttcataataaaaactgaaaaagtttgttttaaccgatatatatatatatatatatgtttaatttatattaaataattttttagtaatagagacggggtcagggcagggcgcggtggctcactcctgtaatcccagcactttgggaggttgaggcaggcagatcacaaggtcaggaaatggaaaccatcctggctaacacggtgaaaccctgtctctactaaaaatacaaaaaaaattagccgggtgtgggggcgggcgcctatagtcccagctactcgggaggctgaggcaggagaatggctttaacccgggaggtggagcttgcagtgagccgagatcacgccactgcactccagcctgggcgaaagagcgagactccatctcaaaaaaaaaaaatagagacagagtcttgctgtgttgcccaggctcgtctcaaactcctggactcaagccatccacccacctcagcctcccaaagtgctgggattacaggcatgagccactgcacctggccaactttctgtatttttattttatgtatttatttattttttttgagacagagtctcgctttgttgccaggctggagtagagtggcgtgatctcagctcactgcaacctccacctcctgggttcaagcgattctcctgcctcagcctcctgagtagctgggattacaggcacgccccaccacgcccagctcatttttgtatttttagtagggacagggtttcaccatgttggccaggatggtctccatctcttgaactcatgatccacccgcctcggcctcccaaagtgctgggattacaggtgggagccaccgcggcgcctgaccaactttctaatatgtttatataacttctccacaggtgtcagaaaatttctgaatgcctacttgaagcatatgacctgtaatcgtaggaatgctgtaactaattttttgtgctccctatgtgctgtttctaccaccatcttgacagagcctaccatgtgaaaatactctgttaacttacacacgtttttttttttgtttttgtttttgtttttgtttttttagaggtggagtctcactctgttgcccaggctggagtgcagttgcgcgatctcggctcactgcaagttccgcctcccgggttcacaccattctcctgcctcaacctcccgagtagctgggactacaggcgcccaccaccacgcccggctgactttttgtatttttagtagagatggggtttgatagtttataagccaggatggtcttgatcttctgacctcgtgatccacccgcctcggcctcccaaagtgctgggattacaggcgtgagctaccgtgcccggccacatatttcttaatgagaacttttttgaaatccttcattatttctgtgtctttggatttaggtaacagagattcaaaggtaccttcagaaggaaagaaatctctctacacagatgagtcatccaaacctggaaaaaataaaagaactgcaatcactactccaagtaagttttgtagacaaagccataataagtaatggttgccccacttcggaatgatgttggactgtaacagctgaaagcatagaggctggaaccagtttacattctagttctctcgtcttttaggtttgatatcttggggaacttactcatcctcaataaactcacttcctcagtgcaaagtggaaatagttatactatagtgcctatttctttcttttttttttttttttttgagacagagtcttgctctgtcacccaggctagagtgcagtagcgtgagcttggctcactgctacctccacttcccaggttcaagtgattctcctgactcagcctccctagtagctgggactacaggtgtgctccaccacgcccagctgatttttgtattttcagaacagatggggtttcaccatgttggccagcatggtctcaacttcttgacctcatgatccgcctgcctcggcctcccaaagtgctgggattccaggcgtcagccactctgcctggcctatagtacctatttcatcaggttgatagatacataaattgagaatactttttccactactgcttccctatcacggcaaatagcatgcagcaaggattcaataaacaactgatgaatcaatgtatgaactacttggtacaatatccaccttctaatgagtttttcataagtctaaatgattccgtttttgggcatgtaagtcttctctatcttatattgttggaacattgcttggcacatagaatgttgattattatatttatagtagttgcaatgctgcttatcgtatattcaaaattcaataaatgttcatatacttaatcagaataggatacagttggggtcagcaaactgttgcctgccttggcctgtcttatatcctttgagctaagagtggtttttacattttttaaagaatttaaaaacaagaagaatggccgggtgcggttctcacacctgtaatcccagcactttgggaggcccagggggctggatcacctgaagttgggagtttgagaacagcctggccagcatggtgaaaccccatctctactgaaaatacaaacattagccaggtgtggcggcaggtgcctttaaccccagctacttgggaagctgaggcaggaaaatcgcttgaacctgtgaggcagaggttgcagtgagccaagatcatgccattgcactgtagcctgggcaatagagcaagactccgtctcaaaataaataaataaataacataaaaacaagaagaatatgagacagagaccataccatatgtggccataaagcctaaaatactttttttttttgagacgaagttttgctcttgttgcccaggctggagtgcaatggcgcaatctaggctcactgcaacctccacctcccgggttcaagcgattctcctgcctcagtgtcccgagtagctgggattacaggcgtgcgccaccacacctggctaatttttgtatttttagtagagatggggtttctccatgttggtcaggctggtctcgaactcctgacctcaggtgatctgaccgctttggcttcccaaagtgctgagattacaggtgttgagccaccatgaccagccaagtcttaaatacttttatctagccctttatagaataaatttgtcagtccttgacatacagcattataaaatatcaaattcattattaaataaagaccacttgtgactaattggtaggggagaagataaatcttctactctaatcctctggattaaaccaagatgtcaatttagtgaaatttgtcagtggggagatggtgaatgtttgatagtttataagatgaatgtgctttgcccctgagtttccaaaaactaagtattttgaaattaatgttttagcaaaaattatattgaagttgaatgtcagggatgcaaagaagagaataagtgttaacagaaaaacacagagaagataaataaatggattttgttttgttattaatttttatattggaacattctagactttaagaagcttcatgaagctcattttaaggaaatggagtccattgatcaatatattgagagaaaaaagaaacattttgaagaacacaattccatgaatgaactgaaggtatgtagataaaattatgttcttaatggaactaaactgtttgattataattttgaaactatataacaccgtggttacaacaactggctgtcactctaccagtagatttgtttgaatttaatatatctttatctaaaacttgctttcccctaccctgagaattttcaaagtcctctagataaaacagtgaatccatggccaagcgcagtggctcatgcctgtaatccccgcactttgggaggccaaggcaagtggattacctcaggtcaggagttcaaggccagcctgggcaacatggtgaaaccctgtctctacaaaaaatacagaaaattagtagggggtggcacatggctgtaatcccatctactcaggaggctgaggcaggagaatcacttgaaccaggaggccaacattgcagtgagctgagatcgcgccactgcactccagcctgggtgacagagtgagactccgtctcaaaaaaaaagaaaacagtgaatcctgactatgagaaactatttccaaaatggcaatgtcattctactttccatattcagatgttttgcctattactttcattgatgatgaaccaacttatggctgaagccatcttctttccctcgtcccttatgtaaaggaaaatgggtgattaatagtggcaaacctgaagggttcctgtggtaacagctccctcgagggctttcagtccaggttccacaggactcaaagcctcctcaagtaagagaaggtgataaagtcaactctgaggctgagttagcaaagtagtgagtaacattctagcaagttgatgttattggtatctggtgttaaggcagtgccgaatggagggcaggaaacacatttttaaatatttatggatttatgtatttttctcataaagacagggtctccctatgattcccaggctctccttgaacgcctaggctcaagtgatcctcccacctcagcctcccaaagtgctgggattacaggtgtgagccaccagattatatttatttctattcgctgtatttaattcttaaccccatgtttattttacataacttccctatttctcaaaaagaatttaaggcctattctcaaaataatgtaagtttatggtattaaatataaaatagtatagtcaatttaaaagcggcagaaaattagcactgttagtaggtacagtatttactaccatcagtcactcagctgagtttaagttttctggcagctagggccaagaggaaaactcactgggtgataaattgtaaataatttaagtacttaagcttcttggtgagaagcttaattgaaataataaacattcattttaacgatgtaaaaccactgttacaaccattttttttcttttcttttcttttttttttttgagacagagtttcgctcttgttgcccagactggagggcaatggtacagtctcagctcactgcaacctctgcctccctgattcaagtgattttcctgcctttagcctccccagtagctgagattacaggcgcccaccaccacacccagctaatttttttatttttagtagagacgggttttcaccatgttggccaggctggtcttgaactcctgacctcaggtgatcaacccacctcccaaagtgctggtattacatgcatgagccattgctcccatcctcactgttaccacatttgaaggcactgtttgtcaaactttttttttttttgagactcagtctcactctgtcacccaggctggagtgcaatggtgcgatcttgcctcactggaacctctgcttcccggatgcagcagattattttgcctcagcctcccaagtagttgggattacaggtgcccaccaccacacccagctaatatttgtatttgtaattttatttattttttttagatggagtcacattgtgttgcccaggctggagtgcagtgacacaatattggctcattgcaacctccacctcctggattcaagtgattctcccacctcagcctcccaagtacctgggattacaggcaaccaccaccacacccggctaatttttgtttgtttgtttgtttgtttgttttgacacagtttcactcttcttgcccagactggagtgcaatggcgtgatcttggctcaccacaacttccacctcccaggttcaagcaattctcctgcctcagcctcctgagtagctgggattataggtgcctgccaccacgcctggctaattttttgtatttttagtagagacggggtttcactatgttggccaggctagtcttgaactcctgaccttgtgatccacctgcctcagcctcccaaagtgctgggatcacaggcataagccacggcgcccagcccctgctaatttttatattttcagtaaagatggggtttcaccatgttggccaggctggtctcgatctcctgacttcaggtgatccacccacctcagcctcccaaagtgctgggattacaggcgtgagccaccactcctgtcctcactgttaccacatttgaaggcactgtttatccatcttttttttttttttttttttgcgatgagtctcactgtgtcactcaggctggagtgcagtggtgcgatcttggctcactgcaacctgcacctcccgggttcgacagatcttgccagcatggcaaaaccctgtctctactaaaaatacaaaaattacctggccatggtggtgggtgcctgtactcccagctactcaggaagctgagacaggagaatcgcttgaacccaggaggtggaggttgcagtgcatggaggtcacaccactgcactccagcctgggcaacagaccaagactccatctcaaaaaacaaaaaaaataggccagggcgtggtggctcacacctgtaatcccagtactttgggaagctgaggcaggcggatcacctgaggtcaggggtttgagaccagcctgaccaacatggagaaaccccatctttactaaaaatacaaaattatcttggcatggtggcgcatgtctgtaatcccagctactcgggaggctgaggcaggagaattgcttgaacccgggaggcagaggttgcggtgagccgagaccatgccattgcactccagcctgggcaacaagagtgaaactccatctcaaaaaaaaaataataataatttaagttaatttaaaaaaatgtttcagccagacacagtggctcacacctgtcaatccacaactttgggagggttaggccgaaggatcacttgagccccagtgttgaagaccaacctgggcaatacagtgagactccatctctaaagaaaaaaaaagagtcaagctgctgctttctatattttgtaatatggatgacataattttctaagtaaaagttaaggacagagcaagaacgactgtctcaaccataaacgttgagtattgctctagaaaatgtgttgaataaacgaatagtttatcttactttttagtataactccagcctggtagacccatctgaatgagtttagttctaaaataacactgttcaccctgaatgtttaaggaactggcctatcagatatataacttggtatgatctctttggagactagagaattaaaaaaaaaaattacaataacttcaccatacctgagatgaagttgctcctggcacatttggggcttggtcatttagatggtgatggacagtaataagcagatatcctaaagagatcattctggccatgacagcctctctttgacttttatgataacaaaagacagacttgtttgatctagttgtcaaatggccctctaaaaagatcagaaaactatctgggtgtggtggctcatgcctattatcccacctacttgggaggctgaggtgggagggttgcttgagcccaggagtcaaagaccaggctgggcaacatagaacaaccccatctcaaataaacaaatacatatatacctacatttaattaatttattttaattaatttatctatttatttataataaaaagattggaaaacttgtattccaaggtaccttatatagttataaatctctatattttataattggctatttttatgcagatttgctttttctcaattattattcttatttatctatattaatggtatatattatctgttttaagtacttttctattgtttatcttttttttttttttttgatacggagtctcgctctgtcacccaggctggagtgcagtggcatgatctgcaatctcagctcactgcaagctcctcttcccaggttcatgccactctcctgtctcagcctcctgagtagctgggactacgggcgcccgccaccacacccggctaattttttttttttgtatttttagtagagatggggtttcactgagttagccaggatggtctgaatctcctgacctcgtgatctgcctgcctcggcctcccaaaatgctgggattacaggcgtgagccaccgtgcctggccccattgtttaccttttaactagattaatagtatcttgccttgtggaagatttttaattgtagttatatttatccaactcttccttttaaggcttacttttttgtcatgcttagaaaggtcttgacttcagctactcaggaggctgaggcaggaaaaatgcttgaagcccgtaggcggagattgctgtgagctgagatcgggccactgtcctccaggctcagtgacagtgagaccctgtctcaaaaaaatgtatagacatatatacttatatatatggctgggcacagtggctcacgcctgtaatcccagcactttgggaggctgaggtgggtggatcacctgaggtcaggagttcaagaccagcctgcccaacatggcgaaaccccgtctgtactaaaaatacaaaaattagccagacgtggtggcagatgcctgtaatcccagctgctctgggtgctgaccaggagaattgcttgaactcaggaggcggagattgcagtgagccaatatcacgccattgcactccagactgggcgacagagcaagtctccatctaaaaaaaaaaaaaaaaaagatcttgcctgtctgtgtgtgtgtctctctctctctctatatatatatacaatttttatataaaattatatacatatatatatatttttttagacagagtctcaccctgtcacccaggtggtaattcaatggtgcagtgatggttcactgtagcctcaacctcctgggctcaggtgatcctcacacctcagcctccttagtagctgggacaatagtcatgcactactacacccagctatttttcagttttttgtagagacaggcctccctatgttgtccaggctggtctcaaactcctaggctcaagcggtcccccctcttctgcctcccaaagtactgagattataggcatgggccaccagattatgtttatttctagtccctgtatttaattcttaacctacatttttatttttctaaatattaatttcaattgtcatatctcagttgacaggcaataaagttaattttttctgcttgcaacagatgttagactaatgataataagatattcaattactctttgtgccttgacaatatctaagacagataccctaagtgaaacccttcaagcatttatttccttccctctttttgttttttgttttaaaggacttcaaaaagctattgtttggggatagagggagaggatagaattatttgtagattccacatgttaaatatataataggttctttaggtttgtttttgtagagacaagatctcctaatgttgcccaggctggtcatgaactcctgggcttaagcgatcctcctgcctcagcctcccaaagtgctgagattgcaggttgtgagccactacacctggcctaagtttatatttaataaactgtatataacgtctcaaagcttccgtatttccaaaataatctttttttcttcctttgtggctacaagggactgtttttctacattatgtctctagttagaaaatgtctggctaggctgggcgtggtggctcacacctgtaatcccagcagtttgggaggctgaggcaggcagatcacaaggtcagcagttcaagaccagcctggccaacacagtgaaaccccgtctctactaaaaatacaaaaattagtcgagtgtggtggtgggtgcctgtagtcccagctatttgggaggctaaggcaggagaatcgcttgaacctgggaggcagaagttgcagtgagctgagaccatgccattgcactccagcccaggtgaaagaaagagaccccgtctcatttaaaaaaaaagaaagaaagaaaagataatgcccagatagctgggcacagtggctcacgcctgtaatccaaacactttgggacaccaaggcaggcagatcacttgaggtcaggcatttgagaccagcctggccaacatggcaacatcctgtctctactaaaaatacaaaaattagctgggcatggtggcaggtgcctataatcccagctactcagaaggctaaggtgggaggatcgcttgaacctggaaggtgaagattgcagtgagcccatattgtgccactgcacttcagcctgggcaacagagccagactctgtctcaaataaaaaaaaaaaagaaagaaaatgcctgggtccatagcagccgggaaaggctttcttgtaactccttactcagcctcaactggaaattgctctttataacagaatccccatagcaataaatggcaggtaactgtggagccagccagacaggtagaataggatgaggtgaggtagtgaggaaagaaaagattccaaatggagttacaaatgaggaatgaaacagggataaatggaaacgctcttctgaactttgcctaggagacaatactgtatcagaggccaagtctttttgtttgttttttgtttttgttttttgagatgtagtctcgctctgttgccaggctggtgtgatctcggctcactgcaacctccgcctcctgggttcaagtgattctcccgcctcagcctcctgagtagctgggactataggcacatgccacaacgcccggctaatttttgtatttttagtagagatggggtttcaccatgttggagaggccaagcttttaaaatgatgcattttctcttcagcagcagcccatcaataagggaggggtcaggactccag

SEQ ID NO: 161 - DNA, 26214 bp, Homo sapiens
  source 1..26214: mol_type = other DNA
ccgggtttgggggttgggacctccggctgcaggtccgcctgggccagacgcgcgagcgcaagcagcgggttagtggtcgcgcgcccgacctccgcagtcccagccgagccgcgacccttccggccgtccccaccccacctcgccgccatgcgcctccgccgcctagcgctgttcccgggtgtggcgctgcttcttgccgcggcccgcctcgccgctgcctccgacgtgctagaactcacggacgacaacttcgagagtcgcatctccgacacgggctctgcgggcctcatgctcgtcgagttcttcgccccctggtgagtccattctgccgaggcgggggaagaaaggcggggctgggccgggggcgagagcgcggggaactgttgggcctacgcagcgccggggcccttcattcctgtgggcccctgctgcggcgggcacatttctcattcccgggagctggaggcgcctcgccgagagcgggggagtcggtgctgatcggcccaaggaaaacccgaaggctgcgctcacgcagggcctcatccttatctcggtgctcttgtggcacttcctatttgcagagggttttgccaccccttcccccagtccaatatgtagctatatcttttctgcgtgagtcagtattaatgctcctccagtctacagactaggcatcccaaagccttgtagtggaagcggacgtttcaccaaatgcagaagtcctggatccctagggtatttcctttcatcttacctcacgccgcacagccattggtttctagccaaggtcactgagtggctgcagaatggtcgtaagtgctttcttgaggcaggtaatttgtccgtcacatggtgtacagtttctcccttcagctgatcacttacatctcagtaccggcagatacctctgtccaaacgaaaggagtacgtgaacaagaataattccatcagaatctgtccatattgtctgttttaaatagcatttctttaaaatgtcaaaaaagactccaatgagaaaataaccaatattgattacatactccactttagggtgacttaagtgatcaagggtgtaaattccttagatagaactaactcgaaataaaaaactgttggggagaaggaagagcaaataagatttctggcccagtcaacttgagtgtttgttttttttttttatttgtgtgtgtgtgtgtttttaaacctccagatcattaccagagtaaacagtgattcctttatcctggggatagctctctatatataattcaatatatataattacagtacttaatttttcccctcctggcacagtgacccttggtttaatactatccgtgttcaaaaatgtcagtaaaagttgtgtataacttttatttgcttcagactcaggtcttcccttcttagcctcaaacaacttgctaagggttacacgaaaaaagtcctgtagtaaagaccacctgaatcagaatgatgtgctagagatggcaaattttgtttgcagcttggacagattttgtgtccagggcatttctggggctaactggcagtacagattacacatatagatagttcttatacatctctggaactcatgttctctcttaggaacaactcttcccaattatataatcatgctgttagctttgagggggtgtcaataatttgtaaaaactgggggtgtcactaagtttgtcagatctgagtgatgctttttactacaggggtcatgcaacaatttaaagtaggaattgttggagaatagtgggccactagaatattagtttaaaaaaggaattttggggctgggcatggtggctcccgcctgtaatcccagcactttgggaggccgaggcaggcggatcacctgaggtcgggagttcaagaccagtctgaccatcatggagaaacccccgtctctactaaaaatacgaaattagccgggcatagtggcacatgcctgtaatcccagctactcaggaagctgaggcaggagaatagcttgaacccaggaagcagaggctgcagtgagccacgatcctgccattgcactccagcctgggcaacaagagcgaaactctgtctcaaaaaaaaaaaccagaattttttatttgaattgaagggggtgtttcctactttaaattgttacacgtgctaccctaaaaactacatatcccatcaggcactgactgtcccaagaattgggtggatctctgctgtggtgtctgcttttaattggtttaaaagaaaaagtcatcctccacaatttcagcaagaaagatgagttttctgaatgagcaatttggagttaaagaagtctcctgttgaggtctttatttcttcacattccactacattttttttgtgtgtgtgtttgtgtatttttttttttttgagatggagtctcgctttgttgcccaggctagagtgccatggcactatcttgactcactgcaacctccgcctcttgggttcaagtgattcccctgcctcagcctcccgagtagctgggattacaggtgcctgccacaatgcccagctaatttttttgtatttttaatagagacagggtttcaccatgttggccaggctggtctcgaactcctgacttcaggtgatctgcccaccttggcctcccaaaatgctgggattactggcatgagccactgcacccagcctgtttttttgtttttgttttgttttgttttgttttgtttttgagacagagtcttgctctgttacccaggctggagtgcagtggcatggtctgggctcactgcaacctccgcctcccgtgttcaagtgattctcctgcctcagcctcctgagtagctgggattacaggcacgcaccaccaagcccggctaatttttgtattttagtagagacggggtttcaccatgttagcctgatggtgaactcctgacctcaggagatccaccctcctcggcctcccaaagtgctgggattacaggcgtgcgccacctagcctggcctctgtatttttatttattaacatttcagctggaaatgttttctgactgctatattcctttgtacagttcagtagtactatcttacaagaaacagttaaaaaatccttagtaagagtaaaatggggtctggccctgttgtgcattcctgtaatcccagcagtttgggaggccaaggcaggcagatcacttgagatcaggagttcagaccagcctggccaacatggggaaaccccatctctactaaaaatacaaaaattagctggacgtggtggcgcacatctgtaatcccagctatttgggaggctgagttgggaaaatcacttgaacccaggaggcagtggcgaggtaagagaccagcctgggcagcatggccagaccccatctctactaaaaaatgacaaaaattaaccgggcatggtagcacacgcctgtagtcctagctactcaggaggctgaggtgggaggagaagatcacttgagcctgggaggtggaggttgcaggaagctgagattgcaccattgcactccagcctaaatgacagtgtgagaccatctcaaaaaagaaagtaaaatgggcttttttttttttaaccttattctcgtcacaaaatagacctatttaagcaaattctttttccgctttcatgtttcaagtgaaagtgaaaggtgaaagcttgctttgcttgctttttttttttttgagacagtctctctctgttgccaaggctggagtgcagtggcgcgatcccggctctgcaacctccgcctcccctgtctggctaatttttttttttttttttttttttaagtagagaccaggtttcaccatgttggccaggctggtcttgaactcctgacttcacctgaatcacctgcgttggactcccaaagtgctgggatttcaggcgtgagccaccgtgcctggcttagtgaaagctttctttgcagttgattttgtagactaatatttccattatggagttaatctgctatatatttttaaggataagagtatctgaatttctctggggaaataacactatttaaatgtttggaaatgtccgaaaatttattgattagtgttaatatgtaatattaagtccttggccgggcacggtggctcacgcctgtaatcccagcactttgggaggtcaaggcgggtggatcacgaggtcaagagatcgagaccatcctggccaacatggtgaaaccccgtctctactaaaaatacaaaaagttagctgggcgtggtagcaggtgcctgtagtcccagctactcgggaggctgaggcaggagaatggtgtgaacccaggaggtggagcttgcagtaagccaagatcacgccactgcactccagcctgggcgacagcgagactccttctcaaaaaaaaaaaaagtcctcaacatctatttatgctatagatgtgtatgctaccctctaagacagtagtaataaataatggctgggtgcaaaggctcacgcctgtaatcccagcactttgggaggccaaggtgggcagatcacgaggttcaggagtttgagactagcctggccaacatggggaaaccttgtctctactaaaaatacaaaaattggctaggcacggtggcaggagcctgtaatcccagctactcaggaggctgaggcaggagaattgcttgaacctgggaggtgcaggttgcagtgagctgagatcatgccactggactccagcctgagtgacagagcaagactccgtctcgaaaaaaaaaaaaaaaataatatatgtgctaatttctttacttgtaatccccaccccgagttgatcttttcaacatcaacatttagctcatattttttttttccttccctggacaactaactggttgatcctgcctctctattggcatctaataatactgtgtcacccctgccagactggtgttcctataaggaaaggactataccaattttcttatcaaagacacttgataaggcacttatcaaaaagtacttgacgcatggcacacatgatgaagtgatgattatgggtgaatatatgttggaattcattatcaactgccaggtgccatccctgaggatagatagaattaattgtgttttaatattttctaggggtgggtgaaagaagtagtggttaatcttgaaggatgtatgttaaccaaccctgatttcccttaaataccacctgagttccattcctgctggatttgaagaggagagtctcctccagcctcattgaaactctttttgtggatttgatgaccttatggatattgccaaagtttaaggcagtggattttagtcccagccttgcagcttacacacacacctggttgctccccagatttctggagattctcattcagtaagccatgcatacttttgttgttttaatgctctgtgggtatttttgataagcatctagagttgacacctactggcttgacctagtaactattgtatgtgatttttttctcttaaaatgtttgaagatagttgaaacaattaactcataaatctgttgcctcagccttgacaactactatatattcaacagaaatctctcatctgtctcttctttattctcattgctgccattccggtccaagcttttattgtctgccatgtgaaatatattatcttctagatggctttactcttgtctctattttctccctttctgtcagtctttgacattgctgattgacgtagtcttagtacacgtgcacgcacatttattatctcacaaaagccctttacagttctctgaatgcatcatgcttactggtattcttttacgtttgctctactatctccctcatcttaaataccctgccctcttctctctgaagcgttaaatccttaaagacccagatccaattgttactccctttaaaatccatttactatgcagtattaaaggaatacagaggatataatgaataagaccctatttcacacacataagataccactgattgtgagaggaactatcttgtgtctcactgagaaagaaatactaccactgaaactataacatgactgcaaaatacatcttaatatcaggaaaaaacaatgaatctgaaatacagcataaggaatagcatttgtttgcactcagtctgaaaaacatagccagtacatttgaagtcccctatgtgcccctttaccatcttatacactcctttatcttgaatttggtatttatcatttggttcttttatactttaataggccgcctgaaggccttggagaataagctgttataatcctttattttaaacaagttttaggtgtacaatatttccaagttatccatcacttgataaaattacaccattgactattgaaatatatctgctcaagtttcttctctattatatttctatttttgctgtctacgggaaggttacagaactcaccttctcaacgtgatccctctgcaaccctttggcttttgaaaaggtgatgtacagctggtgctagctgtatatacactgattaggattttctgggcagaggagccggtgcttctggtggccctctgggaaaggtattctagtttacatgttttgttatcacttctcatggctaggtgaactatgtagctgtaaaaatcaggcctgccatctaaaagacttaatatcatacttgagacattacagggtttcagtcacaattttgtgtccccacccccaccccgagacagagtcttattctgtcacccaggctggagtgcagtggcgcgatgtcagctcactgcaacctccacctcccaggttcaagcaattctcctgcctcagcctcccgattagctttgattacaggtgcccaccaccacgcctggctaatttttgtattgtcagtagagacggggtttcactattttggccaggctggtcttgaactcctgacctcgagtgatctactcgccttggcctcccaaagtgctgggattacaggtgtgagcttcagtcactatttttaacaaccacaatgctggtttcccagggaattgtattttcctctggggaattctatcagaaatgggattatttctattttgtccttcattcagcctcattaattggtcaaaagggcattaacccattcaaccctctttaataatgtggcgtacacctttgactacagctttcacaacttagttatactttgtattgagaaaatagagctgccctgtgctgagccagtactatggagtcaacctcagtctaggggtaggacctttacctcttgagagttctggtttactttaacaataatgaatgttgttcatgtgatgattttgctttttggaagtgtctactagctcaaaggtagtattatagtttgagattcttcctagtgagacaacattaacaaattcataggactaaactgagaatttggcttttttaatacgtatataggtgtggacactgcaagagacttgcacctgagtatgaagctgcagctaccagattaaaaggaatagtcccattagcaaaggtaagtacaggtggattcttcactaaaggacgtgaagtattttaaaaagtagtttgttgtctcagctttgttacatggaaaaaaataacagtaataaatagtttgtaagattaacattcattttctctactcttattctgctaagaagagcgaatactagtttctgggcaaatacacaactgacttgtagtttcaaaagattaaaagtagtggctgggcgcaatggctcatgcctgtaatcccagcactttgggaggccgaggtgggtggatcacgaagtcaagagattgagaccatcctagccaacacggtgaaaccctgtctcaactaaaaatacaaaaattagctgggtgtgatggcacgtgcctgtagtcccagctactcaggagactgaggcaggagaattgcttgaacccaggagatgaaggtttcagtgagccgagatcgggccactgcactccagcctggtgacagagcaagactccgtctcaaaaaaaaaaaaaaaaaaaaattaaaagtagtgagagtaaggaaattactggcataagaagtaaaatagaccaggtatggtgcctcacagctgtaattccagcactttgggatgattacttgaggccaggagtttgttgcctgggcaacaaagcaagacctcatctctacaaaaaatttaaaaagctgggtgtgttggctcacacctgtagtcccagcttctcaaaaggctgaagcaggaggattgcttgaggctgcagtgactagacactgcacactactagactccagcctaggtgacagagtaagaccctgtctcttaaaaaaaaaaaaaaaagtgtaatcccagtactttgggaggccaaggcaagtagatcacttgagaccagcctgggcaacatggcaaaattccatctctactaaagatacaggcaggcttccatagtcccagctactcagaggctgaggtggaaggattgcttaagccagagaggttgaggctgcactgagctgtgattgaaccattgcactctagcctgggcaatagagcgaaaccctgtctcaaaaaaaaaaaaagtagtaaagtatatggtaaataagaattaaagatggaaagcagaagtacagctataaaggttaaaataatcattgaggctgggcacggtggctcacgcctgtaatcccagcactttgacaggctgaggagggcggatcacctgaggtcaagagttcgagacccgcctggccaacatggtgaaaccccatctctactaaaaaatataaaaattagccatgtgtggtggcaggtgcctgtaatcccagctacttggaaggctgagacaggacaatcgcttgaacccaggggggcggaggttgcagtgagctgagatcatggcactgtactccagcctgggcgacagagcaagactccatctcaaaaaataataataatctacaagtaaatgagttccctaaactgctatgtgataatcacaatgatggtaatacgaaaatgatatgaggatattgatgaaaatgtaaccaaatggtcaactgtaaacttggtatttgtttttacaattaaagtaatgcttccagaatgttgccattctgtagtaaacccatagttgttctagtctaaaagctcttacctctgccaaatagttcatatataaggctatttttggaaattacttttaatcttatcaagcagcttgccataggaaaaaaatttaatcatagccaggcgctgtggctcacgcctgtaatcccagcactttgggaggccaaggcgggtggatctcctgaggtctggagttcaagaccagcctggccaacatggtgaaaccccgtctctactaaaaatacaaaaattagccaggtgtggtggccggtgcctgcaatcccagctactcgggaggctgaggcaggagaatggcttgaacctgtgtggtagaggttgcagtgagctgagttcgtgccattgcactccagcctgggcaacaagagtgaaactccgtctcaaaaaaaaaaaaaaaaattcaatcacaattcctacctgtgtgactatagacacattaattaattttctggatcttagtttacccatcttagagcataaggatcatacttcataatcttatggagattaaatgagataatatatgcaaagtacttgtgcctgggttggagtaagtggctcgttccgggaaattattttccttcttcctgataggtctcactagatcggttatgttatggtatagcccagattcaaactagttcagggtacgtgtacaggtgttggtacctttgataatagctctagatgatttgcaaaatcaaattacattacacctaaaggatatgtaccaccatcgatatatccccttggtgatagtcgtaatcaaagtaagccactgttaataatttaagtgatttatccctcatgtgttctgaggcagaaaaaagatgaagaccaccgctttagctaatagagactacaagggcagaatttaaacaggaactttgcattttatgtgaggcctaggaatctcaattttaaagaattccttaggcagttctgatgtagttaggcaagctccagtctgcctttaaaatctaatgttctgtggcatatatgccaagaattccttgatccccttaggatttgaccaatcctagtattttgagaatataggaagaacctgcagcagaaacttggataagaaaatagtttgtgtattttgatctttaggttgattgcactgccaacactaacacctgtaataaatatggagtcagtggatatccaaccctgaagatatttagagatggtgaagaagcaggtgcttatgatggacctaggactgctggtaaggatcctgaattacattctggaaactgatgttaagtaccttattctttgtagtggaaacataaaaatgtgtttttctacacagtatactttcagtcttaaaacttcctcatctaagaggtcagtttggtggtaacaaaagacctctctaaatgaacagattatataagtaatatagaaaatacacaaacttgatttataaggtcagctcgacattttttcattttacaaatatttattgagtaattactgtgtgccagatattctaaatatactaggtcgttggcatttattgataaaatagacaaggtccctactcttgtgaagcttacattctgggggatgagggggagaaggcaacaaacaagttttaaaaatatagatgagctgggtgcagtggcacgtacctatagttttagctactcgggaggctgaggtgagagactgtcttgagcacagcctgggcaatataagtttgtccccatctccaataaaaagtttgggccggggccgggtgcggtggctcacgcctgtaatcccagcactttgggaggccgaggcaggtggatcacgaggtcaggagatcgagaccatcctggctaacacagtgaaaccccatctctaccaaaaatacaaaaaattagccgggcgtggtggcgggcgcctgtagtcctagctgctcgggaggctgaggcaggagaatggggtgaacctgggaggcggagcttgcagtgagccgagatcgcgccactgcactccaacatgggcgacagagcgagactccgtctcaaaaaaaaaaaaaaaagtgtgggccaggcacagtggctcacacctataatcccagcactttgggaggctgaggtgggcagatcacgaggtcaggaatttgaggccagcctggccagcatggtgaaaccccatttctgctaaaaatagaaaaaattagcactgggcgtggtggcacatgcctgtaatcccagctactcaggaggctgaggcaggagaatcacttgaacccaggaggcggaggttgcagtgagccaagattgtgtcacagcactccagcctgggcaacagagcgagactccatctccacacacacaaaggtatgtgtgttatctccatgtatatatggataaccatctcatacccattaggatggctactatttaaaaaaaaaaaaacaacgaaataggccgggcgcggtggctcacgcctgtaatcctagcactttgggaggctggcggatcacctgaggtcgggagttcgagaccagcctgaccaacatggggaaaccctgtcactactaaaaatacaaaattagccaggagtggtggtacatgcctgtaatcccagctactcgggaggctgaggcaggagaatcgcttgaacctgggaggcggggttgcggtgagccaagatcatgccattgtactccagcctgggcaacaagaaggaaactccgtctcaaaacaacaacaacaacaaaatagccaatgttggtatggatgtagagaaattggaaactttgtgcactattaggaatgtaaaatgggacaaccactatggaaaacacagtatgttggttcctttaaaaattaaaaatagggccaggcctggtggctcatgcctataatcccagcactttgggaggccaaggcaggcagatcatttgagatcaggagtttgaggccagccaggacaatgtggtgaaaccgtctctctactaaaaatacaaaaattagctgggtgtgatgcgcatacctgtaatcccagctacctgggaggctgaggcaggaggatcacttgagcccgggaggcagaggttgtagtgagtcgagatcgggccactgcactccagcctggggaacaacgcaagactccgtctcaaaaaaaaaaaaagattgaaaaaattaaaaatagaaggccaggcacggtagctcatgactgtaatcccagctctttgggaggccaaggtaggctgatcacttgaggtcaggagttctagaccagcctggccaacatggtgaaaccatgtctccaccaaaaaatacaaaaattagctgggcgtggtggtgcacacgtgtagtcctagctacttgagaggctaaggcaggagactcgcttgaacctggaaggtggaggttgcagcgagctgagatcacaccactgcactccagcctgggtgacagtgagaccctgtctcaaaaaaaaaaataaaaatgaaaataaaattactaggccaggcgtggtggctcacgtctgtaatcccagcactttgggaggctgaggcaggcggatcacaaggtcaggagagcgagaccatcctggctaacacattgaaaccccgtctctactaaaaatacaaaaaattagccgggtgcagtggcgggtgcctgtagttccagctactcgggaggctgaggcaggagaatggcgtgaaccctggaggcggagcttgcagtaagcggagatagcaccactgcagtctggcctgggcgaaagagtgagactctgtctcaaaaataagtaaataaataaataaaattaccatatatatgatccagcttctgtatgcccacttctgagtatacatttagttctcacttaatgttgtctatagattcttggaagctgtgacttttaagtgaaacaacctataacaaaacttgtttttttttttcctcatcaatgttacaggaaacagtgttattctaggacttgctatgcattctttctcttgaagttgcagtttctgagaacatatgaataatattgaggacttattgtatacccaaaagaagatagttgtacacctatatccacagcagcattattcatagtagccaaaaggtagaagtaacccaagtatcttatcagtgaatgaatagtaaacaaaatacggtatatgcatccagtggaagattattcagccttaaagaagaaaattctgactacatgctgctatatgattccacttacatgaggtagcacaaatagtatacaaaattgtatgtttaaaaatggttaacaagggccaggcatggtggctcacgcctgtaatcccagcactttgggaggtcgaggtgggcagatcacgaggtcaggagttcaagaccagcctgaccagccaacatagtgaaaccccgtctgtactaaaaatacaaaaaattagccgggcgtggtggcaggagcctgtaattccagctactcgggaggctgaggcaggagaattgcttgaacccaggaggcggatgttgcagtgagccaatgttgcaatcgcgccattgcactccagcctgggtgacaagagtgaaactccatctcaaacaaacaaaaaaatggtttaacaaggctcatgcctgaaatcccagcactttgggaagctgaggcaggtggtttgcttgagcctaggagttggaggccatcctgggcaacatagtgagaccccgtctttataaaaatacaaaaaactagccaggtgggatggtgcatgcctgtagacccagctactcaggagactgaggcgagaggtctgattgaccctgggaggtcgaggctgcagtgagcaatgatcatgccgctggaccccagcctgggtgacagaaggagaccctgtctcaaaaaaaaaataaagaaaagaaaaaaaagattggaaacaaatgtccatcagttttgcaattgtgtctgcttaaataaactgtggcacatttatagtgaaacactatgcattgtaaacaatgtttctgttaaaaaaaaaacttttttttttttttttgagacagagtctcactctgtcacccaggctggagtgcagtggcacgacctcggctcactgcaagctccgcctcccgggttcacaccattctcctgcctcagcctcccgagtagctcgggaccacaggcgcccgccaccatgcccggctaatttttttggtatttttagtggagacggggtttcaccgtgttagccaggatggtctcgatctcctgacctcgtgatctgcccgcctcggcctcccaaagtgctgtgattacaggcgtgagccacagcacccggccaaaaaaactttttaataataataaaaaacgctatgccactgtaataaaaggttgaggtagctatgtatatataattgcctgtttatgcagaaaatgtctggaaggatatacaagcaactgaaatcttggctgggtgtggtggctcacgcctgtaatcccagcactttgggaggccaaggtaggtggatcaaaggtcaggagatcgagaccatcctgtctaacatggtgaaaccccgtctctactaaaaaaatacaaaaaaaagtagccgggcatggtggtgggcacctgtagtcccagctactcaggaggctgaggtaggagaatggcatgaacacaggaggcagagcttgcagtgagctgagattgtgccactgcactccagcctgggcgacagagcgagactctgtctcaaaaaaaaaaaaaaaaaaacctgaaatcttacaaggaggaaactgggtgactagggacaagggtggcaagaagatttcatcttatacccttttgtaccttctgaattgtgaatgatgaataattgccttctcaaaaattataaataagttgtgttgtcataacttttattttgacttctaagatggaattgtcagccacttgaagaagcaggcaggaccagcttcagtgcctctcaggactgaggaagaatttaagaaattcattagtgataaagatgcctctatagtaggtaagtagcaaatattaaaccgtgccacagaattgtcagtttggtttccaaaaccctccatgtctgggaaaaccacagaattaaagcagttaaggaaaccttggggcagttgagaaggcaactgacagaattgggtcagcaattactataatgtactatatagtacattatataattactatataatgtaattataatgtggggggcaattggtgttttatttgagtgggtttgtgttctcatagatgtaaaggtttaatttcaattaaagggactggaaggggtgggtgtggggaaaaaaataaaggactaggataggaatatcttcagcgttttctaatgcttcttaaactctgagatttgactcacaatagggtagttatgactgaaaataaggttttaaggtaggaagatacaagtaaataataaacctctgctattttcacagaaattagggaactttaaaatcagatcgctaggatttatcttgtttttgcagcattcattgctttctcatgtgttgcagtatctcgtttttaaatgacatgagccagttaaacactttctgcatcttagatgttcattgttttgttttttaaatgtgatatatgataaatttgactaaaaaataaatttaaacataaaagctatgtttgtgcttctcttagtctcctaattactgtaataaaactgactttcgcctggctcagtggctcacgcctgtaatcccagcactttgggaggctgaagcgggcggatcacctgaggtcgggagtttgagaccaacctgaccaacatggagaaaccctgtctctactaaaaatacaaaattagccgagcatggtggtgcatgcctgtaatctcagctactcgggaggctgaggcaggagaaacgcttgaacccgggaggcggaggttggggtgagctaagatcgcgccattgtactccagcctgggcaacaagagcaaaactctgtcgcaaaaaaaaaaaaaaaaaagtgactttctggcagcagaatatggtttactgtttaaatttggctaaaagccactttttatcatctagattttactgattctttatattttacaaggagttagcatgtatttattaaacatttatgttttagtcacttttctaaatgagtagttctgaagacaaatatagagaaggaaaaaaattgggtgaagtggtttacagtttattttgacatgtcatcttaatttaatccttctgatacctgaaatagtccctgaaactcttaagcaatttgcccaaatttgttcaattatgggaaagtaaaatgaagacttgaacactgacaaattttctcccttggctctctcaagaaatgtttctgtaaagggtagagggaaaattctcatcctaaatattgtgcctgtctgaggtagtcatggcaaagcagacccagtcctcaaaatagaatgaaatgtttatggtttatggaatagacgtttatggtttggaatgtccatctgtcagcacttattgcttcttccttgtgtttaatattttctgtataggttttttcgatgattcattcagtgaggctcactccgagttcctaaaagcagccagcaacttgagggataactaccgatttgcacatacgaatgttgagtctctggtgaacgagtatgatgataatggagagtaagtgactgagttgaatctcctgaccaagtattattgtgtgaactggtgatactgattgactgggacaaggtttcactctgtcacccaggctggagtgcagtggtgcaatctctgctcactgcagcctccacctcccaggttcaaacgattctcgcgcctcaacctcctgcatagctgggagtacaggcacgcgccaccacaccctgctaatttttgtatttttagtagagacagggtttcaccatgttgcccaggctggtttcaaattcctggcctcaagtgttccacccacctcggcctcccaaagtgctgagattacaggcatgagccaccgcacccagctgaattggtcatttttatacctaatttttcccaagggtttattgagtactttcaaggcattatgctacatgcccagaaactattgctgccttcaaggaacatccctctatctagtagagggagattgtatgcatgaacatatataaaaatgaaagtgtaagtgtatgtagaactatatatggagtggttggaagtacaaaagagggagtgtttttttcttcttatggggtaggggggtaatatcagaaatattcatagagggggtgactcttgaaggatcagttttctctggaaggttatggcctttgaaataaaaattattccagatagagcaccaggagtgaaggccttgagatgtaagatagcctaggcatgttggggcccatagtactgctggagtattgtttgtgattgagatcataatgaaagataagattggagtattaagcagagaccaaattataaattttaagtgccatacaaaagagctttgattttatcttttagacatttgagagccattaaaagactttgggctggggagtaatgcctagtgttccattactggaatactaagcttgtgggagttatttatatcctcctgctcaaggtcattgccaaggtctgatctttcacaaaaacaatttgcaacctcccacgtaaatgggttaaatttgtgaagaagtcactggcagccacatgataatgatttgaagggggagtggtgcaaggcattctaaggattctaaggagaattctaaggactataaggagaatctaaactgaggatgacatgtgagagtctaaactcggtcaacagcattagtggcaatggataggaaggggtgagtataaaaaaatgtaaacaatagtcactaactatgagtgaaaagaagattcagagcaagtttgagtttatttttttatttttttcagacagagtctcgcccttgttgcccaggctggagtgcagtggtgcgatctcggctcactacaacctccgcctcctgggttcaagtgattctcctgcctcagcctcctgagtagctaggattacaggtgtgcaccaccacacctgggtagtttatgtgtttttagtagagacagggtttcatcatattagccagtctggtctcaaactcctgacctgaggtgatctgtctgcctcgggctcccaaagtgttgggattacaggtgtgagccaccacacccagcccgctattgtttctaaaggtttgaaaatctactctaacccccttttgagataatgaaaaagctgaagcccagaaggattaaattgagacctggtccaacgtgtttggaattagttggggaactatgattagaaccacgttctcttaattttctaacccaaaatttagtaaaccctatacccaattattgcacttaagattaaggtggttagcatcttagtgttaatgagaaggtcttgttgctgaatctgtggtactagaaaagagtccttatgtgcttagatgttgctagttaaaagtggcagcaaaagtacatagtctgagctttacatgaaacatgggagctccaccagtaatcccagcatttttggaggctgagatgggaggatcgcttgagcctgggagttcaagaccacccttggtaacatgatgagacccccatctctacaaaaatttaaaaaataaattagttgtgcatggtggtgcacacctgtgttctcagctatttgggcagctaaggtaggaggatcacttgagcctaggagttcaaggctacagtgagctataatcacaccattgcactccagcctgagcaacagagcgaaaccctatctcaaaaaaaaaaagatgggagacagttcttctgctatctgcctactgagacttttcttttttttttttaaggggtatcatcttatttcgtccttcacatctcactaacaagtttgaggacaagactgtggcatatacagagcaaaaaatgaccagtggcaaaattaaaaagtttatccaggaaaacatgtgagtacttctttgtatcttgtctgggatttatttgcttgattttagtttgtttacctcagttattaagccgagctatattttggcgtaaacagtctatttggggggattgtaatagtaatagtttgagtttatattaaagcagtaatgtgtgggtgttagaactcctgttgtcatcctgtaaggtatatattgctcagtacttgttctaaatgtttaaaatctctttccttcataaatgctatcaattattttgtggcaactttatgatatagctaaaaacttggcaagccagttgataatggattatttcatttcagttttggtatctgccctcacatgacagaagacaataaagatttgatacagggcaaggacttacttattgcttactatgatgtggactatgaaaagaacgctaaaggttccaactactggagaaacaggtaataagaattatgtttttccctcatgaacaagtttacccaatgtatagacagtcccttctaactatcttgttggttccttaagaatctgtaaaacaataaatggttccttaagaagaggtaaaaaaaaaaaaaaaaaaattaaagtaactatcctgttaccatgtgtggtataaaagcaggaaagaatgggaacatttggcttccaaattgtctacaattgacttcaaatggctacatttgaagccataaggacaaataaactgttttcacaatctgttgggcatgtatttcgtaggtgtttctttgctttgtgacacagtgactccaagtagaaggtggaaatttgatataaaatgcacttaaaacattgtgcttacttgcacattgagcctctcagtgcattttacccttacaaattttgttttcagatcagttattatgcctataatagatttcagttatatattacagcaagatttagcaggaatgcaccagttgattgggtatcaccaatttgccagtgaagttcagtaaggcattgaagtatatcataaccctgtgtcagtgcccaagagctcagactgttcagactgattccagaaggctagaactatagaacttagtctttgctttccaatcacttgcttcttagtttcaaaagtgcttgaccaccctgtatagtcttggcacaaatgtctcttgtttcccacagggtaatgatggtggcaaagaaattcctggatgctgggcacaaactcaactttgctgtagctagccgcaaaacctttagccatgaactttctgattttggcttggagagcactgctggagagattcctgttgttgctatcagaactgctaaaggagagaagtttgtcatgcaggaggagttctcgtgagttgctagttgggctttgattctccaaggcaattattaaagccttttatactacaaaggatttctaaagaacaataaccctggaatgtgaagataggtcttttaatcaagacctatgactgtcatttttctcaatttaaatataggtactttagaccaggcgtggtggctcacgcctgtaatcccagcactttgggaggccaaggcaggtggatcgcctaaggtcgggagttcgagaccagcctgaccaacatagagaaaccccgtctctactaaaaatgcaaaaaaattagccaggcacggtggtgcatgcctgcaatcccagctactcaggaggctgaggcaggagaatcgcttgaacctgggaggcggaggttgcggtgaaccaggatcgtgccattgcactctggcctgggcaacaagagcgaaactctgtctcaaaaaaagaaataaataaagaaaaataaatacatataggtactttaaggattatgatccttaatgaattctgaaaactaatgaaaggatggcaggttggaattcttacatgattccacttggtcattagaaatagcagataaagggtgagcacagtggctcacacctgtaatcccagcactttgggaggccgaggcatgtggatcacaggagttaaagaccagcctggcccacatagtgaaaccccgtctctactaaaaatacaaaaattagccgggtgtgacggtgcgcacctgtaattccagctactggggaggctgaggcaccagaatcacttgaacccgggaggaagaggttgcagtgagctgagatcatgccactgttctccagcctgggtgacagagcaagactctgtctcaaaaaaaaaaaaaaaaaaaaagaaagaaatagataagattggacagcctcctttgggccagatgtggtggctcacacctataatcccagcactttgggaggctgaggcaggaagatcacttgatcacttgagcccatgagtttgaggccagcctgggcaacatagcaagaccccgtctccaaaaaatttaaaaatctaaaaaaagattgaacagtctccttgatactgacgtaatttcaaaccaaaccattcccccccctcatccctacagaatgtattttctttttgaaatagcacatgggtctaaagtgaactcagaatcgggaagatctgaagaccccggaaacaatttttaccctcactttctgagattttgggagattgagacaagagaaaatcttccttgtgagccagtcaataaaacaaaatactgtaaatagtgtgctccagagcaataagaccttgttttcttacaaagatgaatctccagaagaccaatgattctcctttctctgaactttgtaatccacaaagaacacactagaaataaaaggaacggtttgtttcttcagtcggtagttctgcatattgagagatgagagtcccccttttttagccttgaaaagctaaaatacatagtaactattcaaagaaattgctgtaattttctcagcggtgggaatagattaacaagccttacccttgttttccaattgtaggcgtgatgggaaggctctggagaggttcctgcaggattactttgatggcaatctgaagagatacctgaagtctgaacctatcccagagagcaatgatgggcctgtgaaggtgaggtgctcacagcctcatcaagctatgagcaattgcctgtcctcatttctttgttccaaaactgtggggtctaaatgaagacttcgttggccatctctttttttttttgtccttactcccgagtcataaaataagcattggcaggccaagcggtggctcatgcctgtaatcccagcactttgggaggcaaaggcgggcacatcacaaggtcaagagtttgagaccagcctgcccaacatggtgaaaccccgtatctactaaaaacacaaaaaaatcagccgggcatggtggcgggcgcctgtaagcccagctactcgggaggctgaggcaggagaatcgcctgaacccaggaagcagaggttgcagtgagtcaagattatgccactgcactccagcctgggcgacaagagcgaaactccatctcaaaaaaaaaaaaagcattggcagggctcataatgcttggtaggggcaagcgtgtaaagcctgcgtagaattttctgatgaaatttatattgggctaagttactcttgaggatagagcaacccctaagaacagtgtgttgctttgaattttttatagggatgtggtcttactctgttgcctcagccttctgagtagcttggactgcaggcatgtgccaccaagcttggcttgaaattattttaaggaatggttgggtagcacttctatgtcctgtaacttcctgaacatagtttgacaggtgacagacataggaacgagttggtatctagtgaatgacaacatctttaatacaatctgtaaatgtgatttgggtttccatgacttattttctgtggtaacacatcaaattagagagggattgggtctaggaacaaatacagttgtgaatttatttttttatgttaccaactagagattcttctgtgttttccaggtagtggtagcagagaattttgatgaaatagtgaataatgaaaataaagatgtgctgattgaattttatgccccttggtgtggtcactgtaagaacctggagcccaagtataaagaacttggcgagaaggtaagtgtgaaccctattctgaggataacatttgagcgggagcagtaagtttatgtatgtattcagcattggctaatttggttggttcctaagtactgatagatttttttcccaattacttgctgtttactcactttctcgtgactgccccctagtgctccagcctgtgcagtgcctgagatacccacttttaacattccattcctcaggctcaatctagataatggttaaaaatatctaaggacttctgaattttggtaatggcttacatgaatccatatggtccttcatcttaaaacatttggcttagcccctgtaatgtcttattcagaccaggtaaatttgaaggtggcaatatgtagagtcttaatacaagagaaaaaagggaagcttgtggaaagtgaggtactaccatctgcaaaccactcttcccacatgaacagcagtttatctgctggaattacaggtgcgcaccaccacacccggctaatttttgtatttttagtgtttgaagaatgagattgttttaagtcttcaattgactaagtgtccctctgtcactgaaaacttgaaatgtaaacatttaacctgttttattaacagctcagcaaagacccaaatatcgtcatagccaagatggatgccacagccaatgatgtgccttctccatatgaagtcagagggtaagtggcttaaaacttaacaaaagtgtctaggcaatagataggaataaagcttgtaaccaccaggaaatcattactagacatagttttcatattcagttgaaggcagaaccactgattccttcttggcttaagagttctgcagtatgggcccacataactgcttgaaattaataaatgtttctttccccagttttcctaccatatacttctctccagccaacaagaagctaaatccaaagaaatatgaagtaagtgaattgtcccatatccccacaaatatatacacagacgtaaacacacaaccttaaacatagttctttaattgggtttatttatttatttaattattttttgagacggagtttcgctcttgttgcctgggctggagtgcaatggcgtgatctcggctcaccgttcaagcgattctcctgcctcagcctcccgagtagctgggattacaggcatgcgccaccaccccggctaattttgtatttttagtagagatggggtttctccatgttggttgggctggtcttgaactcctaacctcaggtgatcagcctgccttggcctcccaaagtgctgggattacaggcgtgagccaccgtgctaggctaattgggtttatttaactaaaatctctttaaactctcatgggcagtatatgtggctgctaatatgcttttacaaactcagaagtcttcctgtttgggtggggcagatcagggttctttaaaaagttacacttttaagctgatctttctgttttcagggtggccgtgaattaagtgattttattagctatctacaaagagaagctacaaacccccctgtaattcaagaagaaaaacccaagaagaagaagaaggcacaggaggatctctaaagcagtagccaaacaccactttgtaaaaggactcttccatcagagatgggaaaaccattggggaggactaggacccatatgggaattattacctctcagggccgagaggacagaatggatataatctgaatcctgttaaattttctctaaactgtttcttagctgcactgtttatggaaataccaggaccagtttatgtttgtggttttgggaaaaattatttgtgttgggggaaatgttgtgggggtggggttgagttgggggtattttctaattttttttgtacatttggaacagtgacaataaatgagacccctttaaactgtcttattttccaccagattgagaaccagatgttctctacacactatcactgttcaatagagctttcttcagtgatggaaatgctctgtaatctacactgttcagtacaggtagctacggagcatctgaaatatggctagaaactacatttttgttttgattaatttaaatagccatacagttgctaccatactggtcacggcagctgtagactgactgggtccatagttcatcacctcaaaattctttcaaaatttattatctctttctctccttacatgtttatttcccaggcctaccctggtgattagaacagctgaagggcctttcttgttaggctgtccatgccctaaggatgggttcctgtttatccttgccacgcagctgagcttactgcatgtttatatctcccaaggactgttctctgctcagaaatgccctgtcaagggtgtggcatcacgcagtttcatccaagttgtttcaggaattgctgacactgctgggtgcagttctatcccctaaagcctagggtgtggccctttaacttccccttcagtagaactgggaaaggcagtaccattcctagttatgagtgaagcatccactttcttttgtaacaatgaggaacagaaaggataagactgaagagtgatcttttgtccaactaaaccatttatctccttttgtaggtaaattcaaatcctgcccagttatagttttcagtcactggagaattccaggtaggagccctactttaggtgatcctaggaactcctatgttcagaaaagaattttcttcctactatataattacagtatttagctgtcaattttaagatgaatttggtagagccttatagtaaagtatgtatcttggtcacacacaaagcttggaaaaagtaaaagatgtctaaaccataatcttgtaactcataacatctgggctggggcccggggatctaattgtttagagagccccaaaagtggctcagatgtaaagccagggttaagaaccatctgccttggaagatttaagggaaacatataaacttgtacaaaggaca

SEQ ID NO: 162 - DNA, 32744 bp, Homo sapiens
  source 1..32744: mol_type = other DNA
gcccaccgggcgagcttctagtcggcgattgaaggatgcgagtgctccttaagggcctccgccccgtgagttcggttgtgactaggaaggagctagtggactagagccagggtaaggggatctgctagaagttggtcttccgccaggactagagtttcctcgcggtaacagcctccgtggcctccggtaagttctgattcacgggtgagcttggacctggggttagaggagttgcggggtcctcgggatgctggctgagggttcctgggggggctgacctgccccctccccaaatcccgcggtggtggactgcccgcatgttgcgggctcagcttttaccttaacgtgtcatttagacctcttcattcctccaatatcctacttagaagtgacatatgggaagcccgcctcgtttccaggctgctggggtcgccctgagaccctactctgcggaccccgccttggtcaccctggcgtcacgcctggctcacagtaggtgctctgtgcacgtgtgttgaccgagtacaagtgacgctggcacccgaagccagtagccccgggcatcctgggccccgtgcggctttggtcatgtttgtagtgccgtagctgacgccaaacagttcctcaaggtcattcgctcagcctgtggatgcttattgtgtattagcattactcgctccgccctctgggcaacttgaatcaatttgtccaaagtgctgttattagcactgatcacaagatgttgtgatcatttgtttatatgtctattttctttcccttcatcgtgtcctgttaaactttgtaatcttgaacagtgcttggtaaattgtcgaatgaatgaataaggtgtctccaccaggtgttgcaagtctaaaccgggctatgtgctctggctatttccattctagaaggcgagttatgtcagcaagtaagtagaatttcccaactccaagtgcagttcttagaaaccccttttgtgggggtttataacccttcctatatcgtagtcatgaacttgagtctgatttaagcctattatcaccttataccttcatagtgcgtgacaatgaacatgcactccctagacaggtgaatgcactcaactaaagagaagctgaagttgaagccataagaaaagcataagaaatacagtctgaaagtgcaaaggagtggccagctccatgggggaacaggcttgggagggcatcttgaaggagggtggcatttttgttccataggaggttgcattattagaagtgacatttctcataggctgcacattcaccttttctcagatatgcggaatcctctttattccctaaacctcttcggtagctggcagactcctattcatcagtaataatgtcataatagtaataaaactacaatgtattgattggtacatagtgctaattactttacatgtagtatcttgtgaatcctcagaatcaatctttgaagtaggtattatttttacccccatttctttaacgtagaagcagaaacagtttgctcaagattgcactgctgataaatagaagagccagaattgagcccaggttgtctgaatgagtgccctcattcttagaaccacttatagccatattgtgtcctttaagatttatttctaatctaaaagctcttttttttctgtaaaacttctctaaactatcctttcttcttaggaaaagtaatttgtgctttgtactttcatctactacggaatttattacaatatgttattgtaactgtttatatcagtggctctatctaagagagggtgagcagagacagtgagctcctcatggctggtaccatgtcttaggtgcatctaggatatgatctggaacacagtgggtattcaataaaattttattgaagtaatgaattcgtataaggtaacatgcctatatcatattcagtcaacaaatatttgttatgtacccaccatgtgcaagcaggcagatacattttaattctgccttcagggtgcttatagtttattagatgaagcaaaaacaatgctacttttgctttgtaatcttttgtccaaatacccattgcttttgttgcaaggagggcagagaaaacaaccggggacaacaaaaggaatgctgggtcagagcatccatctgagtgtaacaacaagacatactttttatagtcttgttaagggttcagaaaaagttatctaggaagaaagtctaccagactgctattgaagaagaaaaccaaaacatactgtatacttaatctgcatcttgatttctcaagtggtcagccttgagtcaatagatatagaaaattttcagtatttttactagtggcatagtattgacaaattaattcaaaataattttactagtgtaaatgttaattttcaatatattaatattgatagttttcaagatggtttagcagttgatattttcaccagcaactcatgagccatacaaaatacaaaatagtcaccactgggtgataacaagttttttttttgtttgtttgttttttcaatctagtggttgaaaatggcatattgtttaaatgacacttctttgaaacatcacgagcttaagcatcttttcaaactaattgatttacactttttaaaataaattgtcatgtcagtcgcccaattttatattggattgtctttttctcatttctttgtaataattttatattgggactttgtcaggtgctttgcaaattttttttattcttatttttcttgactttgttattgatgtattttttcatatataatatttgactcgttaatgatgtcttttgccttaaacaaaattttattttttgtggttaggtttccatcacatttttctttatggcttttggatttactatcttgctattttttttttttaaagaagtctcttttgttgttctgaatattatactaaagtctctggtagcagtgataatgagtggtgattaataagttaaggtattagcttttattttaagtctcatttaaaatatgtattacctttttactatatatatttttaaccacattaagttgatcaggtttccctttatgtctgaaatcatttcttaaagtcttttatagtttatagttctgataaggaaaacttataccttcttcagtgggggagattttggtcttttcaggtatttttagatgtcttctttaatgacatgttttgaatttaaaataacattaaagatatatactttgatattttacattctctttaaaaacaaaaccctaagtattctctatctgagaaaaagtagctgtctatttaaaatattagtagctacatttttagcaataggctcttataaatcttaatgttctttttcaataatcaacatcagttgatggcaggttaataaaggatgggaacaaacctctcttctctaacttaatgaaggagaaagtaacccaaattccatatttcgtcttgtatttatatttgaatgaaagaaaggtagaagacacagaattcagaaacagaaaggattttttctgcctggaggattcaggaatttctttaaggtccagcttaatttcatctcttttttttttttttttttgagacggagtctcgctctgtcgcccaggccggactgcggactgcagtggcgcaatctcggctcactgcaagctccgcttcccgggttcacgcccttctccttcctcagcctcccgagtagctgggactacaggcatctcttttaaggacataggatttaattgggctagtattttcaatatatatagtgttctgtagaatattaagtctatttgcatagtggaaaaaaatctagagacatgagattgtgtgtttttccctcaccatttcatgttacaggctttttatcatattcatatcttcatcttatgttgacatacaaaaggattcttatagatagatttattttcctcgatatgcatgtctcttcccccgtttagccctgtcacaagggtagaaaggaataggtgtggtctgagaagcagaggctggagggttttaagttgaggtatagtctgagttgatatgagtttaaagggacgggttgggtgtagggaccagagaggaagggattagaaggtagactgcaaattagaggttggccaagaaacataactcagtctttgaaaaacaaaaacttgtcatagggggatttttaccactgaagttcatatgtatgttaatctttaataccatattcatctattctagcttgcatattttcttttcacactttaatatctacaacatagactgcgtcctaaaattaatgttatgtcataatttgattggctacatctcgttcctactgctacaaatggaactgcatcatagaatcaaagacatcttagatctgatgaaatgggatattgtctgctctagagctattggcttccacaaaagtttgtgatatagttcgtatctgttaagacgagggagctaagttctctatggtaaaatgcatttggattgctgggtctccatgcttctgattttacttccaatttaatgacattttagagcttgaaaggtgtagtgaatgagttgtggctcaggctcacatccaagtgcgtttcattggcatgaacaacagtggactgaatggagggcagtgttaggccaggtaattgatgacacctgcctacttttttgttgtgattgttcagagctttgaagttctgaggagtttatgtatagtgtcaggatccctaagtacaagttaaatcagcagcagcttttttgaatgtaagtagttgaaaacccatttcctgctgctgcttctgccgcagcagtcactgctccccagggaactcttgctgttgcttttggaattggaagtccacagtggtggagcttcacagccttcacttctgtttttcccgagtatattgccagaacctgattttatcaagcttaagaggaggacatttaagacttatattttgttgtgcactctatggcattgactgaattgtaaatggtttctgggtagtagtcattcactcatgatttaggggccttcttcttgtaaagcatgatatttggatttctgatattaaaaaaaaatgaagcaatagggtactgcctgtgccatgtttaatatatcacatttgaagttttgtttgagcttaagatttttacatttggcacatttctagtttattattattgtcatcttatttttcatgtcggcaaaaatcttactgttttatactcttcagaccactagaaaggtctattcatagctttattacctatttgcatgttttcttttccatgaattgctgtcatatagctattttcggtgaatcaccattatttttattggccataactgagttatacatattttctcccagtctgtttctgtcttttcactttgtgtatgtatggcatctcttatgtagtttgtcctggggagattttatgtggtgtccagaaaccaaacatctttcccttcccacaggaggaccatgtcattagactttggcagtgtggcactaccagtgcaaaatgaagatgaagagtatgacgaagaggactatgaaagagagaaagaggtaagttgttaaaaaaaaaaaaaaaaagagacactaaacccaatctttaacaagttttatttcttgatcaaaattgtatcatcttgtgtcattttgaagggatttggattttttaaaaaaaaaacaaccctaaaatctgcttgctatttagactgaaaaggtgaataagtggaatgcttctgtttttgagacaggaataaaacacaactgtgaataataccatcagataaatggttaaatttttcttttcatttaggaggtaatggttggctttggaagtggaaggttagtttctaggtgcttgaaacattgccatgaacaagtctgacaaggctctttgctttgggtagtttacatcctagtggaggcagacaataaacaagtaaacaagtgagtaaagtaatttgagtgagtgataatttatcattgataaatgacagggaaacaaattggagtgctatgaaagcaattgataggggattgctgtagatggggtggtgagggagggtctgtgggaggaggcaatatatgagctgagacttgactcatgagaaggaaccagccatgcagaagcctgaggaagagcagtctacgccaaaacaccaatgagtgtaagctgggaagttgggaagagaccccgtgtatgccacagatcatgtggagcggccagaaggccatggtattgggtatatatgagccagtgttgggtggtggatgtgggtgtcagatcatggaaagccatgataaggtgtttgtattttattctaagaacaatgggaagccagtggaggattttaagcagggaaaattgatatcatatttttgaagatctttcagaaggctgcatggtgaatagattatagaaggaaaggaataaaagggagagaccatattatttatatgtaaagtgtttagcagaattcttggcacatagcaaatgttcagtaaatggtggcaatagtaatagcagcagtaatagtgttattggtggaagtcaatttagttgttttggttgtttttagtgtaagtcaaatttcttgattgtctgtgataaaaggcttcttttgtcctgacgctattttttatatgacccattttctaacatgtaaaaaagtcttttttaatagttattgtggaccatgagtattaacaggaagcaaggaatagggtcagttgaccattgctcatgtggctggtggtagaattaaggcagtgatagaaaactggcaacttgctggatttggttcagacaggtattgttggttgcagagtgcttttaaaaaattgaatctgtatttgaagatgggaaaattttatgcagcactgcagagtctctggcttatctaaaaaacatccaaagccctggccacacctggcctgtatttgcacatggcagcaggcgggctggaactgagcagtggctctccttccccagctggccacagtccccacttctcacacagacatgggcttatgcactcagacctgcctgcttcactctggtaaattctctgccagggccctgagggcatttgagtttatgaccctggtgagggtttccggattttggcagggcccctcacaacaattgtggcaaggatgggaatgaggattttctgttactttgaacctgcagcatgaggtattcatgactgggcttggatagttggctggggtttagccactgggattcttgagaaggtcagtttaaataatcactactgtaaagaagaaaaaatattttgacaggtgatttttcattgagaaatatattagagagataggtctgccagtgtattgtgtggttaaaattttagaggggatactagttaaggaggcaattaattctagataatatagaaaacagctatttgggatcacctctttgatagattgtatgctgggatagggaatttcaggggaaaagttgttcttgaaagatcaagtatctaagaatgagtatttctagcagagtggaaggatatatagctgaattgactctaacatgatgattatggttaaatttgtaaaaaacttcatgttaataaaaatatttttactttaaaaaataattgctgcaagggaaaaagtgagatgagaggctagagaggttcaaattttagtaacaaacttcggaactgttcacaaatcttcagctgtatgtatactttgtcactacaagttaaagtaataaattgggtggtcaaacccaagcttgaatgcatatctagaaggttttttttaactgtctcagtcttcctgacccagcaatagccaaatggttcacagccttaagagattaaagaaaaaaagctgttttatcctgtctacctggttggtagctttgggactgtggctttgggattgtggctaggttataactgttagcagtgggctaatgcatattgctttctctacttagtgaatcactttgtgttcaagttgctgatgtgggaggaatgcctttatccctgatgatgtgctataaggcttaccaggcataccacatctgactcatagtctaccctgctaagggtttgtgagagcctgtcttggtacatggttggatagtcctgattttcactgcctgggatgaaaggctagttgctaatacagcatgtttttccaagctgtgtttaattttgttgttttggtgccagttgggattttgtccacatgggcccatatcccaatgaatacaccattccaaccttcatgccatcctaatgagcagctttacaattatgattttgctttttccatttctattctctccattgtttgtattgaaggtcaaagggagaaagtgcctttaacattcagaaaaaggaaaggatttagtaaatactttattcaatatttagaggatatttagaccagtggatctcaagccagagaccatcacaaatatacccatattttgggaaaaaaaaaagcaagaattttttagaaacgtcctataatgtatttctaaagtgctacaactcttaatggtacattagtaaaagttggcccactgtgagtcaaggcataaaggcatagtagagaggtacataaaccacagcttctcacagtgtttcaactgaaactctcatctcttaaaaatagtcgacagagcagattagggtgtagatcagtgagagtgatgacatcatagagatatgtatcgtcagttaatatcaattaattgtcacacattacttatgtttctcctaactaactggagggcattattttctgattgtaccacttgagagctgctggtaatacttgtccttcttgctaagaaggagatatcatccaaagcaaacttttctttataaagctgtcccagaaaataattcagaagctcttgtattaactcactcataatgtaacaatatgactttgcaaaaatgcttttcacctaagtctctatacttgtgattgcacagttggatattacagagatatagttctttttttttttttttgagatggagtctcgctctgttgcccatgctggagtgcaatcacgggatcttggctgacgctgcctcccgggttcaagcgattctcctgcctcagcctcccaagtagctgggattagaggcatgcaccaccatgcctggctaattttttttgtatttttagtagagacagggttttgccatgttggccaggctggtcttgaactcctgacttcaggtgatccaactgcctcggcctcccaaagtgctgtgattacaggtgtgagccactgcacccagccccagataaaggtctttttgtaataggcatgcttgttataagcctctcagttgttggtaaagccacagcttaaacaagattgccattttggactctcacagtcagctggagtagacatgtactttctgcagtgtcaccagaagtagctctgtgattgttgttggttccagatagtaaaattatctatttatgtgtgtatatattctggagctggtgatttggggcagaaatacttggtaatctatgatatcaagataatatttgctgatgatggatcatttagtgttgacgggtcatttagtgatgacatatttgaaaatgatcttgagtagaaaggtagatggtttaggtagcaggtggcagatagaaacttgcacttggcaatactgacttggtttttatagtggtacttctctaatagaataataaagctccattgagctcagcatcatgtattttagaggcaaggtttccattgcatagcctttcttccactttttaactgccttgtttgatgtaattgcggaagcattttgatattttgtttccactagagggagttgtaaagctagtatttgtttacatttagcgtgtatccatgaaagcattatttaataattcatatttgaaaatatcagaatctttttagaagcgtactaagaggtcacctgttcaaagggaatatgaccgttaggtattccatttgctaccctttctcttgggagaagattattgtatggtttgtaacttgaggcctcttgccttcatgaatattgaggattataggctctgaagataatctgtttagttaatttaagttgaaaatcctaacaaaaggtttacatgttctctgttttacatttgcccctgaatgtaggcttttgtatgttctacatgggttattgcaaagtgttttgttaacaaagttctttgagtaaaatgctctctttttttttctttttaagaaagaaacatgaagtagaaaaggaggggagtttatagaatgattctgaatttatttcaactgaagccttagagtggcaaattatctttcttacagggaaggtatctgttaaatttttaaactcggttaatacacagtaatatcctgttgagattgctgcttgctgccaaaaagcagtctgatgaattttaaattaatgagtggtattaaatcttatcacttataaggattgttatttctgttcttgaatctgtatttggaagtttgatagatctttaatgaggaaaatttatagtttctaaatttctgtatttggtaacatgcatatctagatacggcaattttgtgttttattgcacaaggttagtgaccaaagggcaatttgacaatgtatatgaggagggcacactttgatcctgggaaatggaaacactggaggtggaattttgttcctgaatggccttatttaggaggacttcatttagcttttctctgccctgaaacttacagaagccagggaatatgacccagctatgccaaagaacttgatggataaattttttgaagatcaattttaaaatgttagcatatatgtaaaatatcttgcaagactctgaatactatagggatgattttgctagttgatgtttatgtatgtatccagaagcattttgattagctgattgcttatactcaaattaatttttctctgtggatgccaattttgtggtgtcacaaagctacaataactgctgaattattatgtagttttttgtttttgtgcggggaaaacaatgtactcttcagatgtccctgtcaaggcgcccctgaattttaaggctatgtacttgaaccttactgaaggtttacaagaaaatattctttctgttcaggagtctttacttaatgtaagtataaaagatttgttttatttttccttgtgtaacatgtgggggtagtctttttccttaaagcagtgatgcataattctagacaacaagtggtgctacttttaaaagacctcatagatgcaacttttttctctagtgcatttgtgtctttgtagaattgctttgctacctttcatttgaggcatgtcttgtacaaatatgttgatgtgttctgttttgtttttcatgttgtgtcttttgtatttcttgttttttatatctctcagtcaactctgatatggctaattctcaaaatgatttttcaagtaccttgcatgtggagatgagcatttaatgagggtcttgtgtgttaatgttagcgttaaaagatttaaagatgaagataacttttcattgaagaaaatatctttctcttgttgcatctttagatgacaaatggattgagaaaccctttaaaaaaaacccatccagtgaatatgagaaataaatatagagtgaggaagtattcccacccacctccaacatactctgttcccattcccaaattttatttcaccaaagctcagttaagaatttggggcattcctttcagaccttccataaaatatatttatttaacttttactatacatattttgtttaagaaacttttttttttggtaattcttaatataatactcagatatgttttatggacacattccatttcttttgtactaatgacaggtaaagtggaaaaaaaatgctatagaccagggagcatctcattttttttttcctgaaaggttttacaaagtatttaaagtctttaaaatccacttgcacaatgttatggggtttgatttatgtcctttggagggatttaatcaagctgtcaattaaactggtgcttagtttcttaaagagaagtaattagaaacagtttccctaaaaagtatttagtaacataatatttgatcttctaattgttacataatttaagaaatacattatattgggatttttagggtaatattattatattgggttttgaagaaagacaatagcagacagttattgaaatcctaaatgttattgaattatgtctaacagactagcttatttactcatctttttatcacatttgaaatttgaatgaattaattttgtctatctagtttatataataagcagaatgctaaaactgatttttttctagaaaataataggagagagaaatcaaacatttaatgtcagatgtagtgtcatgcttttgcatgtgctatctatagaaaacagtcttccaactcttcttttactcagatgttgtatgagagcagggtattatgtatcttttcatctttggaattagatggctctctactaattagtgactcccacgggtttctacattatcagagcatttaagagcttctaggccacctgctgctgctgctgttctcatcacctggccagagtgcatctggctactcacattccctgtgggatgcctaattgtcaattccccaaggtctgattactgataaaacaggattctgagacttagtctgcctgccctgtgataacataatgcattgattgtaccattattgtgacttgctgtgtttccataaaaaagtttttgaattctgctctatgtgtatttaaatctgagatcttcgttaaaaaaaaaaaaagccttctgatataaatcctaaaattatgcattcccttttccccaagtgaaatgatgaatataatttgtgtggaacttaagaagttaattaaaggagggaattatgaacttctttgacctctacagtaaaaaaccactcgttccaaggcagctttggcttggtgtcttgtgtttaagttggtatgatattgatgcagaccttttgactcagttgcagcagttactcacagaccttccccatgacatgctggatgacgacctctcctctccagagctccagtattcggactgcagcgaggatggcacagacggacagtaagcacctgaagtcactttcacttgtatattgcaattctataagtctttttcttttgatgaagattaataattacatgattataaaattgtaaattgattcttaaaattttgggtgaagattggaaggaaaaaggttaaaatcttggggttctttgtgttatctatgtacaaataaatgatacgctttaaatcgaaagtattcctttttctcgagaccacatcatcctgagcaattggagatgagctggaatgagcaaatgctgcccaaatctcaaagtgtaaatgtaagtatctggtgtgatgatgactttggtgagggtgggactggatcttcgtgcttttgttttactcttgttatctaatagggctataatgaaattcagagtttatatgctggagaaaaatgtggtaatgtctgggaagaaaatagaagtaaaactgaagaccgacatcctgtgtaccatcctgaagaaggtggagatgaaggtggaagtggttatagtcctccaagtaaatgtgaacagactgatttatatcaccttcctgaaaactttaggccatataccaatggtcagaagcaggaatttaataaccaagcaaccaatgtaattaaattttcagatcctcaatggaaccattttcaggtattgtaaaaacttgactttcaagaacttgtgtgtgtgcacacgcatttgcgtgatgtttgtgtgtgttcaggaaatgtatgtgagtacaatggtaagatgatttaaccacacgaagttctgagagggcacttattcaggttcatggtgaattagtcatggtattttctgtttacagtctaatacaatcatgatcttaagtcagaagtttaaaatagaggctctttggacatagttgattaaacattaaaagttaagtctgccaaagaataactatcctcatttactgctgcttctaccactgcactgtgcttcaatgagaagctgtgttcaggtctcttattgtagtttttaaagcagtaattctgtgtaggtggcaacatttaatttcctcagttttcttgctcaccacccataacaaattttaggttaaacatgtcaaagctgatatctctattgtatggtgatataacagtagacaggatgaatgtgaaggaaaaaccaaaaaaccttgtttttcctgggggggagtttaatgaagtaagacctcaggatatagttagttgcttcttagaatttctcaatgacagcaaatacctcaacagctagtctgtgtcacgcaatgacaggatggattttttaggctgttaagtggttattttctcttaattctatctccgtagaatgttattattcatcccataagagttactatttattagatatgaggcaccgtggtccatgttcatgttattggatatgtgcatttttatattcccaagatgttggcataatctaaatcatttgtaataaaatatttctatatagtcttattggaattcttgggttttatttataaaattgccttcattgtgtgctcaaaagtagaatttaggtgtctataaattatgtattgcagactttcaattaatagtgttaaataacaatacgtgctacttttgagcagatatatatatgtgtgtgtgtgtgtgtgtgtgtgtgtgtgtgtgtatatatataaacaactttgaactgtaccaaaagtaagttctgtaacgtaacattaatttaggtgtctaattcagataattttggaagaaaaggccaaatcttaattgtcagtttcatttgttatcacagggtcccagttgtcaaggtttggaaccgtataataaagtgacatataaaccttatcagtcttctgcccagaataatggctcaccagcccaggagataacaggaagtgacacattcgaaggcctgcaacaacaatttttaggagctaatgagagtaggtatcaagtttatatttattttttaataccacataattggggaaatttgaatacacaatgaatatttgagcacattcaagaattattattttttaagtatgacaatagaattgtgcttgatatttcaaagagcccttatttttagagatatatactagagtatttatgaataaactgacatgaagtctaggatttactttaaaataataggctgttgaggggtaatgttgggtgggaatatagatgtggccaaattggccatgagttcataattgttgaatctgggagatgggttcgtggagattcatcatattattctctttactttcttatatatttgaaatttttcgtaatgaaaagttaaaagacatttttccaactttatatttcagtcattctagtttgttaagccttttctccttatttgtatagtgttaagtatcctcgcctatcatacaggatacctggacttatttgaaatttaaaaaaattttaaaagactttttatgaactttatatatttttttgactgaagcctaatttggaaaatgaaacatagttttcaatctcagatttttgactatatagaagtgtaatttaatacatcagcactatcatcaacttttttcttttgattttacagtttttagtcaactctgatataaattagtttatattcagaattacttagatatcaggttcagtcatgtggcatttgccagttttttttgtatagtatgtatataaatatgagaatgaaaaaagtgcttataggtactagagaattctgagatgaaatgctagtatcaaaaaacaaaaatcccaaaatataaacccgtatagtgactgtactgaattactcttgtcatactgtctggcacactaaatagcttctaattattgtgcatattgaagagccagtgtaattctagagtgtggcagcaagtgtttttgttttactttttgtttccctttaattagtaggggaaaggtcatactggatattctggcttacctgggctataccaaagagaaaactggacttttgggttgtgacttcatattgttgcttccatcgtacactgggacggcagggtagttacagggggaggcccagaattcattttcccctgaaggagtcaacagcaaatatgaggatggcctctctttgttcttaagttttttgtggaatgaggaagtggacagtgtatatgacataactggttttaggttgagtaaatgaacctcacagcagtggcctgacatctccttagtgtttactctttcagttcccttgaaaagttgtatttgtatctcctggtctttctgcatataaaaacctttccttacctttcttaacactctgcacttcttcaagttgagtcagttacacatttgtctaaatttgacatttggaagttaattaaataacttaatggtagtgccaaattagtgattatagtttcttagcaacagtaatttaaaaaatttggagatggggctagctctactataagacctatgaggagtttgacttgtataaacttttcagtctttaattttctttatttaaccagatctctttctaaaaagaggacagaattatttagttagcaagtggttaaaactcagtaaatgcatttatttctgattgtaagctaacagaaacattgttctagtagtaagtagaatatttatcattatgtagttgaagcatacctaccaatccttttttccattttttttctctttttaaagtggtccccaaatgactaattgtttctaaaagaagacttcaaaaatttttttttaaattatgtattcgtggagtagatttggaggtttgttatatgggtatattaaataatgctggggtttgacttctagtgaacccatcacccaaatagtgaacatagtacccaatggatagtttttcaacccttctcccctgctccctccccaaaattcttgattaatctattcactagctaattaattcagttatgtgccagcatcaatataaatataatattttccccactcctgcctaaaataaaatattttgaggctgtctagaaattttctttaaaaatgattttatagaagctgatgtacttgttttgtttttaattttctgacagcatattactttatttcattgcagttgttatatactgatttttaactggctaaaatggtagttagtgattcagggttataacttaaaccagtgactttcaaactttcctatcagtgacccactgtaagaactatatttttttacattgtgatatggtgtacaacatgtatctatatgaacaggtatatataaatgaaacaagtttcacaaaataagactgtttcttactacatgatgcactctgatatattctctctctcttttttaatcctagtcacaattcactgaattgatttcatgatgctctaaaaggttgtagtcacagtttgaaaaacactgctttaaatgactataaatttatattttggtatgtttttatctaataaattgtctttaattcccagactctgcagaaaatatgcagattattcaacttcaggttcttaacaaagcaaaagagagacaactggagaacttaattgaaaagttaaatgaaagtgaacgtcaaattcgatatctgaatcaccagcttgtaataataaaaggtaagatgctggatgctgtcatttatgaggtacactgagttagatatcttgtttccaataacctcagattacatacgaagcttagagagtaaaaacacttggtcagagggctcatagtgagtgaggcatagcaaaacaaaacccaggatttctgagtgttggccttggattacttctctttggaacacgctgttttggagaccaggcatggtggcttacgcctgtaatcccagcactttgggaggctgaggtgggcggatcacttgagatcaggagttcaaaaccagcctggccaacatggtgaaaccctgtctctactaaaaatacaaaaattagcggggcatagtggcaggcacctgtaatcccatctacttgggaggctgaagcaggagaaggagaatcacctgaacctgcaggcggaggttgcagtgagccgagaaagcgccattgcacttcaggctgggtgacagagtgagactctgtctcaaaaaaaaaaaaaagacactctattttggagtccctatattttcccttttctcacttaggcttttagaatcattgaacattatttaactgtactgatggcattctgtcctaaaaagttgttgattccttatgtctgattccttatgtcattactctggatgaagtattccagctttcagagtgatttgtgtttagtttgcactgcagcgtttcctgaggctacaaattagcataaacgttttaatccaaataagagttagtgattgtgaagtgccatgtctgggataaacacacagagtaaatacagattcaaattataattgcttactccttgtgctttctctagttttggtccacgttgaactttcatttgcagaatacttttgtgattgaactctagctcatttcaaatttaattgatggtaaaaatgtctctttctgtaatgctcataacatttattttgagagaagaacttgtgagctgttatagcaaagtatgtgggaagaatttaacattaggtgaatttaagagttcattccaagtgggtcgggcacggtggctcactcctgtaatcccggcactttgggaggtcaaggagggcgggtcacgcggtcaggagatcgagatcatcctggctaacatggtgaaaccccatctctactaaaaatacaaaaaattagctgggtgtgtggtggcgccagtagtcccagctactcaggaggctgaggcaggagaatggcgtgaacctgggaggcggagcttgcagtgagccgagattgcacctctgccctccagcttggcgacagagcgaaactccgtttcaaaaaaaagagttcattgcaagtatgtgtaggataattagtcctcagataacttctttgattagcagggatttgtccccaaaagggatgcaataatagttttaaaggaagtagttctgcttctctaaaaaaatttttttggtatcaggtttgtttttttttttaatttttaatttttaataatttatttatttggggctgggtgaggtggctcacgcctgtaatcccagcactttgggaggccaaggtgggtggatcacttgaggttaggagttcgagactagcctggccaatatagtgaaaccccatctctactaaaaatataaaaattatctgggagtggtggcaggtgcctgtaatcccagctactggggaggctgaggttgtagtgagccaagattataccactgtactccagcctgggcgacggagtgagacgctgtctcaaaataaataaataagtaagtaagtaaattctttatttagttttctctaaatcaactaaagttcatttttctgaattaaatttaattcaacaacatttatatatgatacagacgtgacatctgattgggattgtgacattggggtccctctacaggaacattatttatataaacatttttaataccgtagatgaaaaggatggtttgactctcagccttcgagaatcacagaaactctttcagaatggaaaagaaagagagatacagcttgaagctcaaataaaagcactggagactcagatacaagcattaaaagtcaatgaagaacaggtacctattttaacttatgtatggtaaaaaaattaaaagtttagttatttaacaaaactttttgtagggtaggactaaatttagaagaactttgaagttattgacaaagcattagaacttaaatttcctgactgcaatagtttgcttcagaattggtatcccgagaagcttttatttttatttttcctgctgcttctccatttggagaactgttttttaaacttgagtttaaagtggtgacacattcacattctttgattaatgagatagccatttgatttttggaaatagtcataagtcattggtagctaagcctggtggtggttgattcattttttggcagggggcagggttaaaaatgaaagtgatggccggatgcagtggctcacgcctgtaatcccagcactttgggaagccgaggcggtcgaatcacctgaggtcaggagtttgagaccagcctggccaacattgtgaaaccccgtctctattaaaaagtacaaaaattagctgggcgtggtggcagatgcctgtaatcccagctactctggaggctgagacagcagaatcgcttgaacccaggaggcggaggttgcagtgagctgagattgctccattgcactccagcctgggggacgagagcgagacttgtctgaagaaaaaaaaaatgaaagtgactatgaaataatgagcttggttttgagtgagacttgtagctaagtctgaggatggtttaatgaaagagtttaaacagtgttgtctcatgtctggcttctcctcatccttcaggtcttagctaaaaacaattaccttttcagaggacttgctattcactttatatgtaaggtagcccatagctccatcctccaactcaccttcatcatgccatattctattactctataactatctgaaatgatctcatttgtttacttgttatttattgtctcttcccactagaaagtagtaagagcttagaccttttctgtttggtcattatgtccttagtgcttagaaccctgcctggcacaaatgatctgtgtcattcagtggatggatctcttagccatgaaagcagtattggaataaataggcaatctctggaatagaatgaagaataattctcttgaaattttaatttttgtatgtaatgtagattatttttaactttttgaaaaccaatagttattagattaaaaagttaagttgcctttatgtagtaaaaggttataactttgtaatcttttttatgtaagcagcagaatcaccaagtgtattagtttcctattgctgctgtaacagatgaccacaaattcagtggtttaaaacaatacaaatttatctcacagttctggaggtcagaagtctgacatggatctcactaggctaaaatcagggtgtcaacaaggctgcattgctttccggaggctttaggggagaatccattttcttgctatttccaacttctagaggccacctgtgttccttagcttgtggcccatttccatcttcaaagccagcaatgaatggctgattgagtctctctggttctgacttttctgccttagtttttctcatttatggaccctgtggttacattgggcccacctggataatccaggctactcaccttattttaaggcaatctaattagccatattaattccacatacaatcttaattttcccttgccatgtaatataactgattcacaggttttggggattaggacacggtcattttggagggctatgattttgcctacaataccaactgtgcagttacagctttgaaaactttgtttttagtaagtgaccattggcaggtttcatcagtctttcaaggaacagttgtcatttttctgtgacctaacaattgggttaccccacactttggtcatagagcaatgcaaacagcactggggccatcacggcatcagcagattccgtgcctgatagccacatccatcatgctgcgcaaaatcctctttcactcccctcaggtatctaccaaatgtattttctcagggaacattgtttccaacaactatgggcctggagggtcccagctagggttgttttaaggagcttgagccatgatgagcggagaccccttctctactctcattaaaacatgcttgagttttattttatagtaaaagtaaaagtttatagacagcacagagctaaaatactctgtgtatattttaaacatggatatcctgtgtgtatttactagatgatcaagaagtccagaacaactgaaatggctctggaaagcttgaagcagcagctggtggaccttcatcattctgaatcacttcaacgagctagagaacagcatgagagcattgttatgggcctcacaaagaagtacgaagagcaagtattgtccttacaaaagaatttggatgccacagtcaccgcacttaaagaacaggttgggatgatttcaaatgagcaactgttatcaacaagtaaagctggttatgttttgtaactgatattttatggttcatcatatagaagtcttggatgtttgtagtaaatgttagattgtgtgtgaggtgagtgaaacttaaaagccagtgatattggctggacgcaatggctcacgcctgtaatcccagtactttgggaggccaaggcaggcggatcacctgaggtcaggagttcaagatcagcctggccaacttggtgaaaccccgtctctactataaatacaaaaaaaaaaaaaaaattagccgggcgcagtggtgcgtgcctgtaatcccagctactcgggaggctgaggcaggagaattgcttgaacccgggaggcagaggttgccgtgagctgagatcgcaccactgcactccaccctgggcgacagagcgagactccgtctccccaaaaaaaaaaaaaaaaaaaaaagaagccagtgatattttaatctgagaatacatcctaaaggtatacttttggaaaccctacttcttatacgattattagtactttctcaactttcacattacttgtcctttatttgtagggtatttgtgtatgttgtttatatggtcctagaataaatccagaccaaaacaaatgagtctgccagcggctggctagaacttgagaggttaccttggaagcttaaccagtagaaaaccttacttgagtctcccagcatttggtaattcacctgtcaatacagcaatacagtctgttgagaaatgattcttgggaagagagtaaattttgaggacagtataatttataaaataagacagtctgatctagacttaatgagatttgcatcttgagcatattgcacagtgaatttttattattttcactcaagggggaataaaatattgaaagctaaatgtgagtcaggtggtgagtttgcttgtgctccataactctaggtaatcacttgagtgaataacatttcagaatttatttttcttaatgtaatttcaaaattgatttaacttaagggaaggagagaagaaaaatcagatgtgagggtatggaaaatttcaccacacttaaaattcatgctgatttgggttatttctgacctatatagctgcctctaatttttccatgcttttaggtagaactatataagagtgcattactggcaataattatttatcattttattttatttttacatgtatttatgtgtgtttttattatatctatttcattatgtatttattttatataaaaaaattgtgaatttgatcaatgtggaggatatataggagtagggaaagatgaaggccagttacggtggctcatgcctgtaatcccagcacttcgggaggttgaggcaggtggatcacttgagcccatgagttcaagactagcctgggcaaaatagtgaatccttgtctttacgaagaaaaaataacaaattagctgggcatggtggcatgcgcctgtagtcccagctacttgggaggctgaggtgggaggattgcttgagctcaggaggtcgaggctgcagtgagccatgattgcaccactgcattccagcctgggtaacagagtgagactctttttccagaaaaaaaaaaaaaaaaaaacgaaggctataccaaattattgaaaagtctactttatagaatatttaaacagaatttgagatgtagcttcataaatttttattttattttattttaaagttagttttggccaaacatagggtaacattgaagttagttggacttggacagtagcccttcttggatgactggagaagagtggatcctggtggcttttccttattgggttgggggtctccattctctgttgacttaaacacagtttcattagggatggattggaaggaatttctagtgttttctacccctgtgcccactgcattactctgttgtccactgccccacccccttcaatagaagaactctacagtaaagtcagaacaaattcttgattctgtgctgggtgggtttcagaccccggaatccataaattgaaggtgttaaggtcttttcccactgttacgttctttgcctatttttactttgttttattattattttttttaacagagcatggcactgatgttaggctctgcatataattgcatagctgctttgcaaagtggtgattccaaagcgcctaacagaagcccagacctcggcatcatgccacatatccatgtaacacacctatacacatatcccctgaatctaaaattaaaaacaaaatgtctgtaattagtatattttgagaaatttatggattgtaaaattattagtgtttttcttaagacagcagcttttctgggtagaaaagattgtatgcactcacaacatattataatagttctttttttttggctgattttcccttgaatttgtttagtgagacagaaaaggtgaaagaaatgggcttcttggagctcatagtgttcctccaatgtcataattctctcctagtaaactatcgcctggactctctccaccaaactgacttttacctcctcccattcatggaagtgtcatgttaagatctctgattatctccttgttggtatattacttttttccttctgtctccttgaaaacttcagcttttggtgaagtcatggactttggtttctatgtcataaccttttaccttttctttaatgttatatttaaaggctccactttgaacactttctgttggcttagagactcccacagacttctctgtgtgtggtccagtcctcattttcctgtgtgctagaaccctgtccagttctttttccctcccacagattcagctgtcatctctatcatctctctctctctctctctctttttttttttttttgagatggagtctcgccctgttgcccaggctggagttcagccgtcatctctttatcattacacttgtctcagtcttgaaaaatgtctgcccatatcagacttgaactactcaagctaatcatggcaaacattgagctactcaatcttttttgatttttggtattaaaactttaaactttaaagttttatgagtatgatctgttttcctgaacttgtcaataggatacaccatagtttaattgatttttacataaaatcaaattattggcagagtctgccttttctttacaatttttttatacctaccttttctttaactttgtttgctagttcccagtcccttgttaacactattgtgacctccccagaatataaatattagctgtctccccaccccttcttgctgtcattactgtcatgctgtcattaatatgagctcattcattgtttttgccacgttactttggcgctttagaaccaggtttctcaagctggcctggaattcgcagcagtgtgccaggaggtttgcagtgctgaataaacatggactagtttccagaagcttcattttgctcaaaaatttagtagaaaaaatttaaagcaaacacagcttcattatgaaatagaatacaaaattcacatggatttttaagctaaaatgggagacttcagagtctctttgcttcaaggtagttatgtattggtgctcttatgggatgtaccttgtgttagtatccttaaggtattattgggctttaggttatactacagatcaggcagcaaaagcctaaggccttttctctacttcaaagccctttctcagtattcttcttatttcttattttctttaggttttcttgggtaatttcagttaatcaacttaactcattcctctgcctctcccatgctctgccatttgcctggaattcagcctgtgtagccttttttgaaagaaaggtgatgatttcgacagtgtgtttgttctacctggactcaggactcccgtggtttattacacccaaacatattttcttttggaagaaacttgagtatattgcatacacactctatattttatgtaatcccatatagttacacacatgcacatacacatttaccctatttttctttgtcatttatttttcaagtgtttcttacagcacttgatatgtctaaggcactgcagaagcaccttcaagggggctattaagagaaataagacatctaaaaggtggagaaagataagaaagaaacagatcaagtttaaaagaatttcagaggagggaaagattattttttggctgctcttaatggaatgaacttttggctgcttagaatacagtgagttttcatgtgtttatctatatccttactgttttgggatacaaatagcatgattcaaagtagtctgcctaaatatatatacatacacttatactgacaatataaaatacgcataggaatgtaatacattttctttggcttgaataaaatctaatttttgaataactcattgtcttgtgaatatagagttgaaggagactttagaaggcacctaattcaacctttattagcataattacaaaagaagaaacagactgaagagttgaagcttcacccaagctcttgactcccagttctgtgcactttaccttgtaaaagaggtgatgctcccatgtgatgatcttgtgtttgacatcaaatctaattatgtatcataatttttagtttactctttattaaaactctttatgaaaatgacttcctgaactttttttctatttaggaagacatttgctctcgtctgaaagatcacgtgaaacaactggaaaggaatcaagaagcaatcaagttagaaaagactgagatcattaataagttgacaagaagtctagaggagagtcaaaagcagtgtgcccacttgttgcagtccggtaggtgtctggtaggtccactgtctccccagaaggttggttcaatatgcagaaagaatgtagtaggatccatgacttgtaaaaatccagaagggacagaaaacacaatcagcaataaatttctttaaaaaaaagaaatatatatttttatatatatacagaaggcatatatatatatatacatatatatatatatacatacacacatatataaaaaaatatataaaggtttagtttgtttttattaaataatttggaagctggagaccagtataaagtaccaaataaaaataaccgtaattctactactgagataattattgttagcatttgaatgtatttccttcaaatgaaatgaatgtacacacatagacaatgtcctgcttctttatgtaatgcatttctgaaaacatactaaagctgaacatgcaaaaattgaacaataaaatacattatagggtaatttctatccctgaaaactaaaagtgattataaaatcccattatattttgcttttttaggcccaatatttgatcatatagttctatcctttgtataacttctttcatatttttcccctcataatggaatagtgacttacctagtcagttgaggccagagagttacatttttgtcatgcttcagatttctaatatggtctttatagtattaagtttgagacatatgcttcctatcattttagtttcagcagttgttttatttcttattaatttttataaaatgatattagagcaaagaacaataaaatgatcacgtttgtacaaacaccgctatatagacaaaacttccctgtttgctggtaagtagctcacattgtgaaaacaggtcaacagttattcattaactgatatatgaaagtcacactttggcatatgaaaggtaatttagactgttggtacaatatgtgaaagggtgggctattcaaaagctgaaaatactaaagtcaaagactgcctaaatgtatgtgtatatatgtcttgatagggggcaaaatttggattatgctttattaagggcccctccctgtttagttttatagcctttgttttcatttggcattacttggtgagcctttttcctggctgttaaatgctttgaaaatattattttctttatgccatcattgcttcacttaatcatttcccagatggtcattttcttttgaaacctaataatgtcccttttaaattgggaacagtccccccaccaccttgcccagtacatttaaaatattaggtttctaaagtttcagaattataaccctaatacacttcatttacatgtggaggtggggatgctggatagaaaagcatctacaaagaagttaaaggcagcacggtatagttttcttattgcagggtagaaatgggttccaaagaattttttctttgacttaccatgagttggagtgttacgctcctattaaaggacttccggaatgttaaggtctgtaaatgtgactgatttgattcataaaaaggtcatagtagcccatgcctttaactgcccaaggtcatatgggatgccatactaaatctgggaaatgtctggcccagacctatgccttctgggtcccatgggctctatgtattctaaagagacagtagtagtaaagcagaactttactttctgtagcctcagtggattcaagtcttctgtagatcataagcactttgtccccttaattttttcagtatatcctatggttctttcctctgcagggtcagtacaagaggtggctcagctacagttccagctgcagcaagcacagaaggcacatgctatgagtgcaaacatgaacaaggctttgcaagtgagtgttgccacttggaagaggctctatgggtatctgaattaggcagtagttacatcacctttttgaatcttgggtttctctgtataatagaggtggttggaccaccttcaaaccagcccatgggagttgttcaccatctccttcacacagttggcaagtcaaactcaggtctgtctaattgcagagccaaggccctgcacttcctgccagcttgcctgccacctccttcaagtggcatgtcctttcatctttgggtgtatcccagagatcagttcatctatgggggtggggaatgttgaattttgctgcaattctgtcatatcctcctccagtgctatttacattttccactggagggggaggaaaatatgggagaagagttccattattacctccaccttttcaccaccggcaggctaaagtacaacctgttcttggcaaaccagcgtactttgtcctgtactctagtaagccagaaagcgccgccatcagcatttaagcccaaggaacacaccactttccatggaggacaaaatctaagagacagagatgtgagaggaaatccttatgtttgttttctcattcatttattcatttaggctttacttgaaaacctgatatatgccgacctttataaagtataatgtgtactaataatatatttgaagaagtttttttgcctcctgttgatcattaaaacaaattttgaaacagaatgactgattacttcatataggaaaatagtgaaaattatttttaataattttgtgttgtaggaagaattaacagaactaaaagatgaaatttctctctatgaatctgctgcaaaactaggaatacatccaagtgactcagaaggagaattaaatatagaactcactgaatcgtatgtggatttgggtattaaaaaggtcaactggaaaaaatccaaagttaccaggtatggaaagaatattttagtttactgtagaagaaccaacattagtaatgctgatgatgcatggtatctgttttaaggtgagagcgtattattttcatatgttaacactgtgtattgaatgcagataccttgcatttatcagtgatagtataaaaaatatacattaatttttcctagaaaccttactatgaccttacttttaaagtagagattctgtcttttatattactgcttaatacagatattttagcaatctcatagtaggaagtattttatcactcctgctagagactgactagggagggagtagtggtggttgtagaaggagaattaaacacttaaaggacttcagaagcacttgctgcgtggaaggtgctatacaaggctctgggaatagagtacaaaagatgagataggaactgtccttcccacagggagcttacgtgttttctggtcagggagaaagaaacattgttggaaacaactaagtgctatgcattcaatgttatgtttgatgtatagaggtgggatttacacatttcctgtactggttttggatagggaagagagagatacggtgtttggaaaagattgtatttaggttaagaaaagatttttggatgcgtttggcccttaccaccacccttttgtttatagtttaagatggagttcgtcatcattgttgaattgtagtttccagagagtgtttaatacatgttgtatttcaggtattacacaactaaatacaaatatataaatgtcctgaaaagtttgctctacgataggttttagaagttacatattttgagactgtgatctcattttaagaacagtaagatgagattcagtaagtagaaatataaagtgatcaggtgatactgtgaaagtagatggtattattctagtttagtaaggctccatttatctagaggtctgtcttcagggactctcatccctacaaatcacagcactgctatccagaaggaagcaaagaagaaaatatcagaactggattatatgatgtatttagtaggagccaccttcaagttcttatcccaggaccatattgacttagatttatttgtactccatgaattgtctcatttcctaaccaactgcagagggctagggcaagggttgggaaagacagtatccatccttcggccagcagctcagccttagcaaggagaaaactatggaaacccaacaggctagagttgctgagtatcacagcaaatagctctacacatttacgtgtgtttgatccacatcaaaatgtccacagttatgatcccaagttgtcaaagaaaggcttccagtttggttagtaaattaaagcaaaaaacgaagtgcattatatcttttttagacagatttacataaaatgttaatatagtcacctggaaaattcactgctgtgaatgcctcatttcctgctaatgccagattaattctaaggggctactgggaagagcgtgggctttagatccagattgttttgaataatagttttgccattttattaccagctttgtgagcttgggcaaatttcttagcttttctgagcctgttttcttatcaagcttaaaatcccttggaggttaaactgaggaataaaataatgaatataaaaggccttatgtaacacgttctaacatatattaggcatcatttgataaatgatggctgttactattgttatacagtagatggttgattaaaacatatcactgatcagattttatattaagtcacatgaattttgtattaattcaacacatactttgtaaatgttcttgattctcaaccttgtgaaaaatatcaaatccaatatcaacatgtgagagttggaaaaaccagagtgaactcctttgcttagtaaggcagacaattagtagcagaaccagtacttgaacccagactcctgagaaaggctcggttgtctgtctgttcatatttacatgtcagttaaacctttttgccttaaactcctttcttcatgtcttttatttttgaggattaaagatgtagttcatgacaaaaaagatttttctccaatttgtgattacttttagtttctgctctagttggtctgggaattggataaataatacattatgtatgtttatcttttcaaatagttacttcttcatgatgtctattaaaacatattctgctacctttacactttctatttacttagtgctcatagccaaaatcctgtattcatctttttttttttttttgagatggagttttgcttttgttgcccagaccggagtgcaatggcatgatctcggctcactgcaacctccacctcccaggtttaagcaattctcctgcctcagcctcctgagtagccgggaatacaggcatgtgccaccatgcccagctaattttgtatttttagtagagacggggtttctccatgttggtcaggctggtcttgaactcccgacttcaggtgatcctcccacctcggcctcccaaagtgctgggattacaggcttcagccaccgcgcccggcctcctgtactcatcttaaagcacattcctatagataataaacctgagacaccgcatcattattatagtaaaaggaatgatggacgcattcagtgggaaagtgaagaataaagcacagtgtgattagtcactgaggctcggcaaaaagacatccagtgaagcacaagataagcgaagaaacgttttgcttgtagtcatcccacccaccagcagtttattagatgatattttggcttcgtggaaaactaaaagctattatactcagat

SEQ ID NO: 163 - DNA, 24107 bp, Homo sapiens
  source 1..24107: mol_type = other DNA
tctggtccgtgcgcgatcacggcccggcgcgtggctcgggctcgggcggagctggagacgtgtggagctgttcgaggactcgcgggtgtgcaggtctgagtaccactccgatccctggtggaggtccccgcgcctctctggagaccagtggtctggccccagaggtgcggccgcgggaagtggacattctttgtcaggaccctagcggaggtcgcgctgggtgtcgcctgtgagggggatcctcggtttctgcgcggtctcttgctttttttaggatcttgcgggccctttgggaaaaaggtttccaaatttttcctcaaaaaaaaaattatttttcctaccaatgattttcggtgcattccgccccaacgaaaagtatgtcctggcaaagtcagttccctaggaaccccatactttattttattttatttttagtatttggagtggtttgtgggggtttggttatcacggaaggggaagcgtagtacagacgtagaattagtgatgccatgcagtgtatttaaaatattgaggttgtggttacataataagcaaaagagcctgtttcttacgtctaaattatttattgggaatgtaggacaaataaggaagtatattaacattttcagtcgccaggcccacaaagttggatggtaaaatcaatactgtagatcgcagcatgtaaggactaacccagtgcaccatgaaaacgaaggcaagacagtttgttaccatatggcgggtggtgtgggagaggccattgatcctatatgaaaaagggtactactaccttggattatgaaaaatgaatgttggacctgtaggtcctatgtgaccaagttcttaaaaacactctaaagaaaattggaagtggtttttttctaatactgaattggtccacaatataggacaggggagtctgtatagtgttccattgggaggtgagtcagcttacaataatggaagaggtagaagctttttgttattattttggagaaaaaaaaattgccagcctgccacttgtgctaggctgcagacggcccataaaggtagtttgtcagatacttcagtagtgagatgcttactggatgtgttttgcagaatggttttgatttagttaacaagtgtttgttgagttcctgctgttgcataagaatcaggaataggtgagatcagggaaggaatctgctcttacagagttgaatgctggaggggatagattcactaaagtacctccacaataaatgcatttttccatgtcaaatatgtggaactaataataagtactcaaagaggtttaagacattgctgtggcccatctatgagttaataaggaactgaattagaatcctgactttgagagtgaagatagaggattatatacaaggtagatgcaacttggtgagtataattaatttggggtggaaattgggtagaaggaggaataaaaaattaatgtatttttagccttaagttccagaatgatggacgcaccatcaaggtgttaaaattgttagttccttaggaacagtctttatgttttctaagtctttttagcccccatgactcaaattgtacttccttgcacatatttgatgttaacaagtatgttttaaaaattttaaataaccccatttgcaataaaatcatttgcaatgattttctcacagtcgaggcaggctgttggctcggttaggacagatgccctgatcatgtagtttcagagaccactggagggagctgcccatgatttacaattgctggcctcttctacgtggccacctcagccataagtgagagtatataggtgaactaagaggtggagccataaacatttctcttttactgtcttacaggtatttgtggtggttgatttttctagaggaaggttatttatataaagcttcactaatatccatttagttatgtggatagcaggtccatgaactgcaaagtgatatttctgaggtatctctaggaggaatgcactttcagtgccctaggataactccaaaaactcaccagtagttttctgttaaatgtcaggcaaccacagtaactttcatgacatccacaggaactacatttttcagtcccactatgcctgggcctttgagtggtacatgcattcccactaaatagctactccattacccagggaaatgaagtcaggttgagctactccaatcaaatttcattttttaggatgaatcccatcatctgaataactcaggactattaaagcctcaaaatgtttctctgtaagaacctcaggcaacaccaggacaaacccaaagagagtttaggtgaaacttagcttcgtatgtgcagcaaagagacgccaacagagcatttgcaactctcatttctggggactattaggatctcttcccaagctttttttttttctctgttttagagatgggatctcactttgttgtccagactgttctcaaactcttgtgctcaagtaatcctcccaccttaacctcccaaatgctagtattataggcatgagccaccatgcgtggcccttcccaagcttggaacttccttacctgggtcgtagatggactctaggagatctccaaacctcctgaaattgtgtgcaaaatattgtgtctgtatatgcattttctagggatgcggtttaatattttcatgtgattcctaaaagaatctgaggctcaagaaaagagggcatcttaatatcctgcactttcagtcattgagggcatgatcacaaagatcaaagccatttttaggcaggtgagttggagtggcagtcagaagtaggtaagattttctatttgtgaggcaggaacaagggattggaccattgttcttaaatactgctttcttacccaaaatgcaaatctgtgcgtaatcagtacacagcaaaaatatttactgtattttgtttttccccttgggtacatttggcaagtgcctttttctactataaccggcgtttttgtatctctttatttgtatctcaaactcactgggacttacaatcttaaaaaaaaaaagaaaaagaaaaattcatttgatgagtaattaaattagtgccactaacttcttctcagcaaattatgttgtattttatgtttctctggactttttgttcactttctgtttgggagaccacaaaatgtttcctgctggagtcacagcatttctcttgtccctgtttctacttaaagtgcctggagcttcgtagttaaaccacaatgccagaaggctttataataagagaattattttacagctgtggaatgcatatcgaatcaatagggcaccagtgttgtttctcccttgaaagatatcttccttacagggtatacagatagcaattttggcagccatcacccttctttgaagaaaatattaagtgggaaagttattttaccatttttctctagtactaaagaatctgaatgatgtatgtttttaaaaaacataaattcttagagtaagtggacattaatgttactctgtaaatttttaaaatttataggataatatattttaccttatgggatattttacaaattgtaatgagtagtagatgcctcttattttttattggatatgaagttttatatgtatatgcacacatgtacacagacacactcacacatatgtagtgtgtgtttaagttggagagggttatatcttttagaacataaccaactaaattttgccaattccactagaatcttctatttttcattaatgtcaattcaaagtcagagccaacagggttgaatatatccctgtctgatgctaacgtgaaaccattgcattcctaatatctggaaaacaaaactgccatctctggaacaaaaaagggttcttgaaaaatggattctcagtacctgaactttatatttgaaataactttcagtttattgcttttaatcttatgttttaaagtgtgccaatttggtggtttaaaacatgtttaataagtactaaaacagcacacaattgtgacttaaattgagtaattttctttgtagactgagtaaaatgttttctgtttttatttttccttctcttgatactttttttttacagtgcacctatgatatgtgttttagaaatagccgttaaactttggtttgaatgaagaatgtctctcaatccacctatatttctcaaacgaagtgaagaaaatagttcaaaatttgtggaaacaaaacagtcacaaactacttccatagcttcagaagatccccttcaaaacttatgtttagcatctcaagaagttcttcaaaaagctcagcaaagtgggagatcaaaatgtctcaaatgtggtggttccagaatgttctactgctatacatgttatgttccagttgaaaatgtacctattgaacagattccacttgtgaaggttagtaagaaatttaattgtttgaaagtatgaaaatagattttttaaaaacatctcatgtatacctactctaattgataaacttaataaataatgttattattgttagaaacaagtgcttgttgctgcaaagaaaaactagcacttagacagaaaatttctcagcagggcacatttacttctgcagaagggtgctgcgcctgatcgcaagagcacaccgaacaaaggaaggaagggatttttaaccctaatgcagttcctgtccctgtgtccttcccttattggctagggttggaccacacaatcaaaactgattccagttggctaagacttaaaattttccaaatagggtaaatgcacgatttgtaaaaggaggggttaggagtggtctgtccactatagtataaggcatgtctggacatgtttggccatgtcagggcacaacaagagtgggagggttgtttgcaggctggaaacgagagtacaaggagcttgggcttctgaacaaagaataagaacatcacacaattaaacattttgaagaggaatttatcattcctagcatgaaaaccaagtgtatttatggaaaatttagccctacagaccactaaacctctttgtttttcttgtctctgggtctgaaatggtgtttttaatgaaaccaattaatttttcattaatgattttaatttatttacaacatgggaaaaaatgtgtgatataaacttatgaatactaaaaaaaaagtttatagacaccctgaaggagctccaaacactcatgtctttggactgctccttgagaaaatactattctagtagaattagagttgattttcacctaagattttgtgacttatcctatacatggggatggagcagatttcattgaccaaaatgaaaataaagtaaaatttaaaaactaagaccaattccctgggctgtgttatcattagagtgattttaagcccgatttgattgcttacctttatactttttgggctcaccaacactacttttgtataggtaaaaggtctgtagaacgtcatgtctacataatcaaagaatttattatatatatgttaacttgtctaacattatcccaaactttaggaataaatcaattaatgtataaaatttgactgtgtaagactttagagagactaaattctacacatggactcattagaacttgccagtaaaaaaaaaataagttgtagctatattttaaaatttgttttgatgattttaaagttcatttgaatttgaagtaagaagagtactttgacactcatattttatttgaatttcagtttagcctatatcatcttggccagtccatggtctcctcagcatctaaaatcacatgtataggctaatggaaagtttactagccaagaataagtaagtgtggaatttaatatgatcttcacagtttgctccgaaaaaacaagaacttgagggtaataattattttcaagtttcccattatcttacaggaatgttacattttgaagtatggtttttgaagtatacgtagaattattctattttacatttctctcatagccatgtaaagaagggattccattaaaagttttatcctaaggtgtattgtattaaaaaatggattgcatattataataataataatcagtaatatagttacagggctgatattttcatagatatttaataatagagggtattttccaaatcagtggtctaatatacaccatttaatagaaatgactcaagacattagtgtttgatcatctctcaatggtctggactgtgcagagttttctaaagtgtttatattttaatggccttgtataaaatttgatactttaatatacattaatggtaataacagctctacaaaatgtcctttccaatttttactttatttttattttaacaaatcattcagcatttgcttttagatagcctacttgggaaaggaggatgacaatataatgagtaattccctcccaattttagtctagggaatgcattcataaatatagtcatatgtctcctaatgacagggatacatcctgagaaatgtgtcctgagaaatgagtcgttaggcaaattcactgttgtgcaaacataatagaatgtacttacacaaccttcatagtatagcctactatacacctgggcaatacctattgctcctagcctacaaaatctgtacagcatgttattgtactgcatactgtacacagttgtacacacaatggtattagtgtatctaaacaaatataagcatagaaaagtacagtagaagtacagtataaaaatagtaatcctttatgggcacttagcatgaatggaatttgcaggactggaagtttttcttggtgagtcagtggtgacttgtgagtgaatgtgaaggcctgtgatgttactgtacactactgtagtttttataaacactgtatacttagggtacactacatttatgaaaaatatttttcttcaataataaattagcttactgtgacttttttactttataaactttttaaaaaacttgtgataacacttacatttaaacacaaacacattgcacagctgaacaaaaatatttctttatgctcttattctgtaaccttattcctatttttattatttatttatttttactttttaaactttttttgttgaaaaccaagacacaaacacgttaccctaggcttacacagtgtcaggatcatcagtatcactgtcttcttccacctccacatcttgtcccactggaagctcttcaggggtaatgtatggagctgtcatctcctatgatagcaatgccttcttctggaatacctccttaaggacctgcctgaggctattttacagttaacatttcttttttctaattaggatgagtgtactctaaaactaaaaaaattaagtgtagtatagcaaatatataaaccagtaacagatttatattatcattattaaacattattgtatagcatgcttttatatgactggcagtgcagtaagtttgtttacatcagcatcatcacaagcatataagtactgcactgtggtgcaatgttacaatggttacacttcgctaggccataggcatttagagcctagaatttaaaaggctctcttggggaaagttgataatcccatgggaaaatgcttaggtctccttgtcagtagcattttgataaacttgggcagaaggatttgtggtaagtctcttttataaaacataagtgttcgagagcagattgatattctttacttgtttgaaaacagaatgtctctactcagactgccctctggtcaacactattttttttttttaaacacagttaagctttaatgtccatacgaagcctcagagcaaatgtttttgtagcttgtaaaaaagcaaattttttttctttcttttttaattatactttaagttcttggatacatgtgcagaacttgcaggtttgttacattgatacacatgtgccctggtagtttgctgcacccatcatctacattaggtattgctcctaatgctatccctcccctagctccccacccccagacgggctccagtgtgtgatgttcccctccctgtgtccatgtgttctccttgttcaactcccacttatgagtgagaacatgcgttgtttggttttctgttcctgtgtggtcaacactattttgttactctgtactcttgtcattatttaagaaataatcttcttttaacatgtgtgaactagaacacaaacatggatttccatgatttgatctgtttctgtgctttggttttatgatgtgagagatctcacgctcatggaaaactaacaataccttggattgtgtacaggttttgcataattatgcttgcagactttagttcataaagctttttcttttatcatataattaaaaaaataggctaggcacatgatttataaaatttgtcaataacactcctgtgttcttgatataaatgataccctccaagatagctagctgatcagaaatattgataacttttggaattttcagctttactcatcagccatataagaagttcacatttatgatctgctttctttttcttttcttgtcatgatctgcttttttttcttttcttacttcctaccttccctgggctaagataatactgatgtggtgctcagagaccctagggagagggaaggtagtttcaactgagaccgagcgtcatgaggaaactctgatgtagtgttcagccagaagtagactgatgtaaaatcatttgtgaactgcctacttaaatggtaaattttccataactagaagttggtttgatgattagaagcaattgggcctaacttataaatgatcattgggcctaacttataaatgattgctaggcctaagcggggagggtaggagatacagcatttgaaaccctaattgaaaactatttgaggaattcatttgtaggccaaggtcctccaggggtgtattatttatactgttctgtccccaacataattgtccaggaagaaaaaaatttgaaattgaaattatttagtagctgctccattcaaaaatagttttggaactaatgacacacacacacacacaacatggaagaacctcaaaataattattcttagctaaagtcaaatgaagagggtatattgtatgatttcatttatataaaattctagaaagtacaaactatagtggcagtggattactgattgcctgaggagggcaattgttgatggtgagaggagaaggaagaagggcttgagaagacttttgatagtggcaaatcattattttgactgtagcagtggattcaagaatttaacatatgttaaaacttattagattgtacactttaaatatgtacagtttaagacataagaaaaatagttttgtcctccagggtaaaatagtgtgcccagggtaaattcctagaatcctacttatttagcatgggatgggaacttggagatggtgggaactaccaaataaaacaaaaggtcatttaaaagctgaagtcaagaacacatctccagagggtttcttatatatagtaagggagatatgatttggcatttttttcataatcatggctgaatgcagtacttgtataagcattacaaagagagctaaaccaaaaaagccaaagtgaaataagaaaaatataatttacaaaatccaagagaatattatttttgcatagagacatgttacagacaacatctataacaaataatgaaacttcaagggaaatacttaggcaacaggggtccccaatccccagaccacagaccagtaccggtcctaaggaaccaggccgcacaccaagaggtgagctgctggagagcaagcgaagcttccgtctgtatttacagccgctccccatcactcgcattaccacctgagctctgcctcctgtcagatcagcggcagcattagattctcataggagcatgaaccctattgtgaactgtgcatacaagggacctagattgcatgctccttaggagaatccaatgcctgaagatctgtcactgtctcccatgtcctagatgggaccatcaagttgcaggaaaaccagctcagggatcctgctgattttacattatggtgagttgtataattatttcattatatattataatgtaataataatagaaataaagtgcacaataagtgtaatgtgcttgaatcatccccaaaccctctccccaaaccctggtctgtggaaaaattgtcttccacgaaaccagtccttcttggtgccagaaagattggggagtagttaggcaagatgattttgaagacagttttgtgatataaagattacacctcttaggtctattgttactattttttaattgataattatttaatttgtgctattgaaaatgtgatgccgaaaatcatgatgtttcctgcaaaggataacagttttgacttgaaagtatgtctaaggaacagaatttcaacttgaattttagatctgaagctttttgcccaaacttacatttctttttaaaatagcgtaagaggccaggtgtggtggctcactggtaatctcagcactttgggaggctgaggcaggcagatcgcttgaggtcaggagttcaagaccaacctggccaacatggtgaaaacctgtctctactaaaaaaatacaacaattagctgggcatggtggcaggtgcctgtaatgccagctacttgggaggctggggcagaattgcttaacccaggagacggaggttgcagtgagccgagatcacaccactgcactgcagcctgggtggcagagtgagagtccatctcaagataaataaataaaaataaaataaaatggcataaaataggcaaacctaaagtttataggatttattaaaatgtccttggcacacatggtgaaatgcaaagaattggagttaatataacttaagtgaaaatgacattggagctttgctttaagagaagattctctgttaaatgagttgaaaatagttgtcctaatacatgaataacaatgccaaggaagaaatttgggttggttttgtaacaatcaccattcttaatattatggtatatcttttaaaccatatgcatatttataggagtttattgtgagcttcctatttagctttaaagaccctttttattaacataaaaattaaaatgtttatatatttttttatttgtgctttttttacctttagcttccattgaagattgacatcattaaacatccaaatgaaacagatggcaaaagtactgctatacatgcaaaactcttagcacctgaatttgtaaacatttacacgtatccgtgtattccagaatatgaagaaaaggaccatgaagtaggcaacttagtttttataactcttcacattggatataaaaatgaattttaacctccattgcctttctgaacttactcaaacataatttaatatttttcttagtaaagtattatgctcaggtaatgttagacaatatacagtttatttcattgatatcttcaaagatcagatgtttctagactgctatgcgtttttgagtctttctgcattttatagctcttctgccttatttcttcaggtttttactccttgccaatactattgtgcctgcttttaccttttctcctctccttctcctgtttgtgctacatatagatgatctaatttgatgcaaactgggaaaccagattacaaatattgttggaatttctctaaaagaagaaagactgagttaggatattcaggaatcctcctaaattaagagctttagtgcatagcctttataacatttcttttggctgctcagaggccttccttgctcatttttagattcttaattggttttcacccagttgcaattgtcacattggtgagaaattatgggtcttcttgctgaaaagtaattttacaatgtgtctcaaaaaattaaggccttgggtactgaaagaagcatgtaaaagccttttggtctcttggaggccatttgttggtgtggctagtatagaaacaaaattaaaaattagtgcattcatttgttccaggaagaacttggtaaatttttactttcctatttatatctatatctatatatatatatatatatatgtatttttttggttgagtttatataaaaaattatgtttgtaaataatatttgagttttggatctaggaaaatgtttctttctctggtcagctagactccatttatgttgattaaatagaatgtagtgctatgttctgtaaggagatgtgatacgcttataatttaagaaaattcagaagccctggactttgctaactggatatagggggaaatatagacatgtattatgaatatttaaaaacttttacaactttgaaatgtataaaattcaaggtttttgctttttaagagtcgtgctctgttgctcaggttggaatgcattggcatgatcacagcttgctgcagccttaaatttctgggcccaagcaatccccatacctcaggctcccgagtagctgaggccatgggtgtgcgccactacttccagctaatatttttattctttgtagagacaggtctcactatgttgcccagactggtctcgaactcctagggctcaagtgatcctctcaccttggcctcccaaagtgccgggattacaggtatgagccactgtgcccggccaagattttttgtttcataattttattttattgtgattttgtttttatctttttattttaaaaatttgtgtgctcattgaagaaaatttgggaaatagagaaacatatggggataaaattcccttgattctccaacatttattcatttaacaaatatttacttggtgcctgctttgtgccaggagctgttcagacattggaagctctaacaatataaatctcagtaaaaatgtgcggaaagaaaagtggtatcatatttatgtaatttttcctggaaggttagattttttcattttaatttttcactgtaataaatatacttagatattgtaagtgtctgtgtttaggattattttattacattcacataatgagatcgttgaaccaaagggtatgaatattttaagactcttgatttaaatggtcaaattgcttccatgaagagttatgctatttaatcctgctctcagaccaccatttcctcaccagcattcactgtatcatttgttttatctttggcttatgatatagatgaaaatggcatttaatcattgaacagttttcagtggttcttttacgaagtatcatgtactttgctttttatcttatgaaaaattatataatttagtctttttatttcaagtatgactaacttggcatctatcagtcagtgaataacttattttgaaataatagttttaattattatattatgattataaattactaggggagagccaaaaactttaccatacatattaaagaaccatatacaatagaaccaacctaatgcttatttctcagatattcaacatatctttcttaaaattttaagtcaatcaaaatttatatattttgaagatcatagtagcacactgctaacccaattttctttgttttaggttgcactcatttttcctggacctcagtctatctcaataaaagatatttcttttcatctgcaaaaaaggattcaaaataatgttagaggcaaaaatgatgaccctgacaagccatcttttaaacgcaaaagaactgaagaacaagagttctgtgatttgaatgacagcaagtgcaaaggcacaacactgaaaaaaattatatttatagatagcacctggaaccaaacaaacaaaatattcactgatgagcgacttcaaggtaaaaaaaaaatgtttttttggactgctcctccctcagacttattttgaaaaaacttcaaacttacagataatttgaaagaggagttacactgaatacctatacattttgccatatttactttatttctctctttttattatatatgtgagtgtgtatttatatattatatattttttggttgatcaattgaaagtaagtttcaggctttgtaacacttcacccttaaatattaagtgtacattttccttttttttcttgagacagtcccactctgttgcccaggctggagtgcaatggcacaatcttggctcactgcaacctcctcctcctgggttcaagtgatcctcccacctcagcctcccaggtagctgggattacaggcgcccaccaccacacctgcctaaattttgtattattagtagagacggggattcatcatgttggccaggctggtctcaaactcctgacctcaggtgatcctcctgccttggcctcccaaagtgctgggattataggcatgagctaccacgtccagcctaagtgtacattttctaagaataagaatattctcctatattaataaagaatgacatctcttttataaacaccctaatggtgaatacatttactaagaagttagatcttctattttgttttttttgttttttgccttacaggttttttgttgttcttgttgttgtttgtttgtttgtttttgagagggagtcttgctctgttacccaggctagcagtggtgcaatctcagctcactgcaacctctgcctcctggggtcaggcgattctcctgcctcagcctcgctagtagctgggattacaggcacaccatcaccacgcctggctaatttttttgtattttcatagagacgggtttcaccatattggccaggctggtctctaactcctgacctcaggtgatctgcctgccctggcctcccaaagtgctgggattacaggtgtgagccaccacgcgcagccttccttacagtttttaaaaataacttttttgagtaagaattaacatgtagtaaactacatgtttccagagtattaaagttttctcatatgtgtacagctgtgagaccatcactacaagttaggaaatgaacctgtccatcccctgccaaagtttctgcctgaccttttataatctttctcatccagctttccccacagcacacttccacactctccaaccccatctctaatcaatgatctatatctaatcattatagattagatgcattttctgggatattatagaaattgaatcatatagtatgtactcttttcctttttttggtttggctttctcacacaaaataaataacttgacactcatttttgttgtagcatgtatcaataggtcatacatttattgccaagtagtatttcgttgtatggatatgctacaattagtgttatctatttatctgttgatggacatttacactggttgtttcccattttctactatttcaaataaagttgctatgacacttgtgtaaaaaaaaaaaaaaaggatgttctcctgtataataaatacagtaccattatcactcctaagaaaattaatgaaaattacataatatcatctaatatactgtccatattcaaatttccctaactgacccaaaaataccttttgtagcttccccccatatagcatttaaactcgtcacggtttatttcattattatgtatctttagtctcttttaatctagagtagtcctgtttttatttttcatgacttagacttttgtgaagaggacaggtcaattgtctgaatgtttcattgtgattagtttcagtctaaatatgttgcctaggatacttacaggtaaggataaatccagggttgtctatgtctagtttatatctatcgtttgggtataattattaataacatgtaattttactctcagaaatgaaccttttagctgataaattgtatggctaaccaattcataggtgaattcatactttattgttgcatcaaattaggaggcacataatgcaaattgtctatcatttgtgataactttcattacttgattaaagtggtgattaccccatctctccattataaaggtttattttttctctttgtaagtagtggtaatctatggggtgatgttttcagactgtggactgtttcccaaaaacttttcaccagtgattttagtattcattgatgatccctgcataaattgaataattacattgagaattgaaaaatagtgaaattttaattacatgatttcttcctacattagttagccagtattcttatgtaaagaagagcttttcctttttctcctgttctttatttctttctctttccacccctttttgagatcattatgatcttatggattttctttttaattcaatatgctataataaattatagtgtagcatcaataaagatgctaatctttttgataataatctttttgatgctctagttctctcaaattttgccagtggaaacccttcaagtacttcatggcatggcctcatttgtctttttggtgcaacaggcaagttcacttgtactttttttctgtctcagacctggaatcaattgtttttctaagaagctatagtttcttttaataggaaatggtattagaaactaagatctggtaaattcattacttttgggatgtcattgcttcaatggatagagccaggaaaaatacatagttatgtatcatgagttcacacagatagttccaattcatatttaacattataaggatttttatttcttttagagtgaaaaacttggttcctaataatagtgatttaaaacagttactttacttgtccatgtatgattagaaggcaagaaagctattcagttgatattaggcagttgctaaaacagtttgtttcaaactgggagagcttctctcaggctagtgttaaaaatgtgcattatctagaaaagaacattttgacactttttggagtctgattggtgttcattaattccaagctgaagtgagtgacaacactagatttaacgagcttaatttatatagtttatgcatctgagatcttcatacacattagtaaagttgctttgaaagtctaattgtgtgcgctttgtgtcttatgtgtgtgggagagagtgaagggcaggtactacggagcataagatctttaagaaattttgttgccgatgtttgatagaaagacaaacgcctaagccctaaggctgtgctctttgaaagagagaaagggaacactgcctgccacattcctgtggatgtttacagcagcaggttacttgccagtttgaagatttttctgagccatttttctttatagttaccttatatggtaattgaaaagataaatgaaaaaacataagtaaaaacccttgacaaaactataaaaggaattattgtggtattattcaaaatctcttttcagagtgtccaaatttggcttgcctaaaatcagatttgtacaaaagatttttgttattccttcccaattcacatggaaagtatcatatatttcagttctgtgctagatcaaaaatttttaaaggggcttcttaatctctttaaaatcataaaaggaacagatttctaaaggcaagttttctgcatgacctacttcaacccctgtcctttgtggctcttcattgcaccacaggaaacaattagggctctatacatatctataacctctgtatatgtgaaatactgatttctgaataaaccgagttacttccataagaaacaatccatggtttttataaattgttggctttaggctttaaaacttcgtcatttcgtgagattaatctgaacaaactgagtctatacctcaattaaaccctcaggtgtattggaaattatgtttccattattttactatgaatgctgaggttaagaatccctttaacaatgtaaaaccttactgttttgccaaatttttacagaaaaatagctctgtgtgttctaccagtgtcaaaataaaacacttgaaggtagagtgcctaatttaattataaaaggtaaacctaaacctacaggtgaagaatgatataacattcttaaagatttatcataggaagccttggcagaatgtagggggagacattgtttctttttgttggatgtgagtccaaattatatttaaatggcattatactgtaattggttataaaaattagccagctctttcccttcagtttgactgtattgatacaacttttaaagtgataactttattcatattataagctttgcctaaactacactccctgtcagtgagtgctgtgtcctatactaccttattcaatcctcacatcaaatatatgaggtaaaggatgtcaccctcactttgcaattgaagaaactgaggcagcacttttggaaggaaaagccatttgtaattatctactttaagtttctactgctaaaatattttactagttttgagccaggtgtagtggctcattcctgtaatcccagcactttgggagatgaaggtgggagtatcacttgaacacaggagttctagactagcctaggcaacatagcaaggcctacatctcaacaaaaaataaagtaattagcaaggcgtggtagtgtgcacctgtagtcttaggtacttgggagactgaggcaggaggattgcttgagcccaggagttcaaggatgcggtgagctatgctcatgccactgaactccagcctggacaacagagcaaaatcccacctcaagaaaaaatgtttacgatttttactataattttattataaagttactgattgttagaaatactagggtataaaaaatattttgcattcaagaaactgaaatatttaatgttgtctagaatgcatacatatatgagaatggtaaaagagactggagaaattcaaattatgaatgtcatattttattcagcatgcttgggcatttgttcttttatccatagtgctgtggcatcattaaaaaatttttaagcttgtcattgacatgattagattgtattttaagtctaatggaaagaattgggctgggacatgacttcaagctccaattccttcactaaataagcaaagaggttttgtttgtttgtttttaactgttttatatttttaaataaattgtgatacatatgaaataatatatacacacacacacgtatatgtaacattaagttataaagcatagtgatataatgaacaattaagaactcaagcaccagtatttctaacttccatttacctatgttttcccttgtgccattccccttcttcccctgacagttattttcctgaattatgcttttttagattatagtgttatatatatgttttcataaactatatatgatttagttttgctttattttgagctgtgtgttgttttcttgggacttgctttctaaagtcacattttgtttctagggtttatatatattgtcatatcactgtagctatagtttattctatttcactgctgaataatatctgtgatatactacagtttatctggtttcctgctaatgaaacactttggttatttctagtttttcctattgcaaataatgctactacacacattcttgtgcaagtacaagctcctctaggaaacatccctaggagtcacattgctgagttgttgagtatgagaatattcacctttacaggataatgccaaattgtttttcaaagtggacatacaaaggaatatttccatcattaatgtataagcgctccattgatccataatctctcctaccttggtattatcaaatgtctgatttttgccaacctagtattttaaaatggtgtctcattgtcatcttcatttacttttctctaattactaataggattgataattacattgtttatttggccatatacgtgtcctattctgtgaaatatctatgcccatttttctgtgttttatcttaattgatttgtagaaattctttgtatattctagaatatagataatgttgcaaaatatcttcttgcagtttgtggttcatcttttcaatttcttttcttttgaggaaaaaaaacttttagtgtggaatttatcactatgtttgtgtcttgtttgaatccttctcttctgcaagatactatgtggctaatgatttgcctgaggttttttgtattttctgtgtaagtaatgccaattgcatttctttccagttcttatccttctaattaatttattgttctttattactatgttaaataagaaagacctctaatgcaatatttaattgaagccagttatttaattgtaggggtcatccttctcacgtttcaatctgataatctatgtcttttaaatattaagtttagtttatttacaattgctgtgagtattgaaataattggatctactttctaccatcttaatttttatttctatttgtccttttttataatttttgtttctttttttgattgaggttttttcttattctatttttattcctatttcaattattttagagaattgcccatatcacttaaaaagttcaaagccaaacaatgtttaacctctccttttttacattgtatggactttgtatgctgaagcttcattcagcctcctcctggttcacattgttattgttaatatcattatttttgtctgtcgtttattgtcagtctacaaattagatattattattgtttttgttttatacaggcaacatttatctggatttgcatagatgtttaccattttctttactcagtgttttatcaaatacatcctttaggaattcctttaatttggtctcttgttggcgtatgttcagttttcatttgtctattaaatgtttatcacttttttcgtgataggttgttctgctgggttcacaattttaggttgccagttctgtttttttgtttgtttgtttgtttgacacttggaagatattattctagtgtcttcaatattctgtctttggtctttggtcattctaattaccttttctttgtatatgatctgtcccttctccatggcttcttttaaaatcttctctttatctttggtgtttttcagttaaatatgtaatagaactaggcactgatttgtttatatttatcctgctcgagacacatgatgtttcatgtatctgtggctttttatagtttaaaataatttctggaaaagtcatagtcattatctctttaaccgctccctctcttccattctctttgttctctcttcctcgaactcctgttagtcatttgatcctccatatctctgaatatttttgtatttcttttattatttatttcttgtctctgctacattttacattgagtaaaagtgggatgtgacagtgggaaatcattagtgacttagaaattccagttggtcattgggccaattttgatgctaccttctctcttttatttctcactttaaaataaaatttgcaaaaacaaaaaattaaatatagtatgagtccagttactggcctaaggagctaaaagcattctgggtttgtatgaagacagctgagttataacaaatgagagtactgttgtgtgactgcattaattattccctttttaaatgtacaagagcaaggcattctacctgactgtgttattgagctctgcagcatacatgtgacagagctaaaacaaacaagcaaacaaaagaaaccacagctttaggatactctgttcatgaatatagcctgaaaatgataatcaagaagtaaacttttaccagtattaaggaacattaagctgcctatctctcagtgaatttcagaatgatattttaaaagttagtttaggctgggcactgtagctcatgcctataatcccagcactttgagaggcagaggccaaggcaggaggatcacttgagccccggattttgagaccagcctgggcaacatagcaagacactgtctctaaaaaaaaataaaaataaaaaatcttagctggatatggtggtgtgcacatgtagtcccagctatttgggaggctgagatgggaggatcactgagtccagagtttgaggtaactgtgagctatgatcacactgctgcagtctagcctgggtgacagagtgagacctcatctctaaataaacaaaaaagtcagtttgtcaaggaaatgaaacccttctgaaaattggtgaatgcagtcctgtcagagatttagatttttgaagatgctgatacatagaagattggaagacatgaatatcttaaatgttaactacttttaattcattggtctaagactcagtgttaactgtcatgtataagattttattatttgttttatgttgcttctgtatataccttgaggtgtttaagaaaatatcttgtttcaaactgggattgaaggaagttatctgcagtctttaaaaaaaaattcttagaataattaagagaaatcattattattgtaccaagcctgtggttaagaagaaatatttatattttttctttctttctttctttttttttttttttttttgacagggttgttacaagttgagttgaaaacaagaaaaacttgcttttggcgccatcaaaaaggaaagccagatactttcctttctacaattgaagccatttactactttctggtagactaccatactgatatattaaaagagaaatacagagggcaatatgacaatcttttatttttctattcttttatgtaccagttgataaagaatgccaaatgctctggagataaggaaacaggaaaacttacacattagtttttaacaagccacttatgtctttttattttgctaacattaataaacttatatttgtgctttgttttttcttaagaaataatcatatataatgcctgtaagaccatttgaaaaaattccagtttcatatatatcacttcatatttcttgaaggaaattgtatctgggggaatttttcagagatactgttgattgaaaaacttacttcagaagttatttgctcagtgaaacctcagtttcattactacattttaatatagtgtgttatgtctctgtgattagatataacatattccattagatctaattagctatttatttcaacatctttatatcttttcacctgtactcatgaccacctttagaagtaaatggggttacaatctgctggctgaaaaataggtcataagtgatttttcttgaggttagtagcaaacataggcagaactagaattagaattctggtatctagggctgtttctttaagtcctaaggttgttaaaagcagagactctggagctagactacctgaatctaaatctcagcctttctgcttatcagccatgtcattttcttccatttgtacaaagcaggcaatactgagcaactaccttataggaataactgagttaatatctaaggggctttcagcagtacctgaaatatagtaagtgttacatatatgtttactctttttattttatttggaattgtgaactgataataattgaagcctacctgctagtggccatctctgctgccaggtgaaaagagcctgacttagaatgaagtcagcgaaggaaagcagagtggagagaaaaagagagactgagtcctgatgacatcatttatttacctagacctagctgcttgtgaatagagccctactgtgctgaatagcttctgtctgctcttttctattctgctccctgctctgtgaggtaggttcctttgctctcttgcttttggttgggttcaacaaatgggaagcaccagtgggagattagaagttgagaggaaaatgaaatgatgttatttatttccctggctcctttcctgccatgtcatcatcagttggctgtgttcctctactaaatagtaccttatcaggaatcctatctcttctgttcccaagcagttaccccagttacctcactaggtttagttcctgctccctccctttaccccttttcacttagggttggtaatagcttacagttattactagccccagtatagttcactacaacttgttgctttacctaaaccctgctcatacatttgtaaatactgtagttgttttattacactcttctcaaatgtccccacttgaaatagccttctatttcttttggggactctgataaattcacctgtttgggtgaaataatagcacatttcctgaagtatatacagtgggacacatgatgttttatgggggaaagagttcttggtgaaattagtttgctgtacattacgttgtttccctcccagggattcagaaggcaaaacatattaaaggttctgaaaagtcctgaaataaacattttgaacttta

SEQ ID NO: 164 - DNA, 32744 bp, Homo sapiens
  source 1..32744: mol_type = other DNA
aactcgggaacgggaacaggaggccgttggaaaactttgggcaagatggcccggcggtgatttccgcggcggtctctcctgcgcccggcctctgcggcgcaggcccagcccccgagcctcgcacgttcggcagccccggcctggccccggcccctcctgcccatggcggtggccgagctgtacacgcaggtaggagggtccgctgggctcctgggagcgctgtgggggagccggccctgctaacgctgactcgacctggcgcccgggccacacctgccacacctgcgcacctgacacggcagggcgggcgggcgcgcgctgggggccgcggaggcgccgcggaggggccacggggaccggggacacgagcgagcgtcgcccctccagggccccggcgtgctccgtccctgcccgcgggtaagccccctcctggctccgctgcgcctgggtgccctgtgggtgggaagaccctgtgggaggggccgccccctccgccgctccggcctcggggcctagaatccccagtgcccaggggtcgcgcgtgcgtccccatctcccgggactggagcgcctcggtcccttcctaccacaccacgggtggaatcagagttgcccatgcggacgtaggaagatgagacgccggccagtctcctggcccctcctgggacccccttgaacgagctggcatagaagcttatggccgcagtgttcgggctgctttctagaattctgtgtcttcaaagtgcgtgaacgtgcatgtaggctcatcagaagctgaagcagcctgggtcacaggcttgagggcactgcagtggcaccaagcgcttggggagcccaggggccacgaggtgcagtcgtaggctctttgcctaacatctgtactgttagcaacagtacaaacaccacagtttctaaagcgcctttcatataccctgactctgggaaacactagagcattcctcagaagcttcctttctgctggctggggctccacctcttacctcggaagggcagcgttcccacatatgtcccaaaccctctgagatgggcttgggtaattatttggataaagagtgtgacagtgttagcacttttgaaaaaaaaaatccatttgaatagccataaagcctgatcctcctatacaccagttggggaaatctagagacctcagtattcagacgagtggaactagaatccatccatttccccggacacatgctctagctttctactttaaaagatgcttttgctgtagatagaaaagatagttatttaaaaaatcatgtttcaatggtttaagcaaacgtttttcttctactttgattacttagtaacagtccggacacaaagcaaccgaactgtagtttctcctctattgcatctccattaactggagttctaaatggacagtgtttgaattgccctagttttgttctagaatattttcaccagtgagactgtgagccctcagacagccaacagcgcttcttcagccttcagtttactggaagtgaaagaaaagtcttggactagtcttcgacgatactttggaggacagagaaaaatgctgctgctgaacctatttgaggtgacagtatttccagaagcagaaacacacaggtgcaagcacccctatttttaggtgcctcaaacctcagatatttattaaatgtctagtaagtaccaggcacaatgtaagaaaactgataggaaggagtttaaaggtacaagcttggagggaatgagaatctgagaatcccagagactgacgcagcctgatggccattcccactgaccttgtgtccacgtagacacctgtgttcctaggctgccacctcccttcctggtgggcagttagcccccattttgtctgttctggaggtgtgaaggggagggccatggcagccagagagcgaggtcagggctttattccccagtgtgggttttgagtgggggctggcagaatcaagggtggtgtgttaggactgttagatttgttatgtatgccagcagcgcccttgggctgtggaggagagaggccggggtcacgtagctgaattctcaggtcattccagctgttggaaaagaattagagctgcagtgttggccatggagggtggaggcaggtgaggctgagaggctggactggggagtggggtgggggttgaagggaccagccaaggatgacatttgaggttagagtctgtatgagagacagcagggtggtgcccttgagtgaattaaggatgtggcatgaggaggaaatatttcttaagaaagtcatcaggcaagttctgtatttgcaggggttgaaggggtgagggggcttccaagggaaggtgccttgcagggtgggaggtgtcagagggaggggatgggccctgccgagggtcttctgcccagaggtggtcactgaagccaacaagacactgagggtctcaccaaggtgggagaaggcagacagagaagagggtgagggacaggccagcggggaatgcatctgtgcaaggagtgagaggaagcagaagggctgagatggagccatccagaggaggagctaacaggggagctggaagccaccctgtgggaacagggaagagggaactccaggagaagtcttggtgaggggagcaatcgctgccaggtgaggtgtaaaatcatccatctcttttgaaaagctacaggtgccatgccttagaaatgttcagagcagcagttcccctatttgaaatctctcttaagaagagccggtctggcattctctgctctaccacctctagaggctcccattgctttcagactcactgaccagccacgaggtcctgcctctctccctgccttcctgctcttacctggctcatgctctgccagactccttgccattccctcaatgccttgcttgcacgttgccactgcgtgccttggcacacgaactccacctgtctgagcctctgtctgtcacctttgctcatggcacctgcaccttccaccttcaatttgagcaggacctcttctgagaaagcctctgcagctagcccctccacacggtgccttccatattgcctggtaacagctcgtgaactctgtgtctccactattgaccaagagctttcagtgagcaggggacagtgggagcttcataaatgtttgatgtgcacctgtgtgcatgactgaacgtttttgcttacagaaatagctaggaccatggagacgatgatatggatgatgttatttttatctctatgtgctagatgccatcctcagagtttcatgtgccgcctctcatttaatctggataaacaactctgtgtgttagatgatctcacacttttagaaatggctcaggtcaggtaagttgctaaggtaacatacaagtgatggagccggagttgaaaacctatgttcttagtgtctctcactaccaccaccttggttcaaccgcctttattatcttcctcttcttcaagggatctgaccttttccccgcacacagtgggcttgtgagaagttcatccactttctacctacctctcctgacacctgcttatttgtatttttccttataataactaaattggaaccaatcccagtgtccagcaagaggggtaaagttaagtaaattatggaagattcacatggtaaaacagcatgaagccattaaaagtactatttctgaagagttcataacatgaaaacatggttatgtgaaaaatggggcacaacagtttatatactgtatgaagataaatataaaatatgcggccgggtgcggtggctcacgcctgtaatcccagcactttgggaggccgaggcgggcggatcacgaggtcaggaggtcgagaccatcctggctaacacggtgaaaccccgtctctactaaaaatacaaaaaaattagccaggcgtggtggcaggcgcctgtagtcccagctactcaggaggctgaggcaggagaatggcgtgaacccgggaggcgaagcttgcagtgagccgagatcgcgccgctgcactccagcctgggcgacagagcgagaccctgtctcaaaaaaaaaaaaaaaaaaaaaaaaacataaaatatgcaaacaaagaaaaaagaccacacatatcactgcctaaagattggacggtctttctttctagtagctgcagagaagtcaacaaggatgaaggctggggatgggttgttaggtttggccgctagttttggtccctggcgtcgtttctgtttgggtagaactgtgaaggggaaagggaaagtctgacatgacccgtgaaagggaggaaaccagcagaggactgcagtttgaagacataagaaaggcaccaggcatgggttaacctcagaaaggagtgagggcctgaggccacagtggcaggagttgaaggcacagagatactgacagagaaggaagaaagcccagagagcttgacagctgctgagcaggaagggtgggtaggacagacggcttgaggagagtgacagtgccaccaaccatttctctgacagcatcattccagaccctcagcatccaggccaccttcctctgggtgaattttcacaccttgatgcccattttagtggcactattctctagccttgatctgctcagccatgagtacggtgcaacttcttgtgagcatccctcagtgtatcctggcattatgttagtgctttaagcagagctggtacatgctctgcccctggtgggtcaaatcaagtcctggtcctgccccttactaactgggtgacaccaggcaagttacttaacctgagtttccacaccagtataatggactgaatcatgcttaccagctgaggaggtcactatgaggattaatggcgtgtaaaatccttagcacagcacctgacacataatgcttaataaagattactcaaatactgatgctattataatacagttgattttttttacctaaatacagactttacatttatccctataaaattttctgttttgtttagtgcccagcgtttctgtagcttgtaaaaaccttttgaatcttgatcatctttagctaatcaatcatttcatctgcttgtttgatacatgtgttttgttttttcatctacgatactggtgaaagtgttgaatgaaaggggaggcggtagagctctgtggcatgcctctggagaccttttttttttttttttcctaaaggttgctcttgctcattaattagaactcaggttatgactgtgtagtgacaggttcactacagtcattccaccatctgtttctttcacttgtgcaagaggaactcacaaatatcttcaaagttctgctgaaactcagatgtgcaaggtcaaaagaagtgtcttgactagcagtccagggcccctgtctaaaatgaggtcaaagttcagcgtaacgattttttttttaatttggctaattctaaatagtttttagacttctatataccattaacaactctggaaaattaaatgtatccattgtattatgtatgggtagttcaaagagaaaaaaagggatgaaaagactgaaatacttagtctttaattggtgcaactgaaccactgggaatttgaatttttgttcaaaagttgtttatggagtgctagttatgggaagcctttgcattggattccaagcacaaagaccaggctcttaaagttcaaatgccagtgggggagatgggaggcagcctagatacctgggggaggagcagagagcgctcaagggaagcatccagctctgctagatggcaagtggcaaggagagtgccaagatgaggagtgtctccagctactccagactgttcagagctgtttgctcttggatggggagaggatgggtggggctagggtggaaggaacagaagtacacagcagaaagccaaagaaggcctgccatgttccagaaagtgctagtggttttgggtggccacaggcagagggtggattgaaaagagggtgaggcctgagcaggaaattggccagaatgctggttgcccaggcctggctcttcctcaaaacccatgtgggggttgattttcaaagcttttctcttgccgggccccacccacaggaattccaatcaagtacggatgagagagtctgtctgcccaaagaaacctcgtgctcagcctggctgaggaagcctccgggggctgctgcaccagtcaagagaggattggtgggggtagggttgggggctgacttatggccatggcaagggggctggtaggcaggggcggacaggagagggcttttaaaaggcagtcttttctagcacctggtgactgttgggctgttggggtggagacacagaggggtgcccagcactgtcccaggcttctgacatgaggggcaagagagctaggaaggaggagcgtcggcatcactggagtttggaatttatgagtctatgaggacatttaggggctgacatcttggaggcaattggaaatgtggtgtagagctccagtgcacgatctgggtgggaggtctcagatgcacaggtgccaggcagttgcagaagctgtggaattgggtggaactctccagaaacagcctatcatgagaagaggctgggaaggaccttgggagacacggacatggggggcagtgggaggggcaggggagccaggggaggggcccatgaggagcgaatgaagaggaggaggaagagaggggcatggtgtgacaatctggcctggctgacctggagtgtggacactcccagtccagaaagcggttctaggagggaaacacatgtcgtcccatcttgtcccatcttccatataagtcttcaagtcatttctgtggctcatgccagaagatccctcagaaaagcaggcggcgtgagaagatgctgttctcatctcacctgtgtgccttgggggggtggctggcatggtcttgagctcataaggttcagtggtcccgagcctctgcctcagcttggcgccttggcatggggagggcactcagggaagttgggaggtggccctctctttcctggctccgctgaagggcttggcgagctgttccatcccagtccacagactcctgcctcatgggaaggccccatattctggaggtcagttgacagctggttacattgtttgcatgaactgcggactgcatctgtttggatgaatgctgtaaagttaactcttcctccagtttgaagcattgctttgtgggtagaggaatgtgagggaggaggggacaggaatgaatgggtggaacttacccggagctgagtaaactcaccgttgtttacttaccaggctgggtttcagctgcagggcactcaatgccagcagaagcaccaggatcgcagggtgtgggcggcctggggtactgggctgaggagtcactggtcttcagaagagaagccgtcagtggttacgtatgtcctaatactgcctgccatttaataccacttttagctgaaaccaatcctaaattatagttaggagagcacatggactctcaagtagatggttgcagttcagagttcaggattactttcagggccagattcgcttaactaatacggagttcaaactaggagtcacaggccctagctctgctggagtcctggtcctttgagactctgtctgctgtttggtgagttatttctctctgggcttcagttaggggctctgttaaacaaaaggattgattggcctagtgactttcacattacttctcagagcccaggcttccttggaaggcccccagggctctcagctccagctcccatcagaacacctccactttcaccagcttcgcttagccagctgttacaacttaatttttttttttttttgagacggagtttcacgcatgtcacccaggctgcagtgcaatggcaagatcttgcctcacagaaacctccgcctctcgggttcaagcgattctcctgcctcagcctcccaagtagctggggttagaggcatgcgccaccacgcccagctacttttgtatttttagtagagacggggtttctccatgttggtcaggctattctcaatctcccaatctcaggtgatccacccacctcggcctcccaaagtgctgggattacacacgtgagccaccgcgcctggccagaacttccttttgaagtaggctttctgcagctctaaaaaggagtttgacaaacaacttggagtagataatcagttctgagactctgtagtggccaattcttgataaatttggtaattcatgtacaattcttttggggggcatatattttgatatttgcctttaaagattaacattcattgttctgattatgaaagtaataggtacatattgtagaaaatacatccaactctcaggtgtctcttatgaggatcccattcctaatccattttaatgaagtaagcttcatgacgttagtaataaatattttcaatagcagacctggggtaggagctgtgtagcccgtggcaacaaggatgggtgtgggtgtgtgtgcctgagacaggcgtgtctgtgtgtttctttatgaggcctccatcgtcctatctgcacaagagtgtgtgtcactgcctgccaggtcattcttccattctcgttctctcaaaacttacacatccatgtcacgtttcggcaagcttctgctttttgctagctgttaaggattaaagcaactcaaatgatttaggggtagtcatgattgatatccatccagtgacttttctgttttattgattaagtaaggcgatttatattaactaatagataggttcctcatccagcattgtcctagtctagtacttgtaactgtgaactttgtttgtttgtttgtttgtttgttagtttttcttttttttttttcttttttcttttttttttttattgatcattcttgggtgtttctcgcagagggggatttggcagggtcacaggacaatagtggagggaaggtcagcagataaacaagtgaacagaggtctctggttttcctaggcagaggaccctgcggccttcctcagtgtttgtgtccctgggtacttgagattagggagtggtgatgactctcaacgagcatgctgccttcaagcatttgtttaacaaagcacatcttgcaccgcccttaatccatttaaccctgagtggacacagcacatgtttcagagagcacagggttgggggcaaggtcacagatcaacaggatcccaaggaagaagaatttttcttagtacagcacaaaatgaaaagtctcccatgtctacctctttctacacagacacggcaaccatccgatttctcaatcttttccccacctttcccccctttctattccacaaaactgccattgtcatcatggcccgttctcaatgagctgttgggcacacctcccagacggggtggtggccgggcagaggggctcctcacttcccagtaggggcggccgggcagaggcgcccctcacctcccggacggggcggctggccgggcggggggctgaccccccccacctccctcccggacggggcggctggccgggcggggggctgacccccacctccctcccagacgaggcggctggcctggcgggggctgaccccccacctccctcccggacggggcggctgccgggcggagacactcttctcctcccagacggggtggctgccgggcggagggactcctcacttctcagagggtgcggctgccgggcggaggggctcctcacttctcagacggggcggccgggcagagacgctcctcacatcccagacggggcggcagggcagaggcgctccccacatctcagacgatgggcggctgggcagagacgctccttacttcccagatgggatggcggccgggaagaggcgctcctcacttcctagatgggatggcggccagacagagatgctcctcacttcccagatggggtggcggccgggcagaggctgcaatctcggcactttgggaggccaaggcaggcggctgggaggtggaggttgtagcgagccgagatcacgccactgcactccagcctgggcaccattgagcactgagtgaacgacactccgtctgcaatcccagcaactcgggaagccgaggctggcggatcactcgtggttcggagctggagaccagcccggccaacacagcgaaactccgtctccaccaaaataatatgaaaaccagtcaggcgtggcggcgcgccactcggcaggctgaggcaggagaatcaggcagggaggttgcagtgagccgagatggcagcagtacagtccagcttcagctctgcatcagagggagaccgtggaaagagagggagaggacggagaggagggagaggagggagaggagggagacgggagagggagaggagggagagggagagggagagggagaggagggagaggagggagagggagagcgagagcctgtttgtttttttttcatttgagacagagtttcactcttgtctcccaggctggagtgcagtggtgcgatctcggctcactgcaacctccacctcctgggttcaagcgattatcctgcctcagcctcctgagtagttgggattacaggcatgcaccaccacgcccagctaatttttgtgtttttagtagagacagggtttcaccatgttggccaagctggtctccaactcctgacctcaggtgatccacccacctgggtctcccaaagtgctgggattacaggtgtgagccactgtgcccagcctgttttattcttattctttatttcctccagcatttttatatgaacatgttaagcataatgcaatgttgaaagaactttacaggtcaggcatgatggcttatacctgtaatcttagcactttgggaggctgacataggaggatcacttgaacccaggagttcgaggctccagtgagctgtgatcacgtcactgcactccagcctgggccacaaaactagatcctgtctcttaaaaaaaaaaaaaaaagaaagaaagaaaaagaattttatagtgaacacctgttttaccacctggattctggtgtggacattctaccatattcattgtatcccatgtctatccatctttctgtccttctatctgaccttcaattcatctcacttttttgaagcatctttgagtaagccatatatcaatacaccttctaaatattttagtatgcatattaactagagttccatatttgtttaattttttgtgtaaaatttacagaaaatgaaatgcacaaatcttaagtctgcattgtctgaggtttgaaaagtgcttagcccctatgtaacccgagccccatcaagatacagaatgttaccatcactcccagaagatcccctcatacaccttcggagtcactccctggccccacccaccctcagaggcaactactgctgtgaattttttcccagcatgctttagttttagctgttccagaacttgatttgaagggactcacataggaggtactcatttgtgtaaggcttctttaactcagcgtgctttggtgactcacccatgcttttgcttacatcagtagttcattccttttatgggtaagttgtatttcattgtatgggtattctgcaggtgttttttttttttaattctcattaatgggcatttagtctgtttccaatttttggccactataaataaagttactatgtcccatatcacagaatttatgtaccattctttgaggggggggcttatattttgatatttgcctttaaagattaatatttattgttctgattgtaaaagtaatagatgcatattgtagaaaaatacatcaaactctcaggtgtctcttataaggacactaatttttaaatcctgccaggcgtggtggctcatgcctgtaatcccagtactttgggaggctgaggcaggtggatcgcctgaggtcaggagtttgagaccagcctgaccaacatggtgagaccctgactctactaaaaatacaaaattagccaggcatggtggcgggtgcctgtaatcctagctactcgggaggctgaggcaggagaatcacttgaacccgggaggtggaggttgcagtgagccaagatcgtgctgttgcactacagcctgggcaacaagaatgaaaatccatctcaaaaaaaaaaaaatcctattgggtcagcgccttaccctcatgacctcactgaaccttaattaccttctgaagatccttctcagatatagtcaattgggggttagggcttcaacatatgaatttgggggacacacagttcagcccacagcaacgtggttctacctaaagacttgtacatcggcgctgagccaggcgtgccattgcctgctgggaattgagctgggtggctgtgtctggacttctgcatttcccactgtgggagtccttggcagcccaccagtgtgataagattatgatgacattgctgtaacaatactttcgtagcattttacaaagttctttcaagtacaaagtctaatttaacctcccagggaactggtgaaaataggtattgttgtgccaattctatggatgagtaaaatgaggcactagaagttaagtgtctggcccagagttccatagtcaaatcagtggtgaaagaaatccctctcctctaaccctgtagacagccgtgagatgtttccattaagggactcgcggatttctttcccacgtacaggctttcagcgttcaaggtttatctaggaggctttgggagttctgttgcctgtaaactgaggcagccaggcctggtgcatcacagatgcacgaaagatcacctcataagcaaaattaggtagacgtattcctcatgaaggagctgacctagtgcacagaaagaaaccttcctgtgtctaaccatgcattgatccataattttggaagtcctgaaattcagcttttctcatcctgttggtcagtacaacagggtctggattcccgatcctgaagaagtttggaagtctgctgaaatagccaaggactacagagttggtgacaaggtcctgcgactcctgctggaggatggaacggtgagggtccttgctgttcacagctacgtcgatgtgtaaagcggtagctggggtgtgtgtaaggatgggagcacgtggaccccgtgggaggcacccaggggagggcgcacgagtgggcaccagcaccattcccaaatggcctcctggtgccgggactcactgatgtgtctgtactccttccctcccgcccctgtgctgccctgcatccaccgggcctctctctgtaatgagggcccagctgcaggagccaggtctgtgccacggcactgcatttccaggcacccagcattactgggagaatgctgaaaagtgattcgccattttggcttcctgagtctcagcccagagattgggcagagatgaaaaacttggtgagaagtcgtttgagcccaaggcatacgctggtagagaaaaacatcaagatgtgaaggggaggaaaatgagaagagggagatagaaaacaggcagggagagggaggagtgggaggagactggagggagtcggtccacagatatatagaaatgtgtaagggagggagtgtggcagggacaagaagacatggacacccagctttgtgtgacattatgaggtgcctctgttggtgctggtgtggtgagggggaggtgaggatgaactttagcagttgctcctgtggtaggatgagctattgaggagcttccctgcaaggctgcatgtgccttctgatgacgcagcttctgaagactttgcatttgctctaagtgtccctcatgagttgtccttgcccaccattgctgtagtgacatcccactggattagtagcctagggtgactggacgggtttagaatcaagtatctgggtagagaactgggcaggggatttgtgctccatctagatcccagaggtgggtctggggaacatcatgtgaggattaattgacaaagcatgtaaatgggttctgcagacacaggacacactacttctaatcagactgtcctggatttgggagacatttcctgagatcctgggaaggcagatgaacacagcggttaaagacacaccctctagaatcagatggtctggcgtcagatcctggcatggccccttgttaagtctttggcccaggcccccagtttccccatatgtacaaaggaggtaatgactgtgcaccgtcccagggttgctgaagtgcgatgagacaatcctgtgtgcatgtttgaaggcaggagctctgggaagaggctcctgctccccggggcttccctttccaacaggagctcctcgcagtttttattgagtgtctcctgtgcacaaggttctgattagggatcagatggctttgtttgggaaggaaaatctcaaggcagcagctgcagtggcagtttgctgctttggtaatatctgcagggcttcaggtggctacattcccggccttgacccggctgcagaggtgagtaggatggcgggcagccagacctctctttagctcaaccctttgtcagtactgtaagagacaaggcctgtgtgctgtaggaaaatgtcacctctgcctccacctgtcaacataatgttcattacattttctcccctcccccaaagactgtctgtcctttctgtctccctgttgctttcacacataacacacacagaggccaaaccagaagtgggggttgtggatttacaacagaaaaacagagacaaggaaagtcagtatgtatgagaagcatttttcctgattttattttcaaaaatgtttaggttgagaatattctggtcggggttaggtcacaatacaattgcattggtaacaggggagcaggagctggcctgagcatccgtgtccagttgtggattgccctgagctgctcgctttatgcagaacagaccaaccagccagcaaaacccccgccatggacaaggaagcactgtgctagtgagagagcacaggcttcagagtgaggctcagattaactgtgtgaccttggacaacaaactccaactttctgaacctgtctcgttgactttcttggttggggtagtcatgtcctccctggaaggcagttttgaggattaaatgaaacaatccatgctgagtgcttggcatggggtctgcacagtggcacttgatgaaaggcagctgggccaccttgtggagctggtccaggaccagagatcagaaggaatccagagatactgactgaatacctggaaggcggcctaggaaggtggaagagaaacaagcatgctgggtaacctgctcaagtcgctttagttgggcttcacttcccccagcggtgaaatgggagtgtaggaattagaatactctgacattggaaaggcccagtcatctgtggcacagatgccacggggcatgctcgcctcaccttcgttctgctaaggcagctgctttaggaatactaggttaaatctagcagaagaggagcaagcctgggaaaattccttggcccagggctgagactgataggaatagacagccctgctgggggagctgtgagccctcgggcatgtgggcaactgcagacaggagacacctgcaccaggggcctttcacggagagaccaccacctgcatggactcctttaggtatctgtcaccaccaagtgtgtcaactttgagcagagactcaacaaccttagagttaaagagaccgtaggtcactgtgtcattttagctgcagcatcttgttttcaaatgaaaacttgcatggcctcaacatttaaaccacatataggtagagccctggtgggagattcaggaatggggcacctggatctctgcccttgtagcttccccaacactccttattgaggcctctgtagatctaaggacccctgctctagctcctcttcgcagatgagagaagtgaggcccagagagggtgagtgacttgccccagtgcacatagccagtgccctagtcccctgctcctacttttcattattccaggagtcagctgtgaagattttcttgttgctataagtacatttgctttttaatgtcagtgatgactctgatggaggggtggataggacaaaggacagtgcttcaacagaaacaccaaaaatcttttatttccagagctttaatttttatctttgtccataggagctggattattctgtcaatccagaatctctgcctccacttcggaatcctgacatcctcgtgggcgagaatgacctcacggctctcagctatcttcacgagcccgcggtgctccacaacctcagaatccgctttgcagaatccaaactcatttacacctacagtggtaaggagagcaattctaggaagtaaggaatggcactggaatgtaagcttgctgtctagagcctcctggttgttttatgtttatactgagcacccagagtttgttgtaaaaagaagtgtctgggtggggagaatcttcaacaagaactaagactggactacctagaaaaagagatgtaacaaagctcgtgtttgagtttctcatcagatttcatacatttattacttattttgggcaatgatattacttacactgcaaattgcaaaaacctctccatttgcgagcatttccacctgtcctgtcaaccaaccgtcagaacagcccgagggtgtaggtgactggcagggaattaattcagtgcgtgaagtgacttgcccaaagtcacacagaaggtttaataagcgacagagctggggtttcttaaaaaaaaaaaaactggagatgcaggtggcagtaagagtattttaactgcatctaacatctttccccaggaatcattttggtggccatgaatccttacaagcagttgccaatatacggagatgccatcatccacgcctacagcgggcagaacatgggcgatatggacccacacatatttgccgtggcagaagaggcatacaagcagatggccaggtagcttcctgccaagctggacttccccttgctctgccaatgctccctgcatttgccagaccatcacagtggaggggagatatctaggttgggctcattaaaagagataggccagaggtggtgctttgttgagccgactacctggaatgaatagcaaacgactgttccatgtacctgacctgtcaagactggagtttcctgggttttgttccttcaaggtagtcaagtcagtcctaccagtctgggaatagcagatgcttttcttgcagtgtgtttggttggaggagtgttgatttattctctgctatgagacgtttaagctttttttttttttacccattgcaggaagtaggatctgatgacagggtttttagctgcaggaggttttaggtgcaggagacatggaattttatcctaatttcactgctaggtgtttgtagggccctgtggagttctcgtttcactagtgcacatgtatgaaaagcctcctgtgaatgaggcaccgtgcacacattcccatgtgtcatctgggatggcctcagaatagcccacgatgcaaatgtctgggcagtaaacagcttcagggaataaccaacccagggtaggcagcaagtaaaaggcagatctgggatttgtgctcagatttttaaactctagtttatttttcccataactatcacttttggcttcagtgtcttcatctgtaaagtatggagaatagaaacaccaccctatctttgtagctgcctttacagtttgcaaaagaactttcacatacagtggtctcccttgagtcttacagcactcctgtgaagttgactgacttcattgccctcatttcacagatgggaaatctgaggcacaggacctggacctgctgactctttacctaaatctttactgcataaccccagccgcagctcctgagctccctccgctttatgtcttcgtctgtgagctggactctcagagggcacccattcctggttctgatgcttataatgagggagcaggtggtgcttacatgaggtagaacacgtgctgctttcctgcacagatgtctgatgggcagtctggggctagaccgagcttcttcagagtcatcagagacccggtgccgtgcagctccctgtccctggggtggggccgtcatcctcagggacaagccagttctcacctctgtcttccatattctaggtaacaaggcatatgaggggaagggtatggccctccaggttaaggagactctctggaagccccacaaagcacttctaacagctcgtcaggcagacctcactcacatagggaggctgggatgtgcagtctttcaaatgcacagaggggcactgcctggccactggggcctagtccctaagaaggaagaggagaatgcaaatgcatactgggtagagaattagcagcttccgctgcaccaagattccttctaaccctaaaacccctgtggttctgagatttttccctggctccctgtaggtctcccaggtatcgtggtgattagggactgggtatgggtgggatgagctctttggcactgtagggctgtgctcacttcagccctaaagagccagtttctccttggaggtctgtctgtgtaactgccataacagaacggagcccaaagcaggctcgtgttggccttgtttgatgctagacaggtagtgtccctcagggctgtagaacagggctgggattactaaagccctgttctatgccctgagggacactgagcatgtcatttcacttctcagagtcttcatcttctctctttgaaatgaaaatattggaccggggctctgtatccaaagtctcctctagcatttacatgggaggctgtggctctgtgctctgggtcaagtcactccacccctgagtcaccattttactcttctgtaaaagagatatctatgtcgtaggatttttgtgaagcttaaatgagaatctgtattcacccagcacctggcatgtgagcggtgccacatccacagagccatgttagaagcttccaccatcacagtcttatgacatgaaaagtttaatgcatttttaaaaaatctctaaattatataacagagcatgttggcttagagagcgcatatgttcccaagcatcttttgaataattgctctcaaaataatgtccttgaaatgtttttatatttaagtgggatgtgcagaaaggagttgacataaggcctgaggctgctatctttagaggcctgcttgcaaggtggcccatggctagcctctgatttcatgacggttcctgacatttcttggttgaaaaagtggctcattttacctaaactcaagctgtttgtgtaaataatgtgctttatgctgaatacgtgctttccttctgggagtctggaatattggcatatgctaggcagaaggtgggcactgcatctctaatgagcttccctggcagccagcatttcacatgtgctgtcaaattccttgctggaagaattgaatgtgtcctgtgtgacccgactgggagaggacccctggaagtttgcacccgtgttccactggaccttgccccgtgtgccttttccccgtgctgcttttgctgtgtatcctcttgctgcaatcagtcttagctgtgaggatgactatatgctgagtcctgagagtcctcttactgggtcattgaacctgaggttggtcttggggcccctcaacatggtactcaataaatacatgttgacaggcagcatgatgacctacacagggtccatctagaaagagggtgctcaggagagggtggggaaggcagaggagagatgaaatgagaggtgaaattcaagaacagagtttaaaagcaaaaatcctgcccagagagtgggaaggatgggaaggagcagttttttggttgagtggaaaggttgagtagggaagcagtaaggagtaaggatttgaataaggttggatgaaagatgtgaacttttaaaattgtgtgttctgcacgatcacatagaaaaaaaaatctagaaggaaattgattgagatttaaaaatagtagagtgacaaaacagtttccctcttttgtcttgtccacatttgtcttaattagcacatgttgcctctttaatgggaagaaactaatatttgaaaacttttatttgctttagaaacaacagaaaccagtccataattgtaagtggggagtcaggtgctggaaagacagtgtcggctcgctatgccatgaggtactttgccaccgtcagcaaatcgggcagcaacgctcacgtggaagacaaggtcctggcatccaatcccatcaccgaggtgcgtaccactgcggaaggcagctgggtgttggtgatggaaatgggggttggttggtttgtgtgctctcctggctaattcaagttcccaccctttaaagactaaagaagtgagggcaggaaagacccgggaagcctatttgctggtgggatttgaaggagatgggggcagaattgttactttcaaggctctcttctgctctacctgctgggctggaaatctaccatcagactccaggagtcctctgtttacatttacatcccaggggaaaccaaacatcactggtacactgaaatcactggtgttctccacccagctggcatcagcattcatgagctgattgttaaaatattcaggaattttgcaagctgattgataaacctttggtagtttgacatcagtcaggggagaagtatttataccttctgccttggcagaggccacatgtcaagactcttcctcctgccctccccaagagccagttcatcagcacactactgactgggacagagagtgggcaaggccaaccgtgacggtgcccaggggggtgaggagacagccctcaaggaagaagaggcacccaaaaggcacagaggagggtcctgcaagccaactccagctgccccgcaaaatgggaagaggattgatttgaatttatttggaagcaaagcaaaaaattaagaatattagactactagacctcttctccctgttttctcaaatcaaaatcctcaatgaatatttatcagacaatctactctgttgaagtcactgcttagctaatgtgggaagtgatggaaaagaataagacccaatctccaagtgtaagattcttctaacctaatgtaagaatattttaaaattaaatagaaacatatgtcggggggggggtactaagaaacactgcaaagctcataattcagaggcataggcttacttagaaacataaattacaatccaagataccaatagaaaagttatcaaggctgggtgcggtggctcacatctataatcctgcactttgggaggctgaggtgggtggattgcttgagctcagaagttccagaccagcctgggcaacatgatgaaaccccatctctaccaaaaatacaaaaaattagccaggtatagtggcacatgtctgtagtcccagctactcaagaggctgaggtaggaagattgcttgagtcaggaggtggaggttgcagtgagccaagattgcaccactgcactccagcctggatgacagagcaggaccccatctcaaaataaaagttatcaagagccagtgccaagttaaatgcccagtggataattttgtgtaaatatttagggtttgtctcctctactagactgcacactccatgaaggcgggactgtatctatttggtttacctttgtttaccgagcgcatggcacatagtaggtgctcagtaaagacatgttggcaggcagcatgatgacctgggtcatctagaaacagggtgctcaggagagggtggggaggggcagaggagagatgaaattgaagaacagaagtaaaaagcaaaaatcctgcccagagagtgtgagggatgggaaggagcagttttttggttgagtggaaaggttgagtagggaagcagtaaggagtagggattggaataaaggttggatgaaagatgtgaacttctagttgagcatcataggtatttggggcctgaatgagttgaggcacctcatattctctcatttaatcctccctactctgtaagtgttctggtcagtctgggctgctattataataataaatataatgtactttagtataatatactttagtgtcattgaccaggtggcttataaacaacagaaatttatttctcgcaattctggaggctggaagtccaagatcagggggctagcaggggtcaggttctagagaggcttctcttctgggttgcagactgctgtcttctcacggtacccttacatggcagaaagagagcaagagaggtctctgggatccctattatgtaggcattaaaatcccactcccaggggctccaccctcgtgacatcattacttcccaaaggcccaccttatgataccaatacatagggttaggatttcagcatgaagattttgagaggacacaaacattcagtccataacagtgagttgcttatgattctcatattacagatagggaaattaagacctggaaagatgaattaacttttttgtttgtctgtttttgagacagggtctcgctaagttacccaggctggagtgcggtggtgcaatcatagctcactgcagcctccaactcctgggctccagcaatcctcccatctcagctttctgagtagctaggactacaggcacacaccaccatgcctgtctaattttttttttatgttttgtagagacgggggtctcactgtgttgcctcatctggtctcaaactcctggcctcaagtgaatttcttgcctcagcctcctgaagtgctgggattacaggcgtgagccgctgcacctagccagtgaattaacttttaagacattacacagatagcaaagatagaacccaggaccctgaaacatcagaacctgtgctctttctggtcctccccagtatctgccagtgggaccaaggagaaccttgagcagcaggctcatgttctgatttgtcatgttccctgccagcgtggggttgctttctttccccagacttccctctgccaatcagaccttcccctagggtacaggattgccttttactaaaaacccctccaataattttgaggcaaaaatcttttaatgttgttatttcaatagagtcttattttttttaggccgttggaaatgccaagaccacccgcaatgacaatagtagtcggtttgggaaatacacagaaatcagttttgatgaacaaaatcaaattataggagccaacatgagcacttacctcctggagaaatccagagttgtctttcaagtaagtattaaatttccttttccccaactttttgagcattatttacatttacatacttattatacatactcaggcaagctacactatgctgtgagttgaagagtagggttttcttgtctttcatttgcagtttggattcttttttctgtttattaaaaattgatggatgaataggtgtaatatcaggtgagttgtatgtctgcaggaaaaggttaatgactttttaatttgggggatttacaaaatccttatagtttaaaaagcaagtatctctttctagagtacgaaaactgtttgaaataggctaagctgacagactggctttcctatcaggaagggaatgggatcagagctattgagggggttttaaaagaaaggcttttctgccagtaaatggagaaatttctcatcgttttggcccaggaggagagcaacagaaagccttgtattgcaggaagtttgtaaaaatttcactaggatgagttacgccattcccatttcataggacgttttcatttaataacactttctctgggttgctcattacttggaaggccatctcaggccacccagttctcagctgagaggaagggcctgcttgtgaactggccagatcacatcccagacagagaattatccatgcggattagatatctaggaccctctagttaaaaacctggcatttttgcttgtaaggatttggtgtaattttgaggacatttctttatcttacagtcggaaaatgaacgaaattaccacattttctatcagctttgtgcatctgcacagcagtcggaatttaaacatcttaaattgggtatgtgatggatcgtgtatgaaagggtctctcttttatggagggcttaaattctaggttaactttcttcttatagtaatatatttgttttaagtatttgcccaaagatacaagattctttggtttcagggacagaattggtgcatctaattaaggggatggattagggccggggggatgagtttagagagagggggcacttgtaagactgagggttatttttaaagctcattgggcctggcgtgatggctcacacctgtaatcccagcactttgggaggctgaggagggtggatcacctgaggtcaggagttagagaccagcctggccaacatggcaaaaccctgtctctactaaaaatacaaaaattaaccgggtgtggtggcacgcacctgtagtcccagctacttgggaggctgaggcagaagaattgcttgaacccgggagatggaggttgcagtgagccgagatcacgccactgcactccagcctgggcaacagagcaagactccgtctcaaaaaaaaaaaaaatagctcattgggtatttatggtcctccagctagaaccacctgaataagacctcctgacagctggaacatatgatgtcaccaaactttccattttatttgaacatgacatgttaacccacttattaaaacaaaccacctgtatcataatttgaccttccttgatggctcaaggtcattcattacttgtagtcataattaattatattccagagatggctaaaacatagggctgtttgtccttcagtacaaaaggccccgagccccgtgctgtcacagctctcctgccttagccatttgtgctatgctggtagatgagaattgttggagataacttctagtatgttggagttgaactcacactctctaattttggagaagttgcttgtactcttagaatctaagtttctccagatttcacatgaaggtaatatccttggccttgtctaccaaacagaatgtgaatagtgaacctgcagaagggctttctgaaagatcctctactatttaaacattagatgtatgtgtatatatatacacatacatgtgtatacatacatacatatatatacatatataaatgtgtgtatatatatatatacacatacatttatatatacatatataaatgtgtgtgtatatatacatatatatgtagagagagagagagtcattatccggattgtgctaatggttttataagagtatatgtatgtcaaaaattcatcaaatcgtacgtgttaaacatatgcagtttattgtacattcagtaaagctcagtaaagctatataaaaatgttaggtgcaggaacaaaaaccatgagctttagagttaggcctgcatttaaattcttgtgtgccatcagctattggaacttgagaaagtcacttcactttcctgagtctcagcttctgtgtctgttatgtaggattttttttgttgttgttttgtttttgtttttttgagacagggtcactgaggctggggtgcagtagcgccagcacggctcactgcagcctcgaactcctgggctcaagtgatcctcccacgtcagcctcctgaatagctgggaccataggcatgtgccaccatgtccagctaattttttatagagatttggttttgcccttttgcccaggctagtcttgaactcctgggttcaagcaagccccctgcctcaggctcccaaagtgctgggattacaggcatgagcctccacacctggctgtaatgcagagttctaaggaataaatggaataaactgtgtaaagtgcatgacacagttctttgagtatgaacttcccttcttctgataaatgtgtatgtccaaatttctgtgttacagacataacaaatcttactttttgatttcagggagtgccgaagaatttaattatacaagaatgggaggcaatactgtcattgagggtgtgaatgatcgagctgaaatggtagagactcaaaagaccttcacgcttctgggtaagggaaaatatcccatccaagtatgtagccattttctcttaaaaaaaaaaaaaaattaaggccaggcgtggtggctcacacctgtaatcccaacactttgggaggctgaggtgggcggatcacaaggtcaggagattgagaccattctggccaacatggtgaaacctgtctccactaaaaatacgaaaaattagccaggcgtggtggcgggtgcctgtagtcccagctactcaggaggctgaggcagaggaatcccttgaactcaggaggcagagggttgcatcgagccgagatcacaccactgcactccagcctggcaacagatcaagactctctcttaaaaaaaaaaaaaaaaaaaaaaaattaaaaggtggggattcccagcaaatgtgtattctgaaggctcctaatcaattctaattttaggacaaaacatcagaacatatttggagactaagtggtcaagactatgcttttcccttaaaagagctagaaattaatttgtttttttcctcagccttcctggctcggctgtgagaggcatgggctgcaagccctgtgactgccgtaagctcttctaggctgagtacaagaatgactggtaaagccaaggtccaattcggttcagaagtggaacgttggccctctgtggccttcataggtctcctgatgatgacagtaaaatagtgagcactcatctggagcttgcaatgtgctgggcaccatcctaagcactttataactctgtgtgaactcattcaatccctacaaccaccctaggaagtcagtgctgctgtttctcccattttacaagagggaaactaaggcacagagatgggaagtgatttacccaacattaggcaactgattcagagtggaactggcttttgcactccagggtcttcaagcatctcatttggtacagaaaaccccatcttctattgctcagatgccggcacaggtggagcaggcacgactgtcacagcacagccagttgttcccaatccttctcgccttacttttcccacacagagctcatgttcagaaaggctgtctaccagatggtgtttataaaaacaggcattcactctctcattctgtatgagtctagacatccacatgaagctgccagtcaaagcttctgatcagggtgaggccatcggccatttctttctttttttttttcttttcttttttttgagacagaatcttacactgtcgccaggctggcctggagtgcagtggcgcaacctctgcctccccgattcaagcggttcccctgcctcagcttcccaagtagctgggattacaagcacacgccaccacacctggctaattttttgtattttagtagatacagggtttcaccgtgttggccaagatggtctcaatctcctgacctcgtgatctgcccgccttggcttcccaaaatgctgggattacaggcatgagccaccgcgcccggccagccatttctacgtcttgctgaaatctctcttgctgaaatgtcccgccgattcatactaagtgctttcattcttgtggcctggttgactgtatctgaatgtaaaaaactaagagtttcaggttaaacatatccaaggaataggcaagacgatcacagctggataatggagaatgaaaacaagatggttttctaagcaaaatcaccatcagactgttccctcaaacctgcttcgaggagaaaggcagtttaaacattttataataataagataaacactttcggcactgacttacatttgctgaaaataattatggtcgtcatttcaatctttgtataatgtactccatggagagggggcttggtgcgtgaggaggggacaggtggccaagctctggctgggctgaaggatatgccctgccctgcccaccctcatctccctgatccttctactctctcccacctctattatgtcctcctcctcacagcaagataatgtagggcaaatagagtaggctttgggatcaaatgaatgtgaattcaaatcctaattggtatgaatctaaggttacccactctgagacttggtgtctttttttgagatggagtctcgctctgtcgcccaggctggggtacaatggtgcagtctcggctcactgcaacctctgcctccgggactcaagcaattctcctgcctcagcctcccgagcagctgggattacaggcacatgccaccgcccccagctaatttttgtatttttagtagagatggggtttcaccatgttgcccaggccaatcttgaactcctcacctcaggtgatccgcccgcctctgtctcccaaagtgctgggattacaggcataagccaccatgtccagccaagacttagtgtcttgatctgtgagtggcaacgcaccttatctttcatgacaactcgtgaggaagcatatgtaaaagtccccagcaccaggccaagcacatagcaggtgcatagtaactgctactccctgcctgctagctctctacattcccaattgtccaaagcctcaccatactttgagtaaaaccatctcttcttccatgaaaccttttctaattgttggagatcagcaatttgcagccatttgcccccatgtttcacacaacttaggttatgtttacagatttccacatcacgttcctcagtcccagggccaagactgggacgagacgagagaggcactcactctcagggccctgcatgtgccgggttggccctggacacttagcctgtgcacagacttagaagttttagacaaagccctctggagttttgtggagaggtagagtaccgtgtcctctcaaggcattaatggtgatggctgcctgctgtgctgtgtgaagtgggcaggtggtaagagattggggccactgcacctcttccctgcaactctcccttcaagagagggtacctcagctcaaacttttccttcaccttgcacgaggtcatcagggacttctctgtttagacatgctagggcgaagctagatggcctcatgaacgctgtgggtcttttctcatattgcggtgggcactggtgttaaactgcttagatataccttacccagtgtgacctcgggtgagttccctaaccttcctatgccttagtttcctcctctgtgagatgggaacaatactaggattccttcgggtggttgtagtgagcatgagaggagctgatgcgtggaaaataccaaggacggtgcctgaggcagtgttcccttcgccttcccctccatttctgctgctgagatccctcagttagcagtgagattacccctggagaagcgcgaggggaggcattttgattaaaaagtccctttcttctgctcttctgctgtgtctttctcatgtgattcatccactgacccctgccatttgagtgttgctatgatccttgccctctgatgggacgaacaccttggaatcaggctgtccctgggacctcaggctctaggaacttgaccagtgagctccccctggaaatctgattcaggctggcattgcttttgtgtgacaggctcactaaggatgattacttaacgcaggtcttgagttctttcttttgtattaatgttttggagttgttatctcccttttgtgtttctggaaggcctggagtagtttaaggggtttagttatggatcacagaaagcagggaggagtgccagaatggaggctcctgcacttggcatttttagttgctgctcatgatcacttacctgtcattactgtggtggaggcctggggtatatttctgttggacacatctgtccttcggatggaggagttacctccaaatggaaaggcagcaagtgcctggactcagctggagctggagtcttccctgtgttcttggattgaaatcttttgagactgattttatttaatctttgtagtagaggagactctgggccaggtgcagtggctcattcctataatcgcagcactttgggaggccaaggagggtggaccacttgagcccaggcattcaagaccagcctgggcaacatggcaaaaccccatctctacaaaaaattagctgggcgtggtggcgcacatttatagtcccagctactcaggaggcggaggtgggaggattacttgagcctaggaggtcgaggctgcagtgagccatgatcacaccactgctctccagcctggacaacagagtgagaccttgtctcaaaaaaaaaaaaacaaaaaactgtaggttttgaaattgttaaagaacatgacctacctgctaatggaaactccaggtatcctcaagtgaggggtcattggcttccattccagtgtccattccagggtggaccaggcagcctgcctggtgtgaatgagcctgcctgccagcccgagcgcatctctcagctgcttaagtcaccacagtgtcattaacacacactggggggatcccgacctggcaaaaccgggctcacagcgtgtgggtctacactgtgatttacagggtttgaacacagtcctttctagcagctggttttctttctttttggctccaggaaatgtgctaatcccctcacggtgactgaatatggtatgtagtcataatttatattctacttactgcaatcaaagtcccaatggggaacatggggcaggctcacaacagaatacaagagggaggggttatttattatttacaactgcagaggtgtgagtggagtctaggggagctattaatacaaggggcagtgggcacctggggggcagcagcagaactgttcactgctctttcccatgtgggcatccaagtgtttctggagcctagaaggagagttgggtaaagtcagccccagaggagcagtgaccttctgtcagtcaggccatgcagccagttggaggcagctttgcagggaagggggctggggaggacgcactcggaaccttctccgctcctctctctgctctcctgctagggctccccatgaatcaaacccaaccaaaggccagagggcatgaaaggccatcgccttggtttataccaagtcccctggggcagagagcagagaatctggaggggcaaacggaatccctccagcaatcccacctaaaaaataattcagggattcagagagcttgtgagcaaaaagaaaaatgaaaaacattcaaaatcaagcacagaatcaaggcaagatgactctccgaggaacctaatgtgaaatgattactgggatattaatttttgtgttgaacttcctagcagccatggcagaggggaaacctgtgtatagacacatgtggtatatgtctacagaggtcgactagaaggaacagtgccccagatgcccctggggtccacttcacgttcctgtcccagagcttggcactgatgctacctgcatatcttgaatgaatccaggtgcccatcttactagtcagagaagagatgcagtattctaatctgggaaaatgtttgtttttaggtttcaaggaggattttcagatggacgtttttaaaatcctggcagccatcctacatctgggcaatgtgcagatcaccgcggtgggcaacgagaggtcctcagttagtgtgagatgctcatttgttttacttttcctttgtctaagggtcatagtggaactggctcgcagctgacctgcctttgctttttagcaccagatatagtcggcctcctgggtagactggtttaacaggaggcaggcggcaagggtttccagggcttgccttcaaagagtaaagcctcctccccttgcaacagtagaggaggggaaatggatctcctgtgtgcttttcttttattcaaaaagtatgtatgaagcacctactaagtgccacggactgtcatagcatctggggaaacagcagtgaacaaaacaaagcaagaagcccttcagggagcttatgatcaagggtagggaggagacacaacaagcaaatatgggctctggcagctgacggctggcacagaggaaagtaaagcagagggggcatgcagaggtgctgtgtctttcatgtggggtggtcagagaaagactttctgagaaggtggtgggtggcagcctgcaggggatgaagaagcaggttgtgcctgtggatgggggaagaacagcaagtgcagaaacccgcaggcaggagatgtcatttgaaaaacagcacgaaggtccatgtatccagagggtgagtgacagggagggtgtggatgaggccagagaggggagggggattgcagaccacataggaccttaagggcactgggtagttttcagcagaaggacacccactacctccttacacctgcttgaatcagacatcagtggtgctggcttcctgggaatgtattgtaagttttgtgaaagatttctttatttaatggacacaagttaatttgatgtgtgtttcttctatgacatatactatgagtagtgattcttgggggaggggtatgtgtttaattagtctcatcaatgtccatgtaaagaagaaaacaaacacaagtaaaaaatgtttctatgaaacacagaatctgcacacctgtaaagctttgcattaacaataacatgtctgtcctagtcaactcagactgccatatcaaaatgccacaggctgagtggcttaaacaatagacatttgtttcctcaccgttctagaggctggaagtctgagaacagagtgtcagcctggtcggttctggtgaggactttct

SEQ ID NO: 165 - DNA, 32744 bp, Homo sapiens
  source 1..32744: mol_type = other DNA
cggtaaccgcgtcgcagtcgccgaagatggcggggcgaagtctgtgtctcacggtcagttcaactccaggctcctggggagcgtctgggttccggcgactaggacgcctaacttcctttaacttcgggtctgaaagtctgtggctcttttacagagaagcagcgttccagggactccgttcccgccacccgttcagcaaccctctacacctggacccgacctcctcgccttggaggaagaatataagtaagaaattcggcggttgaacttttccttctttctttcatctgaatgaggctgcttacaagtacttttttctggagactggctggatcttcgggaccactcactctgcagcattcccttctcgtcatctcgttcacctgccgtttatcctttctttgtctttgatctgagtagttcgcctgcgtattagaagatatttgaagtgggcgaaaatttagcccaagtaagcatgttgtttaatttaaaacgtagcccaagtaaacagcaagatactgttggaagttatttgggtagcaggaattgccacgaatagttagttcacttgatagtttaggttatttcgcttaatatcaagttcatagagtttaccttgtgtaaatttcctttaggttggtttctaaattgaaaggatgcttcccactgcaatcagaattaccattctcgttcaaatattccttttcttatctgttctcagtgtaattacaactatcctgacaacggtgctttcattcttggcccattctactcctcatccccaagttttcacacagcagccagtgtaatcttttaatttgatctaccatgcctttgcttaaaattctacagtagtttcctgttgcatttcaaaagctctgatcgatgtggctcctcctgcctcctctatttgatcttattccctcttccccttttccccctaaaactctccagcttcactggccttttagttccaaaaactcttccaggttttctttctatctcaggaaagagacagtcacacacgccttcaacctgtaatgtgagtggccttccttgaccatgctaagtaggctcccttgttggtctttttcattgtctcagtgatttttctttctaattagcataatttgttacaataaattcatttgtgaatttcctttttgtctgtctccactggactgtaagttccaagggcagaggcgatgtctgttttatttgccatcatacatacccttataaaaaagtgccttttaacaactcccttccgttttaatataaaataactagattaaaatttggaaatagttggcagtttgtatcagagggttaaactagagttatcgtatgatctacatatgatctataagcatatttgaaattaaaactgaaaggtactgtgtttaggtgaactatacacagaccaatttaccacagcaagtaggaagataatcatatcttcttctctctgatgaaatgggccgattatcccagttcaaaagtgtacttaagcaaattaatctgttttctatatatagttctttatcagctatgcctcaatcaaaacggttattttcattatcattaaccatatagtattaaatacctggattaggtttatttgttcagttatttgagagtgtattttgcacctggttctggtgcatccttagggatacagtcctgcttaaaatgagaaatatacagggactattattgtattctagcacgagttactttataaaacgagatagctaaacagtattatatggtggccagttgttacttgttctgttatctgtactctgagttgtgcacatctgaagcatatgaacagagtaactccctacactacctgaatcttctagaatacttctgtgtcatgtagaagagtaaaatgtctggccatccctgtaagcaagaatatgaaattataacagtatggtatctgttttgccacctgttgtcttggcattgatcattagaatgctacttcccagggacctcaatccaaaaccttttgcagttctgcttctgttggaggaaataatcactgtccgaaaggatagactaaggaagatgctaatcgctcaagtggatagatttttcaagcttcattcctgtattataataccagatagctaaacaataagataacataataactggtagggcaagccccctcataaatcgcaattacattggatttacagattaatttgtagagaactgacttatttatgctattgaattttccacgaatatgatacttctccatttatgggtttttacctttaatagtgttttatcattttactacataaaattcttgcgtatataatttgcttcaaggtactgaatagttgctatataataagtggaattttttctattttctaattggttataaatgtagaatttttagatgttgatgctacatctgcgtttatatacacacagatcttcagtcctgctgaactctcttattcattctgtgaattcccttggatttttgatgaagacaattatatgcaaattttgatcattttgtcccttgataattctcctacattctctctttttctctgtttaggacttcccgtgtgatatggaatagaaaaagtgatggtgagcttccttgtttatgattttgagaagcccacttttaataatcactacatttgaggtttgctctagggttttggtagattctttttattatgtttaaaattcttccccttaattcctaatttgaatgagtgttaaatgtatcaaaacttattttttccctaattaattcagctgttggtatgttctttttccctcctttaatgttttaacatactgaactacaaaggcaggtttcttgttttcctttaaagactgctagatttgattgctataattttatgtaggttttttgcatctatgaacaaaagtgaaatgggtgttgtagtttttctctacttcttttcctttctgtttttgatatcagtatcattctgtctgtatgaaagaagccgaatagttttccttttttgattcttttcttggaagctttttataattagagattttctgccctttgattaaaattgtgaaactgtctgagtctagtgttcttttattcaaggggattctttttgtctatgcatttagcttctttaatgattagatgtactatttctagaatagtttttggttatttctaaaataattttttgttctagaaaagtgttcatatcatgtatgttttaaaatacattagcataaactgagtctatggtggtatgtttgaaatcttgactgtatccataaccatgtacacccctccttttggtagctttccaatattgtttatttttgtctttttctttttctatcaagcttcctgggagatttatctgttttattggtcttttcagagaaccagctttggttttcttgctaatctgtgctattttaaaatttcattaatctttacagaaataaagacaaatgatctcttctaactggggtggattaattttttgttttttagtttatttacctcatttattgtttttcttatttcttaataaatatatttagtctttaaatttctctccaactgtaggttaactatattccaggacttgttttgatgtatatttcttttatggttatttagttctaaatattatacgattttcatagtaattatttagaagtgtgttttttagtttgcaagcacatagggttgtttgtttactgttgtctagtttttatttttctgagtatgtatgtgacaaggtcttgctctgatgtccaggctggagtgcagtggtgtgattatggctcattgcagcttccacctcctgggctcaagagttctcccaccccagcctcccgaggagctgggactacaggcgcatggcaccatgccatgctaatttttttttttttttgagacagggtctcaccctgttgcccagactggagtgcaatggtgtgatctcagcccactgcaaccttcatctcccaggctcctgagtagctgggactacaggcatgtgctaacatgcctggctaatttttgtattatattttttgtagtgatggggtttcgtcatgttgcccaggctggtctttaactcctggtctcaaatgatccaccttcctcggcttcccaaagtgctggtattacaggcccagcctagtttattttaaattgcattatgattagagaattgatgtgatattaagtttttaaatgtattgagacttatttgtggccaagtgcttgttcactttttgtaaaagttctatgcgttctttgatagaaaatgtatttattatttgttggctaatctgttttatatttgttcttcatgacatcggtatcctcaccttttttcttgttgcagctttattggtttctgttagaagtgtattaaaaatcatcaattataattatagtttaaaaaaattccttataatgtggccatttttgtttgggaatatcttgtttgacttatttaaatcttcttgattcattattatgcagtgtctatctttcttcatccctttatgttcaaactttgtatgtcatttatcagtaagagcattctttttataaccagtctgataatttctgcctattaataagtgaatttaatatatttacattattacataacttgaagttgtcttagccaccttattttttatattttctattatgtcttgtctttggttcttgtctgtcttctgctggattgaatgggttttcattatgtctttatttttagtgatgtggaaagacgttagaatgctttaacttggtgtcctctgtcttttaaattagataatattttactttgttgttttgaatacacccacacccagttaatcatcaatttttttatagtctgtactaatttagatttatcatgttttcagatatcttcataattctttttttccagattcaatttcctccttcctgaagtgtagaccctttattactttttgtgaaaacctgagtcttaaactctccagtctttttgaaaattgttactttgcatttattcttcaattacagtttatctgaatgtaattctagatggccagcttttccttctcagcccattaaagatatccttatattgtctgttggtaatataaggatagaaatgttagaatgtcagaaatgttaatgagccatctgctgtcagctttttagataattatgctggtagactatttttctctgttgttttgaaataatgatttggtagtttagggagtactctctttaaaattctgtattttcactgtgatgtatacacaggtggatttgttttctttattcttcatgagatccatgtcttcagtttgggaaattctcagcattagctcttgaaatactgtcattctctcctcttgggatttctttttttctcttttggagacagagccttgctctgttgcccaggctggagtggcagtggcacgatcttggctcactgcaacctccgcctcccaggttcaagcgattctcattcctcagcctccccagtagctgagattacaggcatgcagcaccacacctggctaatttttgtatttttagtagagccggggtttcgctatgttggccaggctggtctcctggcctcaagtgatcctccctccacctcccactgtgctgggattacagatgtgagccactgcacccaggcctctctgggatttcttttataacttctgttaagtaggaacataacatctgtcttcaatggatgttaacctgtcttttgtgtttttatccccttgttttctgtatctccttgtaggtgatttatttatatctgtcttctaattcactcattccttctatgcccattatgctgttcaacatatctgtcaaatttccttgagttcttaatttcagtgactgtgtttttcatttatgtaatttatatttggatctttttcaaattcagcattcttttatgataaaatctggctcttgcctaatgtttttctaagtgcattttttttttccaaattaatgctaattttaaaatctttttttaattgttatattatctcttgttcttatagtataaattttccctttcctcacatctgctgattctctctttcagtggcttgtttctttatgcaatttgttacctttctgaagtcatctttagcagtttgctttttgagagagtcctatatattctagatgagtaaatgttcctatagggtggttttcaatttacctttactagtttcgagttttgattgattccacgtcagctttcttctattttaaagtttttccatggtgtccttgtatcacctagataagatgaatttggacttccctcttgtttgttttaattactcacaagagaatcttttctacctgtggttctagtttcatttctgctcacctaaggttgtgggtagaatttttgtagtctgtgtttcacaggtgtatcccttcatgactcacatacatcagcttctagcttttaagctattttggcttctgttcctgtttgttgctctcactttgaattgctgctttattcttagtaccagggcatttcccttgcctgagtttgagcttagcaatatttcctccattacattttatctggcatttccatggatttagagtagcatagtcttctcagtcatcttggtccactatattaattggaaacttaatccttgtgattaagtccttgttagggaaatttgaaaaatcaggtaatggcactttaaaggcacctttaagtctttcttagatatttttcttttgaccaggtaatcctaagatataaaaatatttcttaaagcttcagactgttaaaggatatggtactaatctccccccctttttttttccctgggggtggagatggtgttttgtgttacttctgaatcccatgtctaagaaaaacaagatatctaatttttaaaatccttaacatgtctccttcacaaaacctcagaagatcctaggtggtctagaaatgtgacatctcaacaggagaaaaaagttatatgcttttgaatatatttattatggtgttaacctttaaaagtgaaaaggggacttaacaatagggacagagttcagtacattatcttaattgcaatttaatcgtatagcagtttaacatgcttctaaagattacgtgaagatagatattccttttatattgctgtgggaaaacagtacaaaattgtgtgtatgctatagatgaaaattggaagggaatattaaaaataaaaatggatggtggtggtaggattatgggcagtttttcgtttaaaaacaatttttttcaataatattgtcatccttgcagtcttaatataggaccaagtaaatagtatttctattcttgctagattccaagtagaatgaaaaatcataattaaaaaaggagtgacaggtagaggtcaaaatagtcacctttatttccgaggaagcttgatattaaagtatgtatctgaggtgtgagccacgttgggtctgctcactaaacctcacatttagctccccagttatagcaataccccaaaccagagcaggtctcccccataccgtgcccacttctgcccacattagagcagggcctgtctctggagaagcaaggttagaatttgcattctttgcaggtaggctaataacgaggaggtggtgagtggaacagagttgaactcacccagcttattcttcccaaatatattagataagttacgtcacttgaaattaatagagggccacagaaaggctaatacttagtgtttgagttcctactacaaggaaggaggaatcatggggagttgaggataagttcttaatggctgtgttcattttagagtaagaatgccatatgtatattttggcatttgttgattacgtcacttgataacgtgtaattgctgaagtttattttttatttttgttaagatcttcagtatatcccaattattttctgcttttaggcgtttaaatgcagaattgcaggcaaaaacagctgacgtggttcaacaagctaaggaaataatagtaagtatatgtacaattattaataattctatataaatgctagttttttatctttttcatttgatatatgacatatatacaaaacactagccaaagcatgtgtgttcagttcaatgaattattacaaattgaacatgaatatatatgcataggtataggaatgtatatatgtatatgtttttagtaagcacacattttctaaaagccactgaaaaagtactttccatttagattctccagtcatctaaattctcattataaattctcattattaattgatagaatagagcaactctccttagaggagtagtctactttaaaacttttatcagttcttagttaattttgattcttactttctatcctccctatgccccaaaatggagttgatggaagcagggaaggaaacctaggcaatattttatcttcatgccttatacaaatccatgattatttgttagtttaggaataagaaatgtatcatatataacatttcaagtaatatattttgataatggttacagatttgtattttataatttataattagatgttttactaaaaatatttataattaaatttatacttatatgttttactaatttataattaaatgttttactacaaatatttttatttcatcttttagtttttgccagtgtctgaaaagcaggaaaatacttgtacaaaaggaccccacgttatagtagaatgacagattcattacgttttctactcagagagccctgtaaaaagaatctccccctgcaaataaaaaacagaatagaaaactgggataagctaggaaaggggttggggaatggattcctacccctgcagaagcaaacaatataaggtttctcatatttaatttttatttactcactttctctttttaaaatttttaatgtttgtggttacatagtaagtgtttatggggtaaatgagatattttgatacaggcatgcattgtgtaataatcacatcatggaaaatggggtatccatcccctcaagtatttatcctttgtgttacaaaaaatccaattatactattttagttaatttaaaatgtacaattaaatgattttgactataataaacatgttgtgctgtcaaatactaggtactattcattctttctgactatatatttttttacctattaaccatccttatctcccacccctgcatcccccattacccttcccagtctctgataaccattcttcaactctctatctccatatgttaagttgttttgattttcagatcccacaaataagtgagagcatgtgaagtttgtctttttgtgcctggcttatttcactcaatgacttccagttacatccatgttgttgcaagtgacagggcctcattattttttatggctgaatagtactccattgtgtatatgtatcacattttatttatcgattcatctgttagtggacactttggttgcttccagatcttggctattgtgaacagtgctgcaacaaacatggaagtgcagatatctctttgatatattgatttctgggtcaaatggtatttctagttctagatccctgaggaatcgccacactgacttccacagtggttgaactagtttacagtcccaccaacagtgtaaaagtgttcctatttctccacatcctctccagcagctgttgtttcctgactttttaatgattgccattctaactggtgtgagatggtatctcattgtggttttgatttgcatttctctgatagccagtgatggtgagcattttttcatgtgttttttggccgcataaatgtcttcttttgagaagtgtctgttcatttcctttgcccactttttgatggggttgtttgtttttttcttgtaaatttgtttgagttcattgtagattctggatattagccctttgtcagatgagtaggttgcgaaaattttctcccattttgtaggttgcctgttcactctgacggtagtttcttttgctgtgcagaagctctttagtttaattagatcccatttgtcaattttgtcttttgttgccattgcttttggtgttttagacatgaagtccttgcccatgcctatgtcctgaatggtaatgcctaagttttcttctagggtttttatggttttaggtgtaacgtttaagtctttaatccatcttgaattaatttttgtataaggtgtaaggaagggatccagtttcagcttatacccaaaggactataaatcatgctgctataaagacacatgcacacatatgtttattgcggcactattcacaatagcaaagacttggaaccaacccaaatgtccaacaatgatagactggattaagaaaatgtggcacatatacaccatggaatactatgcagccataaaaaatgatgagttcatgtcctttgtagggacatggatgaaattggaaatcatcattctcagtaaactatcacaagaacaaaaaaccaattgctgcatattctcactcataggtgggaattgaacgatgagaacacgtggacacaggaaggggaacatcacacactggggactcttgtggggtcgggggaggggggagggatagctttaggagatatacctaatgctaaatgacgagttaatgggtgcagcacaccagcatggcacatgtatacatatgtaactaacctgcacattgtgcacatgtaccctaaaacttaaagtataataataataaaataaaaaaaagatatattgatttcccctcttttggacctatacgcagcagtgggattgctggatcatatgataactttagttttttgaggaacctccaaactgtttcctttgtagttgtactaatttacattcccaccaacagtgtactagggttccctttctctacatccttaccagcatttgttattgcctgattgcctgtcttttggatataagccattttatcagagttgagatgatattgtagttttgatttgcatttctttgatgatcattgatgttgaacacctttttttatgcctgtttgccatgtgtgtgtttttcttgagaaatgtctattcagatcttttgctcatttttaaattggattattagattattagattttttttcctatagagttgtttgagctccctatattttctacccttgtcgatgggtagtttgaaaatattttctcccattctgtgggttgtctctttactttattgtttccttcactgtgcagaagctttttaactttatgtgatcccatttgtccatttttgctttggtgacttttgcttgtggtgtattactcaagaaatctttgtctactccaatgtcctggagagtttccccaatgttttcttatagtaatttcatagttttgagatcttagatttaagtcttcaatacattttgatttgatacttgtatatggcaagaggtaggggtctagtcttcttcttctgcatgtggatattccgttttcccagcaccatttattgaagagactgtcttttatccagtgtatgttcttggcaaccttgtcaaaaatgagttcactgtaggtatatggatttgtttctggattttctctattctgttccattggtctgtgtgtctgtttttatgccagtactcagatgttttggttactatagcaccatagtataatttgaagccaggtaatgtgatttctcaagttttgttctttttgcttagggtagctttggctattctgagtctgttgtggttccatataaattttaggattgttttttctatttctgtgaaaatgcgattggtattttgcaaggggttgccttgaatctgtagattgctttgggtagtatggacattttaacaatattgatttttctaatccatgaactggaatatctttccatttttttgtgtcctcttcaatttcttgcattgatgttttatagtttttgttgtagagatctgttactgctttggttatgttaactcctaggtattttatttgtggctactgtaaatgggattacttttttatttattttttagattgttgacatacagacacactactgatttttgtatgttgatcttgtatcctgcaactttactgagtttatcatttctaatagtttttggtggagtctttaggtttttccaaatataagagcatatcatctgtaaatgaggttaatttgacttcttccttctgatttggatgccctttatttctttatcttgtctgattgctctagttaggacattgagtactatgttgaataacagtggtgaaagtaggccagatcttaaaggaaagacggtcagtttttcccattcggtatgatactagctgtgggtctgtcatatatggcttttattatattgaggtctgttccttttatactcatgttttgaagtgtgtttaccatgaagggatgttgaactttatcaaatgcttttccaggatcagttgaaatgatcatatggtttttgtccttcattctgttgatatgatatatcacattgattgatttgtgtatgttgaaccatccttgcatccctggggtaaatcccacatggtcatgacaaatggtctttttaatattcagcaaactgaattctgtttgctagtattttttgaggatttttgcatcaatattcgttagagatattggcatgtagttttctttttttgatgtgtctttggttttggtttcagggtaatactagcctcataaaatgagtttggaagtattccctcctcctccaatttttggaatagtttgagttggtttggtattagttcttctttaaatgttcgatagaattcgcagtgcagccatcaggtcctgggcttttctttactgggaaaattttttattgtggcttcagtcttgttacttattattgttctgtttagttttggatttcttcatggttcaatcttggtgggttgtatgtatgtgtctaggaatttatctgtttcctctagattttcctatttattggcgtatagttgctcatagtagccactaatgagcctttgaatttctgcattgtcagttgtaatgcctcctttttaatttcatattttatttatttgggtcatctcccttattttgttagtctgttaattttgctcatctttaaaaaaaaccaactttttgtttcattgatcttttctttatttcaaattcatttatttttgctctgatcttcatttcttttcttctactaattttggtttggtttgttcttgcttttctggttctttaagatgcattgctggctggatgtggtggctgatagctgtaatcccagcactttgggaggccaaggcacgtgactcacttgaacccagaagtttgagaccagcctgggcaacatggtgaaactccatctctaggaaaaatacaaattagtcagatgtggtggtgcacgcctgtagtcccaactacttgaggggctgaggagggaggattgttgagcccaggaaggtctaggctgtagtgagccatgatcatgccactgcactacagcctgggcaacagagtttctctctatctcaaagaaacaaaaaaaaaaaaagaaagaaagaaaaaaaaagaaaagaaagaaagaaaaagaaaagatgcattgctaagtcatttatttgaagtttttgttcttttttgttgtaggcacttacagctgcataaatttccctctcagtactgctttcactgtatcccatagatcttggtatgttgtgttttcattatcatttgtttcaagaaatttctcagtttccttcttagtttcttcattgacccattggtaatttaggtgcatatcatctaatttctatgtctttgtatagtttccaaagttctggttattaatttctagttttattccatgtgatcagagaagatgcttgatattatttcagtttttaaaatattttacaacttgttttgtgacctaacatatggtctgtccttgagaatgatatacatgctgaggagaataatgtgtatctgtagtctttggatgaaatgttctgtaaatgtctattgggtccacttgttctgcagtgcagattaagtctgatgtttgttgagtttctttctgggagatctgtccagtgctaaaagtgggtgctgaagtctccagctattactgtattgtggtctagctctctctttagctcgaataatatttgctttatgtatctgggtgctccagtgttgcatgcatttatatgcaatcattatatcctgttgctggattgacctctttagcattatataatgaccttctttgtctcttcttacattttttgttttgaaatttattttgtctaagtataggttctcctgctttttttttttggtgtagaatatctttttctaccctttttattttcagtctatatatatatctttattaagtaaagtatgtttcttgtaagcgacagatcatggggtcttgttttatcatccattaaaccagtccgtcttttgattgaagagtttagtgcatttacattcagtgttaatactgataagggccttaatcctgtcatttcattatttgttttctggttgtcttgtggcattccttcctgtcttccttttattgaaggtgattttctcttgtggtataatttaatttcctgatttttattttttgtgtggtcattgtatgttttttggcttgaggttactgtgaggcttgcaaatactatcatataacccattgtttaaagctgatgacaacttgacgctgattgcataaacaaacatgcaaaaagaaaactaatacaaactctacactttacttttatctccctagtttttaacttgttgttactgtttctgtcttactgtactgtctatgagttaaaaagttgttgtagttattatttttaattggctcatcatttagtctttctactttagagtagtttacactcaattacagtgttataatattctgtgtttttctgtatgtttactattaccagtgacttttgtaccttctgatgatttcttcttgctcattaacatccttttcttttagattaaagaactgtctttagcatttcttgtaggacaggtctagtgttgatggaatgcctcaacttttgtttttctgggaaggtctgttattatctttcatgtttgaaggatatttttgctggatatactattctaaggttaaaatctatatttttttcttcagcactttaagtatgtcatgccactctctcctggtctgtaaggtttccacggagaagtctgctgctagatgtattggagcttctttgtatgttgtttgtttcttttctcttgctgtttttaggatcctttctttatctttgacctttgggagtttgattattaaatgccttgaggcagtcttttttgggttaaatctgcttggtgttctatagtcttcttttacttgaacattgataactttctcaaggtttgggaagttctctgatattatcccttcgaataaactttctacctctctctttctgcctcttctttaaggccaataagtcttatatttgcccttttgagcctattttctagatcttgtaggcatgcttcattcttttttcttttgtctcctctgtattttcaaatagcatgtcttcaagattactaattcttctgcttgatcagttctgctattaagagactctgatgcagccttcagtatgtcagttgcatttttaactccagaatttctcgattctttttaattatgtcaatctgttcgttaaatttatctgatagaattttgaattccttttctgttacttgggtttctttgagctttctcaaaacagctattttgaattcactgtctgaaaggtcacatgtctctgtttttccaggattggtctctggtgtcttatttagctcatttggcaaagtcatgttttcctggatgatcttgatacttgtagatgtttgtcactgtctaggcattgaagagttaagtactgtagtcttcacagtctgggtttatttgtgccagtctttcttgagaaggctttccagttatttaaaggcacttgggccccctgcccaatatcactagggtttttgcagacttgtagaggccttggtggtcttggataagatctgaaagaattctctgggttaccagacagagactcgttctcttcctttattttctcccaaacaaatggagtctctttctctctgtgctgagctgtctgaaactaggggtgtggtgatgcaagcacccctgtgcccagcaccactgggattgtgctccgtcagacctgaagccagaacagtactggatgttgcccacaacctgctataaacactacctggctaccacctatgttcactcaaggccctagagctctacaatcagcaggtgatgaggccagccaggtttgtgtccttcccttcagggtagcgagttcccccaggccctgggtgggtccagagatgctgtctggtagtcagagattgaagttagaaatcttagaaatttatctggtgttctagtgttttgtggctaagctggtactcggactacaacataaagtccttcctgctgttcactcccctttccacaggcagaggagcctctccttgtggtcaccaccaccaccagtccatagcagggttctgccaggccactgctagtgttcacttaaagcccaagggcttttcagtcaggtcgtggtgaatgttgccaggcctgggactcacccttcaagggagtgggctcccctctggccctgggcaagtctagaaatgctgtctaagagtcaaatcctggaatcaggcaccccaagagtccacgtggtgctctgccctgctgtggctgtgctagttcttaaggtgcaagacaaaggcccctttacttttccctttgctttcacaagcagaaggagtctttcactgtagccactacaactgggaatgtgctggatcacccctgaagtcagtatgtctcagagcccaaggcccatggcctgctattaataccttggtattgctgctggttatttggggcccaaggtccctttatttagcaggtgatgaatgctgtcagaactgggtccttcccttcaaggcagcagattccctcttggcccaggatgtgtctagaaatgtcatttaggagctagggcttgtaatggtggctgcgtgactctgcctggcaccctgttggctgtcttccatggccgaggtggtatccgagatgcaagataacatcctctttactttttgttctcctctccttaaacagaaggaatgagacacttttgttgctgtgaactgcactgcctggtgttggggaaggcatggcataagcaatcctttagtgccctggttggtgttttcctaggtcacaattggtgtctccctaggtgccagcctagtcctctggctctgagtcaagcccagcactaggatttgcctagaaaatggagccattgtatcctagactgcccttcaagtttacctaggaccccagagcactttggccagtagtggcaagacttgctgacaaactggagttctgacccacaggatgggtgattttcctctggctatagctggtccagatgcttcctccatgcatgggtactcaaagtctccgccccgcatgactttgctctccactctgacagggcagcactgagttcaatgcacagtcgcccagtcactgtgctgtccctcccctaagtgcacagactcttcaggctgcacagccactgcaggagtgagtcaggaaggggtggtgtcagctttttaagtctctccaaccttcttcaatgcctctttcaatgatatgaagttaaaaccaggtactgtgtttgctcacctgatttttggttcttgtgatgatgtttttgtgtgcaggtagttgttaaaatttggtgttcctgcagagggaatgaatagtgtaggcttctattccaccctcttgcctcactttcatttcttgatgtgtctttgccaaaagcttttacccctgatacttcacttttagcatcttcacagtcttctcaacattgaagtttttcctgatttgagacaaatttttctacccatttagtgaatttattttttaaatttcttgtgcctccttctaatttctgctgtatgctgtataagctggaagactctaaagggctggggaaactggagttagaaatattatgtaaaggccttgatattcttacattttccccttaggatggaattttttaacccagaacaaatgaaaggtgcaactagtgttatagaccttatcttcatactatagcatttagaattccgtgcctttatgttatggaaaccttggacaattctgaaatgatgaatgttcagagaggcacttgaatatatcttaatggtttggttttttttctatatgatatattacctatctttactcatttaagagagatcggcaagaagtacgatctaggcctgtttcaacacaaatgaaatcatgtgatgacgaagatgattacagtttaaggtaagtatcttaaattctcaagcaccttcttttaaaaggatgtacatggatcgttatgtaagatcttttttgcatgcaaacattgaaaaatctataatttgaagaataatgtatatatagggggcttataccaatcagacacagtgcaagccctttatctcatgtaattttcaaaatattattttgaaatgtatattcttgtcctcatttttaaaactttagagaggaaacaggaaaagtacataatcgatgtgaataaaactatgaaatcatattgtagcagacggaatgatgatcaccaaacattccaagtctcttacagttgtcattgggctatgaacagaagtttagttaatctcttccaagccaaaacagacaaaaattggtgtgtggacctccaaatgactttccagccatgaagatgagtaaaattccaattggtaaaatctcctagcctggtgtctgggtgaccgtgtgtggaccatgtagaaaaaaggatctttcttcgtcactactgctgcattgaatgggttaagccactggaatttttaggttactatcctgcttatctttgctaatgttgaaattggtattgggaatggaatgctgcataacaaaaattcagaagtgtggcattaccttagcagttaggtgggagccagcaaggaaactgatattggaggctggaaagataaaggattaatattatgtagtggcaatgaatttagtaaaactatcatctgtggtaaattgggaggcacaacaggtgtctaatgaacttgttctctggggaaagaggctgaaacacaatatcaacagtatgtcctgttaaagagacaagtttgggaaacatttggctgatttgtaagcagaaataaaagggaatacctgattatctaattcagagtcacaaagatttacgaccatgatttctttgaagagctttatggttttaactcttagattcaggttctttgatccattttgagttaatttttgtatgtggtataagagtcaacctccattcttttgcacatggatagccatttgtctcagcattatttgttgagaagactgttctttccccattgaatgttcttagcacttttgtcaaaaatcagttgactgcagacatatggttttatttttggactttcatatctgttccattgatctatatggttgtcattatgccaacagcacactcttgattacccttgttgtaactgtggagttgtggagtaagctggttttagacctcaagaattacaaggtaaaattgagaaaatctgtaaggaacaaaagcctatcaaaattcaaccttgagacaaatatcagactaaacatgtggacttcatgactactgatacaatttttcagtggattaaggctcctcaatgcaaggatcagattaaatggcacatagtgaaacttttcatttgggtaaaatggcccatggcaaagacctaactaaagttatagtctctccttagaagcttgacagtgttaaagtaacccatttttaaattgagaaagagaggtcaggtgaagaaataaataaataattagtcttggaaagaattgtaggtgatgtaatggcatgtagaactggctgaaattaaatagggaagaaacccactagtttgggggaaagttttatcagcaaagaaactctaacaatggactataattatttctggcttttaaaatattaaaacaactatgggtaccccgccttccagtattctaagatcaagaagtaggctataagaggtgcatagccctacagggtttagagacaaaagagaagcttattactgacatggcagtatatttggctcatgtgaaatattgggacattattcatttattcaaaaataattattgcatgcgatccagtatttcccttcctagatatttacccaagagaaatatagacatatatccacgaaaaaacctgcatgtgaatttttagatcaattttattcataattaccaaaacctggaaataattaaaatatttatcaattggtggctggataaacaaattatggtatatccatgcaatggaatactacttggcaataaaaagacatgaactactaatagaataacaacatagttgctaagtgaaagaagccaggctaaaaaacgtccataatctatgttttcacttatttgatgctctggaaaaggcagagctttagggacagaaatcaaagtggttgtctggggcttgagtaggagttaggggactaccaaggaacacaagggaactttttgagatggtggaaatactctctgtcttggtggttgtggtggttatgtgaccatatacattagctaaaacatattgacctgtatatgtaaaaagagtatattgtgtgatgtatcaattatatctcaaacctgaaaaaaataatttttgaacactgttagtgccagttctagctactggtattacagtggtgagtaaacagacctgatcttgcttccaagaagttaatatgtgttgcttttgagtattttttaagtacatcaattacacatttttatattttgatagacatatgtatgcgtacatataccatgaaaccacttatctttattatatgtaatactgtgatattctatgaaaaatagatatttaagttatcaaaattccaaactttggattatacataagattagacatgatgtttatccagtaaactaaagaactgaaatgatgctaacaacagatgatgatgttgtgatgatgacgctctgtttacctatcagtttttttttaatgcaactgtttgaacagatggcttttaccatgtaaaacatggcatttgttgatcagttgggaattcctgaatatgggagataattctataaagaaaccattcatttcaggttggaacaatgatattccacctaaataattataattaggaagaatatattttaataggtcttcaacacccaggatgactctgtcaaaaaatgtgatgggaaaccagagtttaatttcctaataacgtagtatacgtatcctccagtctgcttgaagcatggtttaccatacagttatttccatcatattacaaacagacatttcatggagttaaacaaaagtaagaataccatactatagcttacttttcatgaaaatacactagcaaagtaatatcactgtgaaatctgatggagacagataacccttaaatgtcttttggctgatatgtatgcatgtatgttggggaatggaatgaaaggtacagaaaatgtactaaaatgacaaacattaatttaaaatgaggaagattaaagaggacacttaaaatttgtataacatttggaaacattttcatgtcatttgtgagaatgatttagtttctgtaatttttaacatattttgaaagcctttttttcttcccagaggtatttctaatagttaagaggtttatttatctaagtatatctttgtatttaatatgaaaaaatttatgcatggctagctaagtgggaggcatctgatggaaaataattttagttgtatgtcttctccaatggttaggagttctcaggggatatagtggagttttttcatagcaataatggatgctaacatggtatgttttcagagatataaatacaatgcccaagacaatgggttaggcaaactttttctgtaaaggggcagatagcaaatatttttagatttgtgggctgtatagtctgttgtacctgcttaactttaaggttgtagtgtgaaaacagccatagataatacataaatgagtgagtgggtggattcagcctgtgggccatagtttgcagacctccataaacactccttgtttgaaactacaaatatattttgaaaaccttgtgtataaaaatgaattgcattttacgtgtatttattcatgcactcaacaaatacttacgccagtagtacctggcatataaacttttaaattgactaggcatagaatattgaacaaggcagacgtgatttctaccctcatagagttcacaatataatgaggaaaacaggcactaaccaggtgttttaagtggattaaaagaacagtaacattgagtgggcttacaataaaaagccctgtggtgaattatttgtaaaatgggtaattgctgtggatagcccacaattactctttatgatttccattcattaaaatttttgctacattttcctactagaatattggcattatagtgtatcttctcaaaggtgaattatttaaccaaagcatttttcttgtttatggtactcattcaaaataaattaacatgtgggtaactagaattatagcaaagtctgtttgattgttgaatattttccctttcaaatataattgttgaatttcattgtctcagctcagtgtcatctattattaatgtataatgtttatttttggcctgtagaggtctgttaccatctgaagggatagttcatcttcattcagaaactaaggtatgaaatcaaactttctgtgaatgcaattatattctgtagaactccggatattttttagacttttcttagacaaagcagagaaggggtatgactcaacagaaatagaatatgaaccttgatactcagagggatgcatttgtgaagtgtccctcataaactaaatggaatcctttgttgtctcataatttcactgaataatttggaggtatagtggaaaaaatgttaggtgaaatgactttgtaaactgaggcttatttttttttcctgacgcttaaatctagtagagagaagacttgaaaaagaatgatactcatatacaaagaaggtgatttgaaaagtttgtttgttcatttaaatagtgacagtgtagagatcactcttccaggtgtagaacatagtgggatctatgtttcccatccatggagacctaagccaagggaactgtatacctgaaggccacgggaggtctgcctggggaataattggttcatgaggagaactaaattctgtgagtcagaacgtccagatttattcatgacattccactggctagctgaataccattgaatctttaggactcattttccttatacttgaatttcttggttttggtgttatctaggtcttttccagctatacagttgtgatattcttgaaaacacatttttggtaattccatgaaaatagcaaatagcagtttttctgtgtagcaaaattctatgtgttacagaattgctttctttggcaaatgattagactctaattagtcaatactttcaattcttttcatgtagccaaagaccaaaaacattgatcctgtaaacaaggttcaaaacaaattacactctgcaaataaaggaaggaaaacaaattcaaggtatagtatagttttcaaagtatttctttttttttagttttgtaattcacaataccatcattcttaattattaagctctgtttgtttttccagatctttttacaccctaaacattaagttacaccacatatatcttatccacattcagtaatttagaacattttctactcaggaatgttttgcagcagttaacaaatattttatattgttctcttaagcaaaattgctaaatctaaaatttttataaatgttatttctagtgagttattctcttagaactgtgactacaactgggttttttttttaatctctgcctagttctcccaaataggctcaatagtgtagtttttgagtatttgacaaaatgcatatattattttgtctgttgagctacagaatgatttggcatgctctaaataggactataatataattataatttacattttgttgttttgggtgagaaagaattcaagacggttcttagtattataagcataaaaagggacccaagatgctccctaggataggatgccttctagaaaaggtggaggattgggttgcaccaaccatcttcagtaagttattaaatttatttgtctattacttacccaggctgatcattgtattgtaattctggaaaaatctttgttcacttttgtgtcttaattgtttaaataactttttttttttaataaaagggatggaaaaaatagagtgaagtgataaggaacagaaattaactatacaatagattgaagaaaagaacatacatgccacatacatgcatatataactggaaagggttatcttttcagacttcacatttttttaaaaaaagttgatttttcaaatagaattctgaagatcaagacctactatttgatagcacaatagggtgacgatagccaataataacttaattatatttttaaaataaagagtgtaattagattgtttgtaactcaaacaatgcttgaggggatggatacccccttctccataatgtgctcatttcacattgcattcctgtatcaaaacatctcatgtacctcataaatgtgtatacctactgtgtacccacaaaaaattaaaatgaattgtgaagcctttgcttatgttttaaaagtgaacttggctttcagaaccataaatttgttgatgtgtcaatgaattaggcctggactattcctcagtgcctttagaaatgagtttgattttgtctgtcttctccttttcattaaaaaaaattcacatccaactttttggttagtattgattgtggttaagaatgtgtttctttgggtggaaaaaatgttgtttgattgagctattagctcttcactctgtaattctttctcaaggggtatttttctttgctgtttgtagaattatggccaggatgatgtcagtttgtacagtttttctctagaagcgtgtaaatttaaaagtcataggctggatttgacctaggaggccaagtgcaatactcttagttttggtattgccttatttggaagcaaagtctataccatctggcctcataaagccttctctagctctgtggtcacatgattcataaaaaccaaaaatctgctaagtctcttgtaatatagtccttgaaagtatcacatgtagatttcatcataaatttaaaatgtgtaatagtagtctcttgtaatataatccttaaaaatatcaattacagatttcatcataaatttaaatttataataattttgatctgcttatttgggtaaaaggcatatatcctgtctacctttcctattttgttcatatgtacgtatatacatacatatgtatttaatttttattttttagtgttaaattgaaatactctgatgtccaaactgccgacgatgttgccattccagaggatttctcagacttttcccttgcaaaaacaattagcaaaattgaagggcaactggaggaagaaggcttacctgaatatatagatgatattttttctggtgttagtaatgacattggaacaggtagattttctttagttttttatttttatctttatagcacagttacttagaagaagaaatcttggggaactatttcttccatttaaaaaaatgtattgtgatgtcttggtttgtttcagaattatctagtaggatgtggtggagggaggaatgaatgggattatagattaaataaaattggccatgggtcagtcattgttaaagataggtggtgggtaaatgaggttcattgaactcgcctacttttatgtttcatattttccattataaaaagtaaaaataaaaaagactatattgtactgatttgattgaatacatttcaacttaagttaaaatacccattgcttattgttaaaatattaaaaaagtttttctgaattttttcatttactgttaatatattttatttattgcatgttaaatcaacacatgcaaaaggacaaatgaattgacattgcatcaggtaaaacaatcaaatgagtgttctaatgaatataatttttcttcttattaactcattctttgcatatcactagaataataatactaaattttgatcaactgaaaacattagtaaatttatgaggagcctcctatgctattgaaacaaaaaagtaagacaattgagtatatatgaactagttactgctgaactataatacaattaattgtgactacaggcaagccacttagcccctctgtaatagcagtttattcatttgaaaatttagtagtttgtattagatgatcattaagtttatgtattagtctgttcctgcactgctataaagaaatacctgagactgtgtaatttataaagaaatggtttaattggctcatggtactgcaggctgtataggaagcatagcagtttctgcttctggggaggcctcaggaaacttccaatcatggcggaaggcaaacagggagtgaggcatctcacacggtgggatcacgaacaagagacgggggaggtgctacatgcttttaaacaaccagatttcatgagaactcactatcatgaggacactactaaaagggatgatactaaaccattcatgagaaaccacccccatgatccattcacctcccaccaggccccacctccaacactggggattacaattcaacatgagatttgggtggggacacagatccaaaccatatcagtttatctttaaaattctctgattctgtgaaaaatcataatttatatgtataataattattgtgttactaatcacaagtagggagcagttttcttctgcacttactatatttactgatctaatcaagctttctagggctagttatggtaagggaaggtaaatggagcagtaagttgcctttaggtctctctaagatgctttagaggatgtgatgcacaggcattgattgttcctcggtagaggaacatggtcccatgtcccatggccctgttagaactttgcctccctgtgttccctttttagtatcactggcctaggtgtcttctcttttgggagaattttctcttattttagatgattgcttggaatggtttggttatgtgtgggagaaaaagaccaagaggtaatttgggagcacagattactttgtaagattaaagctagggtcgagtggggagcagagtttagtactgtgggcctccagacatgggagcactctgctccttgagttagagttgaggtagagttactaaggttagagttagggagaaaaagaaatgggaaaagtcatgctttcctattttttcttccctctttccctcagaggccaactactgtcaacttcaccctttttaatttgtcatttccctctactccctactcacctggagttacatgagaggctggtaggagagttgaggccaaagagacctaggtagggttagagccaaccataattcatcagctccatgataacactgagggcacttaaaaaagctggaagtgtgtatggagatgttttatgctctgcacgtcacatgtgtatggcttagtgagatttgtcctaatgacttctcagagcagttccaagtgtttcctcaagataaattccatgatggtaagggttgttttataatattcctactatgccattttgaacaaatcactgaatgacttatgagtgagttctaagttcagttttcactttatttactttatgggcctataaacttcaaagatttactgctgatattattgaataatgaacttttgctggcagtaaagtaccaaagatagatcctgaaggtttgtgggagaaagcttagacagtaaggtattagtgtatttctttgcttcaaagacacatatactacattttaactgctcagaaattgggatctgtgttacagtcagtggcattttgtaatcacagtggctgcactgaagctgagttttgctagagaagatttatgtttgtttctgccaaactctcagggacattactgacctgagaacactttaaataatctgatgtagtttggaccaccctggtgcgtgtgaatttagtctgcaaacttatgtgaatactacctgtgatttctttctgttgagtggatttattcgtcattgaccttttcattaggactgttgagtacctatagtgccccctaacagatatctcctatttgactccccatcttgagtattttcttctttataaagtaatggtctgtcttacaattgatgtcatcttagattcagcaaaagacagtaaatataattatttaaattcacagaagcacagatcagatttctaaaggccaaactccatgttatgcaggaggaattggataatgttgtatgtgaatgcaataaaaaggtaagttttaaaaacctcttaaaaggctctaatattcaaagatattttaggagcaatttcaattacattttttgaattactttatttagatataaatcatagttaaattttgaattcaaaaattgtatataagtactgaactttattctgagatgttgaattttcacagagctgaaatatcttaaattcttgctacaattagaattctctatattagtcttacaaatgtagtgtaagctattaaatgcaaataaaacatttgacttccatttttgaagataaaaatagactaatttgtttttcatgaaacgtgtataaatatcaaagaacatatgaaacgtctttttttctgctttgttttgataacaaatcttacatattttttcacataatctataactttataactataggaggatgaaattcagaatttaaagtctcaagtaaaaaattttgaagaagattttatgagacagcagcgaacaattaatatgcaacagtctcaagtagaaaaatacaaaactcttttcgaagaagcaaacaaaaagtatgatggattacagcaacagttgtcttcagtagaaagggtaattatttggtatttttcctaacttaatgccacagatacaagaaaattattaaggttacacatttgtatagatgccattttgacagttcagttattttattagtatttactgaaaactctttccccttacatagaatatttttaacaactttattgagatgtaattcacccttttaaagtatgcaattcaatggcttttggtgtattcatagaattgtgcaactatcaccacaaccattttcataatccctaaaagatacttcataccctttagccaccacaccctgaccctgctcccctcaatcccttacagccctaggcaaccactattctattttatgtctcaataaatttgtctattctggaaatcacatatacgtggaatcatataatatgtggtcttttgtgactgacttttacttaagatattttcaaggttcattcatgttgcagcccctatcagtattttatttctttttattggcaagtaacattctgttatatggatataacacatttaatttatctgtttatcagttcgtagctttaggttatttgggttgtttctactgtctgacaattttaaatactttgaatattcatgtacaagtttttgtgtgcacgtatgtttctatttctcttggttatatagccaggaatggaattgctgggtcatatggaaatcctatgttgaccttttgaggaattgctgactgttttccaacctgcctgtaccattttacattcctaccagtagtgcatgaagctcctaatttctacacatcctcaccaacatctgctagattatctttttgattatagccatactgcaagtgtaaaagggttacctcattgtggttttgatttgcatttccctaataactaatgatgttgaacatcttttcatgtgcttattggcatttgtatattttctttggagaaatgtctgttaaggtctttgcccattttttaaattggatttgaaaaaattactgaataataagaacttttaagttctttatgtgtttagatacaagtcccttatcaggtatattttgcaaatagttttcccctacagtgggttgtctttcactttctttatggtactctaaaggcacaaaagttttaaattttgatgaagtccagtttatctaatatttatttggtttcctgtgcttttggtgtcatatttaaggggagaatgtattttaaataaactatcctagcttatattagtgtgccattgtgaaaataaaaatatactgtttgagattgctttgtaaaatgtagtgacgataagaattatgtaatatagcatatcccgagatttagtaagaaaatgtgccccctttattagtacccttacatttctcgtttgtatggtcatatttaaaaaccctgctttttaaacattttggtcttgtataattagctttatcttgtaataaattttaatatcaaaatcacttagacaaaatttatatgcagtaaattcacactttttagtgtacaattctatgagttttgacaaatgtatgcagtaatataactatcactataattgagacatagaacagttccatcagccccccaaaattccctgtgaatttagtgaaggccttccctaattccaccaccaggcaaccactgatctgtgtttggttcttaaattttggacttttcccaaatgtcacataaatagaatcgcattggatatagacttttgaatctgttttttttttttttttttcagttagcataaaacatttgatatggtttggctgtgtccccacccaaatttcatcttgaattcccacttgttgcgggagggagccggtgggaggtaattgaatcatgggggcaagtctttcctgtgctgttcttgtgatggcgaaaaagtctcaggagatctgatggttttaaaagggagagtttcccagtgcaaactttcttgtctgctgctatgtgagacatgccttttactttccaacatgattgtgaggcctccccagccatgtggaactgtgagtccaataaacctctctcttttgtaaattgcccagtcttgggtgtgtcttaccagcagcatgacgatgaactaatccagtaaattggtactagtagagtcaggcgctactgaaaagataccaaaaagtgttgaagtgaccttggaactgggtaagaggcagaggttggaaaagtttggagggctcagaaaaatacaggaaaatatgggaaagtttggaactccctagagacttgttgaatggctttgaccaatatactgataatgatatggacaatgaaatccaggctgaggtgatctcagatggagatgaggaacttgttaggaactagagcaaatgtgactcttgttatgttttagcaaagagactggtggcattttgtccctcccctagagatctgtggaactttgaacttgagagagatgatttagggtatctggtggaacaaatttctaagcagcaaagcactcaagaggtgacttggtgctgttaaaggcatccagttttgaaagggaaacagagcacaaaaggttggaaaatttgcagcctgagaatgcagtggaaaagaaaatcccattttctgaggagaaattcaagccggctgcagaaatttgcataagtcttgaggagctgaatgttaatccccaggacaatggggaaaatgtctcccaaggtatgcagaggtcttcacggcagcgcctcccatcacaggcccagagacctaggaggcatgattggttttgaaatgtgaggacatgagatttgggagggtcttggggtagaatatggtttggctgtgtccccacccaaatttcatcttgaattcccatgtgttgtgggagggacccagtgggaggtcattgaatcacaggggcaggtctttcctgtgctgttctcatgagagtgaataagtctcaggagatttgatggttttaaaaatgggaatttccctgcacaagctctcgtctgccaccatgtgagatgtgcctttaccttccagcatgattgtgaggcctccccagccatgtgaaactgtgagtgcagtaaatctctttcttttgtaaattgcccagtcttgggtatgtctttatcagcagcatgaaaacggactaatacaacattcaatatttatccctattatagtccattcctttttattgctgagtagtgtaaactatgaatgaatgtacttcagtttgtttccccactcatctagtaataaaagttaattatagtatttaatagtctgaacttgtgtttccagtatggtagccacttaccatatgtggctaaattgcgatgtgc

SEQ ID NO: 166 - DNA, 19960 bp, Homo sapiens
  source 1..19960: mol_type = other DNA
ggccgcccaatggggcgcaagcgacgcggtatttgaatcctggaacaaggctacagcgtcgaagatccccagcgctgcgggctcggagagcagtcctaacggcgcctcgtacgctagtgtcctcccttttcagtccgcgtccctccctgggccgggctggcactcttgccttccccgtccctcatggcgctgctccgacgcccgacggtgagtgtgcccggggaccgctctcagaggcgagtccgtcggccccacagctcccctgtcgcttctctcatctgctccgagcttctccgtcccaaccggggctgcttttctcttctccggagctcactgcttcgcccgcgtccctggccctgcggccggtcctctccggcccgcctttccccgtctggattccgccctcccctaacccctccctgccccggggtgggagaagtgtaggaaagcgcttccgagatggcgcctgtcaagtgagcccccagagcactaggcctagtactcagcgagcgatccccgagtgctcttcattgctagagagttatctacttccacgttcctgggatttccctccccctttcttacaactccttgccaactaagggacctgtgatggcggctgggaggaggactggaagggttctgtaggcagtaaagtgtacggcgtgtttcatcaggcaactgccaggctgtttttcagattgttcacatttctttttgtatgagtttcccatttatttcggcacgctaagtcttccatgctacgttcactaataaatgggtttgtccccttaaaaaattaatttctttactcaaatgtaacagaggtttttgaatataatttggaccaatgtggcagactgagagaaaagggtccaaattcatttatttcatccttgcagagatcaaagtgttatggtgttttgggtatttttcctgtgggcttgaattgtaccgggacctacttttttcctttgccgaaagctagagggccctgacacacctgagttccatcatcttggctataaggttagataaaagctgccaattttcctatccagatgaatttaaattgagtcacattaccaggcttctacccataagcattacattttcaaacactttttcagattggcagttgctgctggaagaaattgaagtgtgacttttgagaatcctaatagattgaatacatttagcatttaattaatatccttttgtggatctaagtccaactgacaagtaattttttataataatgtattctataacgttatttaatagtcaaaacctttctgttcagggaaggcttgagtttccctggcccctctctctgcctggtagatccactcaaaccccttgttgggagttttattagagtcgggaccctgaactctcagggataggacatgctggttttttgcttttttcttttttaatgaaatgtttatcacttctataataaactttttttggtatgagttgcttttcctagcaagttttatttccaagcacattatgtctaaagcaggttaaggtcaactgacaatttttatttcatacaattccaaccttccctgagtttgggagctaaaactatattactcaagaaaactacttccattctaaatgtccttaatataagagaaaatccattctatggcaacctcattttaaaaagctgtagttctaaaagatcatgcatacaggagcatttcttatttgtgaaatggcataagaatcaaagctagtttaggttttaaacatctggtttttaaacaaccagacctattattaactattaatattatagctttattatttttcatcttaatttactttttaccaagctctgtaaaggaaggtttttaaatatatgcctttaacttgcagggatctctaacaagtgatatgggtactatatgagaaataatcattaaatactaataagctttgaagttctcttacaggcccacttgaatactcagaatagctttgcaaggttagtgggaggatctttattacggataaagtagatgggtgatttgcctaatttagagtgatgttattaatcacaaatagcatttttagacttcctgaaatgtaccttttccatcttgcaaatagatcttgacgtattgtcctttcccaaagcaattctaaatttgagtatctaacattagcaaagtatttcaaattctttcaaggtttcattacttttttttttttttttcaggtgtccagtgatttggagaatattgacacaggagttaattctaaagttaagagtcatgtgactattaggcgaactgttttagaagaaattggaaatagagttacaaccagagcagcacaagtagctaaggtaacaatgatgaagactgaatgtgaatacagaggccgattctgtatagtgctgagtcccacaacgctggctgtcttgcgctattcatgtttctttttccttatagaaagctcagaacaccaaagttccagttcaacccaccaaaacaacaaatgtcaacaaacaactgaaacctactgcttctgtcaaaccagtacagatggaaaagttggctccaaaggtaggaagttctgaatttacaaacgtatttaatgaggtagcctgtttttagccagactacaagggtgcctttatcattgctgtaccttctaacgaacattcatagctggagctctgctttgaagcaatagtgtaggaaatgagtatatacaccttttaacttaataacattatgaccttgaagctgggcatggtggcttatgcctgtaatctcagcactttgagaggctgaggcaggaggatcgcctgaggccaggaattcaaggctgcaatgtgctataatggtgccactgcactctagcctggacagcggagcaagaccttgtctctgaaaaaaaaaaataaatattacgaccctgaataataaagttgattaccttaatacccaaataaaggacagaatggttcagaaaattcatggaatgagtgagatttttaggggtagagagaagatgatagctgacaggaaagggcacgtttgtggagaacaaagtagcaacaaagatcaaggtaccaaagcggatatggacctataatcatgtcctttcgttaaggagtctgaaagacttaactgagtcaggcggcttgagtgaggaaccagaagataaggctgggaagaaggttgcagttggatttgaaggacttggaatttggatttttatcccattaggcttgaggaaacaaagttttgaggagtaccgaaatgatgaaaacaatgtagggaggtaagttaggaggtattgcacttatccaagcaagagctgatgagggtctggagctagcccagatcttccctaagcgcctacccatacaccagtatcaatagtgggtatgaagaaacaacatcaaatgtgttaggatgtctcagaatgtctttcatcttgtatttaggaaagaatactttggacacatggcttgcactgcaggagtggtatccttacccacttggatattaaataaaccatttatgcaataaatgaacaaaaagtaggaaagtcaggagagggcggtagctttggtaaaggtatcctgtttggcttccgatttgttgaggtaaccgagggacatctgcctggaaatgcagttggaaatgtggcagcaacatctgaaggcaaggaacagatttgtcagctttcttcacagagatgatggttgaaagctctttgctctttatgagaactaaagcttagaaaaagtagttgagatgggacttcatttaaaaagccttccctagaaggtttctataacagtgacctcctgaaagccaaacccaaaggctggttttcagaccttgatctcttagcagttgtgcagtgttttacatgtgtaatggtttgaatgtggttcctcccacatcgcaggagggcgatttggcagtatatgtatatatttttggggggggacggagtcttgctctgtcgcccaggctgcagttcagtggctcgatctctgctaactgcaacctccgcctcccgggttcaagcgattctcctgtctcagcctcccgagtagctgggattacaggtgcatgctaccatgcccagctgattttcactatgttggcctggctggtctccaactcttgacctcaggtgatccacctgcccccgcccctcaaagtgctgggattacaggtgtgagccactgcgcctggcggtagtatatttcaaatggttattctccatacccagtagctttgttttttatccaaagaaaatgatcagagggataatcaagtacttttagatagtgctatgatgagtgtctcttatagagtagagaaataccctagttaaatccatttaaggaaatactatgcagccataaatatcatgttttagtagaatatttaaaggcatcaaaatgcttgtaacattaagtggaaaaatcagattataacaatatataaacagtgcaaccccagatttgcttttaaaatgtacatttgtatgcagaatattgatggtagttatttttgaatattatgttggacttaagattgactttcattttcttccttaaaacgtcaaactttggccgggtgcagtggctcacgcctgtaatcccagcactttgggaggccgaggcgggcggatcgcgaggtcaggagatcgagaccatcctggctaacacagtaaaaccccgtctctactaaaaatacaaaaaattagccgggcgaggtggtgggcgcctgtagtcccagctacttgggaggctgaggcaggagaatggcgtgaaccctgggggccggagcctgcagtgagccgagattgtgccactgcactccagcctgggcgacagcgagactctgtctcaaaaaacaacaacaacaaaacaagaacaaaaacaaaaaacttcaaacttttaccatgggtacatattactgttcaagttagagaagaagaaaagaaggcttttttttttctttttttaaaagcaaagaccataaatatgttactaaagaaacaaagggaaaaatagtttcctcctgtgacctccataacttcatcctttttgtgtttcctttactccttggctgactcctttttctcttgcttcctggcaaaattgaggccactgtttgagataaagcattatggacccgtagctcagttcatataaaaatcaattccagggttgaaacatatagctacatgttctagatttagaagttatgaggaattaatgaacaggaattatttccaattcaaatacatttccctctgagaaagtagtgaaggaatctctaagtccacgatttaggtagagtcccaccttctagcaggtgagtctctctgcctgcctgtctctggtcagccttctggcttttactttgtcatctgctttatctgcagggttatcactgttctttagagccaatccctggaggtgtggaaatgccacttgagtgcacaggtttctatcaattttcctggaaaggtgataacataagccatgtgtccatgataggagatgttcccagtcttctaaccaaatttatactatcctttttgcaaaactggagggcaggtttctttctctgtagcagttgacacaactgaatcacaaagtgccctggctgagacctcggaagagttccagccctttacaggtagtcatagaagcttattatcctgcaggttttggagaaaatggtgttttttgctgattaatgaggctttggtaaacacagtagttagaaaggacatggaaggctttctactagtcccatgtttgctggacactggggaaacaagttgaataaaccatcgattctgtctagaggagctcccagtcaagttggaggacataggagtagaagtatggctttatctgtcacaaagagagatgcatgcttatgagaggtactgaggagtcatagctagaacagattacctgaccagatgagtaggatcttagaaagggtcttacaataattaaattatgttggagttcaaaatgaatgctttcaaggaattctaaattaagggccagggcaagaatctttgtcttatcctagtggcttttgttgttgactgcttgattgatggagaagatctcactatgttgcccaggttggactcaaactcctgggcacaagcaatcctcccaccttgggcttccaaagtgcccggatcacagatgtgagccaccacgccaagcccttggtggcttttggatatggctaaactcagttgcacttctgaataggagccagaaaaatattctaaagtggtatgatagcacatgataacctctatctccttaaaccagactttttgttattgactgcccttccaggggtgggtgataatgcttatccttgaaaaagttaaccttcagctgaagctgcatatgcttattacaatgcaaatctgattctagtcacttgataaactccttcagtttttcaccttaacgtttggataaaatctaagcttctagaagctcggctgttgttcagcttttcagctcatcttctcatacctcacaggctatcctgctgacatctcaaatcaatttgcagttcccagaattgccttgattttctttggtttgcttttgcctgttcatcttccttaaggtcttaccgtctctggtaccctgggtacctctactcatttgttctagctccttgaggtttccaggttcccaaattctattctattcttttctttctttctttctttttttttttttttttgacagagtctcactctgtctctaggctggagtacagtggcataatcatgggtcactgcagttttgatctcctgggctcaggtgattctcccatttcagcctccaagtagttgggacaacaagtgtgcgccaccatgcctggctaatttttgtattttttgtagaggcgaggttttgccatgtttcccaagctggcctcaaactcctgagctgaagcaatccacctgcctcagccttccaaaatgctgggattacaggtgtgagccaccgcacttggcctgggttctcaaattcttgtataaatggcatgcatgcctgcatagttcttgctcacctggttcttcctcagtttaagacctttgatttaagaggggaggacatgttttaaactgtttttttgttttgttattgttgttattgatgcatcctcgaagactggaaattataatcattgagctttactgtaaattaaaattgtctttttttttttgagacagagtctcgctctgtcacccaggctggagtgcagtggtgtgatctccgctcactgcaacctctgcctcccaggttcaaacgattctcctgcctcagcctcctgagtagctgggattacaggtgtgtgacaccacaggcccagctaatttttgtatttttagtagagatggggtttcaccatgttggttaggctgatttcaaacttctgacctcgtgatccacccaccttggcctcccaaagtgctgggattataggcgtgagccaccaggcctggccgcctcctctttttaaaaaatattttattaccttaatatatatttgtatagcttagcatcttgttaggttttacttggagaagtactttttttttgaaagcattgatttggctgggtgcagtggctcaagcctgtaatcccaacactttgggaggccgaggtgggcggatcacaaggtcaggagatcgagaccatcctggctaacacggtgaaaccccgtctctactaaaaatacaaaaaattaggcgagtgtggtggaaggcgcctgtagtcccagctactccagaagctgaggcaggagaatggcgtgaacccgggaggcggagcttgcagtgagccaaggtcgtgccactgcactccagcctgggcgacagagcgagactccatctcaaaaaaaaaaacatttaaaaaagcaaagatttttttatctttcattaataaatacttgttttaactgctttataaatttttaatttgcataatttttataaataattacccagtcagcataggaaagtgaaatactgagttgtgaacttgctcagtcttcgctcccttctcctattttatttatagactgcaatatgcttttctcctttttagttgccagtttttcaatttagaataaattagttaaagagaagaaaacattatactgcagaagaggctgctactaaagtagaatgatcagctccagtaatctttgaacccaggtggtcaagtttcttccatttattgagcacctactacgtatcagggattatatagatgtttgaggtgccttagtgggcaaaaccaattaaataaacgtaagcttttagagcttacattctggcagaggtagacagaaaataatacacatactatataaactatagaattttagaagtataggtattatgagaaaaaacagaataatacacatataaactatagaatttagaagtataggctttatgagaaaaaacagaataatacacatattaactatagaattttagaagtataggttttatgagatgagacatatgggtagggtaggaggacagggattggaggcaggtgataattttgttttttgtttatttggttggttttgaggcggagtcttgttccgtccagcccaggctggagtgcagtggcgtgatcttggctcattgcaacctctgcctcagcctcctgagtagctgggactacaggggcgcaccatcacgcccagctagtttttgtatttttaaagtagagatggggttttgccatattggccaggctggtcttgaactccggggctcaagccatccacctgccttggcctcccaaagtgctagaattacaggcgtgagccaccgtgcatggcctgataattttaaataggagttaggatagaccccattgagaatgtaacatttaagtaaaacttgaagtaagggaattacccatatggacataggggcaagagcattctgggtaagaagaacctggcttgagtgaagcagtcaagggagagaagcaggagatgggtcagcgagggaactggggagggccagattatataaggtctgtaggccattgggaggacttaagttttcagtttgagtgaaattagagagttttaaacagagaagtgtctcttgaagaacttcacatactatatcttgaattattcacctcttggtatgaaatttgttgtgtctttaacatatttcagatgtgcgtatgatattgatatttaagccagttggctctgcatgtatttatggttaaggctgctcctacatgtgcctaaatttgttggtgtagggtccttctcccacacctgaggatgtctccatgaaggaagagaatctctgccaagctttttctgatgccttgctctgcaaaatcgaggacattgataacgaagattgggagaaccctcagctctgcagtgactacgttaaggatatctatcagtatctcaggcagctggaggtaggtgggcctttgtgttttggttgtataagcaatgtggaatttaccacacagctgggaagcaaacaaggtcagctttttaaacttttgattctacccacaggttttgcagtccataaacccacatttcttagatggaagagatataaatggacgcatgcgtgccatcctagtggattggctggtacaagtccactccaagtttaggcttctgcaggagactctgtacatgtgcgttggcattatggatcgatttttacaggtaggtgtggcttcagggacttcacgccagtggctcattgaacattgcatttatgcttgggggatagaaaactaaagtgggtacttctgaaaaaaagaccaaaaatcaaattgtgagaagccaaagaactttggggactaaaaagggaagtaatccaagtgtgtcaagcctttgatgatgcggaccaataatgggcatttctgtaaggccagccagctaaaaagtacttgggggaaatattgcattgccacaatccttcatcagaggaaatataccatcagttgggctgaaagtccatctgaagcctgtagtgcctttggatgctggttttctgggcctgcttgcacaatttccatagtttggtgctctggtgttaagtttcctcatctgaaaaacgatgagtttggctggagaacctccacatttccagccaactatgtcattgaatcactgtagaagaagaaggtggcagtatttgttttttttaaaggagcaggggttgtgtgtggagtggactgagaatgtagtgtaataaagagtaatataagaaaataagaggcaaacataatcttcagcatatttatgagtgggtaatgcacagcccctgacctgttagaagagacagcagatataaattgccagtgtgttatctaccaaacaatagccctgcagataaggttttatttatttaaagtcaacattcaggataggggtttaggtcaggcacaaattctgtccaaacaatgtaataaaaattactttacaataatgaccctgagatactacaaaatcccaggtagcatgcattcctctttgggcaggaaagcacaacagtattttaggtaggtttctttattttttatttttttgagacagggttttattctgttgttgcccacgctggagtgcagtgacacaatctgggctcactgtagcctcaatttcctgggttcaatcaatccttctacctcagcttcccaagtagctgggactataggcatatgctaccacgcccagctaagtttttgatttttttatagagatggggttttgccatgttgctcaggctggtctcgaactccttagctcaagtgatctgcccacctcggcctcccaaagtgttgggattataggcatgagccactgtgcccatccgtggtagatttttaataatgagagttgaagcaagaaaagtacagagtttgggaggaaaaaaaaaaagcaattaagggaaacgctttaccctagcctgagagtctgcctgactccaaagcattagcgaaagattttctaagctgaataatgggtatgcttttggtaaggattaaggaaatgagccatccattaaattctcacttttttctttggcctcatttctattcagaccatgtttagtgtgtcaggccagggctgccacagatactcaagtcagcatgaggttgtgggaagggtgactaggagcttggtattcaggcttggattcttcccttcttggcaattgaatgatcttggcatggtgtctgaatctgttctcaggacatctatttgtaattgaggaataaaatatgcctttcctagaatttttatgaggattgggtgagataatatgttagaatcttagcactgtgcctagcacacagtgctcaattacagatagctgtcatgatcagtggtagaacagtcaggtctcctgtgcccttatgagcaaagacaatgtgcacttttccaggacttggtttcctttccccttctcccacctaaagcttcactcttcttgttaggtgtgacttttgttacattaattttccattaggttcagccagtttcccggaagaagcttcaattagttgggattactgctctgctcttggcttccaagtatgaggagatgttttctccaaatattgaagactttgtttacatcacagacaatgcttataccagttcccaaatccgagaaatggaaactctaattttgaaagaattgaaatttgagttgggtcgacccttgccactacacttcttaaggcgagcatcaaaagccggggaggtaagtgcctccagctctgtaagagactatttttgcttggtgtctcatcccagaaaccttgacctaatttaaggaaagcttatttataggacgcttcctttaggtaagtcttaatgctttcctcatcagttcttaagagaaaaggcctcatgatctatgtttacaacatagtgtggaatagagtaattcttgagaaggataagtgagtcaagtgaattggagttcctaggccttcacgcagaattttgcaagacagtaattacacttgtgattcttactatcccttgctgttctttcttaggttgatgttgaacagcacactttagccaagtatttgatggagctgactctcatcgactatgatatggtgcattatcatccttctaaggtagcagcagctgcttcctgcttgtctcagaaggttctaggacaaggaaaatgggtgagtggtggatttaagaagaaactaattaggctatattttagtccttcgtaatacaaaaggccttagcatttttacaacactatccttgaagcagttggttttgttttgtgtttttgagacagggtctcattctgtcacgtaggctggagtgtggtggtgccatcacagcccactgcagccttgacttcccaggctcaagtaatcctcctacctcagcctcccgagtagcagggactacaggcatgcatgaccatgcctcgctaatttttgtaaatttttttgtagagacagggttttgccatgttgtctaggctagccttgaactcggctcaagcagtctgcccaccttggcctcccaaagtgctaggatttcaggtgtgagccacagtgcctggcctgaagcaattgtttaaagtccaaagtcctaaaggaaaactacttggagaggggcatgggggcttgtgcttgtagttctagctacttgggaggctgagggaggaggatcatttgagcccaggcccaggagttcaagtctatcctggggaacacagagagacccttgtctcttgggaaagaaagcaagcaagctgcttggaacagttcacatagaagtgagttgactatacatactaaggtgcatgtgtgcagtatagagttgtacagaatgaggaaggccactaagaactgacatgtatgatttcttagatattacgttaagtgaaacaagcaagttgtcaagcacacaagacaaaggaaggccaaggcctgactgatttagccagtaagaatagaatgagccacttgtagatttagaagagtagccaaggatggcagctcctcgggtctttgtttcacatggcaaaaaggataatgtggaaacaaatggagctggatggctgcaatgcaagtcacaggtacactgttgtggagaagccagttctagaccaccgctaaacagtcttctagtctgcagttataccctgagagcagtacaatagaaaacctcatcagaacctaggggatacgaagctgtcttggccgggtgccatgccagtaatcccagcactttgggaagccaaggtggacagatcacctgaggtcaggagtttgagaccagcctggccaacatggcaaaacccccgtctctactaaaaatacaaaaattagccaggcatggtggcagctgcctgtaatccaggctactctggaggcctaggcataagaatcacttgaacccggaagacaaaagttgctttgagccaagatcgtgctactgcactccagcctggcggacagggcgagactctgtctccaaaaaaaatataaaaaagaagaagttgtctcgtgacagcctcccaggggagatagggaggtgagtgggagatggctgggcggcagctctgcccacacctgccatctcctcctttttcaggaggatcacaaagcattttgccaggacagatcagctgtggttcaggccttggcctgtgtggcctatatggatataggcaaggtcaccagggcagcatggtggagctgttcacctaaacaatgtatattgtagtttacattttatgcaagaaagtgtgtgtatgtatatatatttatatatttgttaattttttggtacgggaggaataaaccagaaagaatgaaagtggaaactatggggttctttgggaatagggtggaggttgaggatgagaggacttctgattgtaaccttttattgactttataatacagtgtaacttttttgacttttgaacaatgtaaatattttatgcaaactttaaattgtaattaagtggaaataaacaatgtaactacatgtgaaattggtaacagaacacagaggaaagaattaatttaagtacttgttgcttgagcccagcctgggtagcgtagcaagacccccatctctataaaaaattaaaaaattagctgggtatggtggcacacacctgtagtcctagttactcaggaggctgaggcaggaggattgcttgagcccaggagttcaaggctgaagtagctatgatcctgccagtgcactccaacctgggcaacagagcaaaaccctgtctccaaaaaaaaaaaaaaaaacaaatctgtaacctgaacacagcattctgactgtgcatccttagtgggatttaaagtatgacaaaataaaggactaaagtggtaacatcaagtttacttagtaggttcattgttaatagtaatctgttattataattttggaactagtttatgtgtattgtaggataaaacaaatttattcatgttattaaggactaaaattttcaatataggaagagttttaaattattaattcattaattttttcttatacagggtcttgctttgtcatccaggctggagtgcagtgctgctgtcacagctcactgcagcctcaattgcctgggctcaagtgatcctcccacttcagcctcccacgtaactgggacccagccacacgccatcatgcctggctaattttaaagtttttttgtagagattagctctccctgtgttgcccaggctggtctcgaactcctaggctcaagtgatcttctcgccttggcctcccaaagtgctgggattacagacgtgagccactgtgcctggcctaagagagaaaatattaacaattaaaaacaaaaggttagtcctcacgtaggaaatagcaaaacaaaaacaaaggaaaacccctattatgttttggaaataacagcaaattcataataaagggtctcagaaacagtgacaactcagtagtagtgagcatatttagtgcccacatcttggatactaaataccattatctactggcaactagggctgtttagtgaaattgctgatttcagggctatggcaggggaagtacaaggtgagcctagaacaatttgtgccagatagcacacaaattctcaaagatcaatgaggtcacatcaaaaggacataggagagctggtcatggtagcatgtgcctatagtcccagatactcaggaggctgaggcaggatcccttgagcccaggagttggaggctgcattgacctatgattgcaccacaataaaataggaaggaagggaaggagggagataggaactggcttgaaaggactctggctgactgaattagagcattaaaaagaataatgacagtaatagattatagtgtataaaaaaaaggattcctgggaccataatgacataaaaaataaaagaggggttcatttttaaaaatcagaataccagctaattaaagtagaatgatagagttagaaaccactaattttcaacctgtaatgtaataatttattcaagcaaggtgcatcaatgaatgcaaaaatcattagatggaataattttgggaaacaagattcacgtggtctcaatttatcatcccatagatacttattaattctgtaacaaaactgcacatctatgatgaagtggtctggtggtttccaccttcacccagtgattaagctcagcattaccactggcagacgacctgagttgccatgccgtgttgtgcagtaagatgtatacattatcacctattcatgcccaaaatgtttgacatgaattaaatcttgaggaaatatgcaaatccagaatgtgagacattttaaaaggaactgcctcgatgcttaaaaaaaaaaagtcactggtgacagtgtttcttatgtgagaatggtgttatggataggtacgaaaacgtactttttagaatatgcttctgaaacatttagcagggatgtgctgtgatatctgcaaatcgctttcaaatggcatagcaaaaattgtgtgtgagtatacacagagagggagaggagggaaacgtggcacatgttcatgattgatcagtctacatgaaggatatatagaggatcattctttcagtttttctgtagatttggaattttttgaaataaataaaacatttgaggcaaaaatgtcactggtacatggtaccaatggctcatttttagtcaccttactcttaaatgtgcttcgctctcccagttttctgagaatttatttcaaaaggctagaaattgtgcattatttcagtttttactcgtttcctctttcttcccttcaaagtattttaggattaaattgtgtagactgggcacagtggctcacacctgtagtttcagcagttttggaggctgaggcagacagattgcttgagcccagcagtttgagaccagctgggcaacatggcgaaacctcgcctccacaaaaaaacagagaaactggctgggcgcagtggctcatgcctgtagtcccagcactttgggaggctgaggcgggtggatcacttgaggccaggagtttgagaccagcctagccaacatggtaaaactctgtctctattaaaaatacaaaaattagctgggcgtggtggcacatgcctgtagtctcagctacccaggaggctgagacacgagaattgcctaaacccggaaggtagacgttgcagtgagcagacattgcaccactgcactccagcctgggcgacagaatgagactctgtctcaaaaaaaaaaaaaaaaaaaaaaaaaaaaaaggagaaattacccaggcatggtggcatacacctatagtttcagctactagggaggttgaggtgggaggatcacttgagcccaggatgtcacggctgcagtgagctttgatagtgccactgcactccagcctgggcaacagagttgagacccggtcttcaaagaaaaaaagagattaaattgtggtttattttgccaattataccatgcatatgaaaaaaacgtactttcgcttttagaatttttgtcacagaactcttaaataaagtcagttgacatatctttttttttttttttttttttttttgagacagagtctttctctgtcacccagactggagtgcagtggtgcgatctcagctcactgcagcctctgcctcccgggttccagcgattctcctgcctcaggcgcacaccaccatgcccggggaatttatgtatttttagtagagatggggtttcaccatgttggtcaggctggtctcgaactcctgacctcaggtgatccgcccacctcggcctcccaaagtgttgggattacaggcgtgagccactgcgcctggccttttttttttttctttttttttcttttttttttgagacagggtctcactgtgttgcccaggctggagtgcaatggcgttaatatcgctcattacctcaaacttctgggctcaagcaatccttcctcctcagctcctcaagtaactgggactataggtgtacaccaccaagcttggctaatttttcatttttcatagagatagggtctcccaatgttacccaagctggtctgaaactcttaagctcaagcgatcttcttgccttggcctccgaaagtgctgggattataggcgtgagccactgtgccccgccaatttatatatcttcttacatgatacatcttattatcaattgacagctgttcttttacttgaattttactctttgggaggctaggtcacaaggcttggtgtggtagtgtctaagttctctctgctgtttggtgcttaactacacagggttcaacaagagaatcataggtagtcctagttcttctggatttgatagattgttgcttgtagcacagtttatttcttatttccgaacatctttccctgactgacagtatgtctgtttgggctcttgagctcataacagggacagctgggcagggctttgatgcagggttgtgtgagatgtggccagcactgtaaaggggcactttgttttaagtgtctccttttccatcccctttcagtgttgttacttgaaggactcttacctgtgcaacgtctttgaaagatcgtatgggacctttggcacttgatttagtctggtctcagggccagaatcatcttgcatttaccagctgctttagtgttgctggtactgtgagagtggttagggctttgattgaatttccagaaggtaagaatattcttgtacagcttttacataagtaatgtcatcatgtacaagatgtgttcttctaaagaagcagaggttttctcttgcccctcagtcatgtctgtctgtctgcttcttgtgtttcagaacttaaagcagcagtattacacaggatacacagagaatgaagtattggaagtcatgcagcacatggccaagaatgtggtgaaagtaaatgaaaacttaactaaattcatcgtaagtactactgttttcttaagctgtggaaagctttaggttctgggttttgtgtgtatgttgggcgggggggggcggtgtgtgccgtcatgtaaatatattaataacatgtgggagttttagcacaaatcctttatcctttatatttttctggtacagtatggtatggagcatactgataaaccctgaaagcaagctttatttgaaacaaggtcgataggctagccatgtccaggcccagatcccagtcaaccagtcggttactcaatgtattgaattactctgtgcttatactagcatcctggggagggcactttgcaagcagggaaggctggtctgcatgtgattgggaagagagagggcccacttcaaatggcggtgtattatattgcgtattcaggtgatgttactcagagcctttgtccagggtcttttgaggcaatgatggaaaaacgcctaattagcaagcatggttaagagggaagaggcccattcagggggcatcctgagggcatggtgtctatctctgcatggcccacctatgaggaggagccaaaggagacttagtgctgtcctgtgcttgtgtgacaccaaacatcagagctcaccaagtgtgtggtggcaaagagcaaggtatttgaacctcagaagagtctcaagtgtcctcacaacatgatttgcttcatggaagtgtaatatgtgttcagtcctgagaggactgtctgggatttgttaagcactagttgccaccctcttttattgtcttttattgtcttttaattgttcctattgctgccaggcctggtgaacctgttatgtcctgatggcacttaggtgtcgtaaacacagctccccctcccatccctctggtagcctacaagaggaagcctgctacttggaccttgaaatcatttgttcctatcacctgtgctaccagctgtgttttattcattaatggggatggaaggaaatggtcaggcacatgttatgagcccagagctttcactggcttcagcgattgggcatcatcaatgtgatcatgattgtagccgtggacctttgataattgtgagttagactaggaataaggtatcattgggggttcctgacatgtgcttaatcacaaatgacttctgcaggccatcaagaataagtatgcaagcagcaaactcctgaagatcagcatgatccctcagctgaactcaaaagccgtcaaagaccttgcctccccactgataggaaggtcctaggctgccgtggcccctggggatgtgtgcttcattgtgccctttttcttattggtttagaactcttgattttgtacatagtcctctggtctatctcatgaaacctcttctcagaccagttttctaaacatatattgaggaaaaataaagcgattggtttttcttaaggta

SEQ ID NO: 167 - DNA, 19476 bp, Homo sapiens
  source 1..19476: mol_type = other DNA
gagcacttccgggtcgtcagctcagttctgcggtttctgcggcggctggagaggtggtcggagaagtaggaacctcctgccgggctcgtggcggcttctgtccgctccgcggagggaagcgccttccccacaggtagtgggttagggagggcagggttagggagggaagcagggccgcgctccctgccgcccccccggagtcggagtgcgttggtggggtagtctctgagggcccttcgctcctgggatctgcccgttaccgaccgttgccggcaaggccccgcggccggcaccggagaagggcggcgaggcggcggtgatggtcgcgtcccgtggcgggaggctcgtcgttcacggggcgcccacagaacccacctaggggaggtcttcagcccaccaccgtattttcagccaggtgaatgtcttaaagcatccactagcgccctgtgagttttgccgaatttcggagagcattttttaaatgtctcattcctgtgctttgtagcttgttgtttgaagtctgccttccaactttcttcgtgcgaactccgacaaaaggaacgaattttaaacttggtggtttaatcaaaaaatgctaggacgagttacttccgaatttgacttctaattttctgaactgcaaaacaagaagggaacaataaatttctgtggctgataccacatctaaaagattagaacacttaacaaggaatttttaaagaatgtaagaacattgaaatcagcacttttaacaaacgtttaacgcagggctattttctagataaactcaaaaatttgtcaaatgggacacgatgcacgattctgtattcctactctgtggagtttttatctacctattgggacttcttgccctttttaaccccctctcccctcccacacgcatattatacttactgatatttgccttcgtttactgaacagatttttttttggctcctattgtgtgccaggtactgttctagacgcctattttacttaagtgaacaaaataaaaagctttgccctcatggagcttacattctattagaggatgcagaaaataaaatatataatggtgttagaaagtgatggtgccatcaaaaaaaaaaagagaaatataaaggagtacgggaaagttccagagtggaggtgggaactggtattttaaagatgacggtggtcagtttgagcctcatttagtaggtgttatttgagcaaagacttgaaggaattaagaaaatttgctaagtaaatatcaggaagagcattcaggcagataggaaagccaatacaaatgcttttaggcctgtcatgtttgaggaatagcaaggaagccagtgtatctggagagggatgagcaagagttttgggggtggagggacaagaagataaagtcaaagagatcatggtagccggatcattgtaaaggctgatagaagccatgggagattttgaatagaggagaggtatgttgtaactgaagttttagaagatcaccctggctgtgagttgtgattagagtgtaggggtgagtgtagaagcagggaaatcatttaggagatttttgcagtaatccagatgacgagagtggcccaggtcagggtgataaccgtagggatggtgagaagtggttggattctgaatgcattttgaaggtaggccttacagtatttgctaggaattggatatggagagtgagatagagggagtggaggatgaaatcaaaggttttgcccaagctcgtagaagtatggagttctttaagccacgatgcaaaagataacaaatagagatgttgagtaggcagctagattcaggagtgagaagttctatgctatatgaatttggggatcatcagcagtggtacttaaaccatgagaataaatgttatccgtaaggaatgggtgtagacggaaagcagcagaggcctaaggactgtgtcctgtgatattaagagtttagcgaaaacgggatcaaccagcaaacagtattaagaaggatgaacttgtgagttaggacaatccgaaaagggcagtgtcccagaagccaaggtaagatcctgtacgaaagaggagggagtaatcagctgtgtccaatattctgagtgaggctagagaattagctttagcattgccattgatgaccttcaccaacctgtttccttagagtgctagaggcaaaaattagcttaagagaaaataggaaaaaaggaattgggagacagtgaatacagacaaaactaagggattttgctgcaaaggggaactgagaaataggatgtagctggcaggggatttgggttgaggggtttttgttttgttttactttttaaggtgggagaagtagccacctatgtgtttgctaatggaaatgatccgcagagagggaaaatttgatggtgagggagagaagtaacaactgaattgtcagaacaatatccttgagtgaattagaagacaatgcctgatacaaaggtagaaggattggatttagataaaaataggtatagagttcaactatagtgacagggagggagagtatatgggtacaggttgggcatcccaaattcaaaatgctccaaaatccaaaactttgagcaccaacatgacactgaaaggaaatgctctttggagcatttcagagcttgaatttggggtactcaatcactaagtatatacgatgcagatattctaaaatccaaaagacttcaggtcccaagcatttcagataaggaatgttcaacctgtatagctattggtaggtagctggatgtggctgtgagtctggaagttattgctgcagtttcctcagtgaagtgtaatactttgtgtcatactcagatacatttctaatatattagcactttaacatactaccaagtatttcactcaacagatacttaatagatactacatacgttgttctagttggtaaatatgtaaatgaacagaagtccctgtcttcagtgtgtcatctattttagtagatggagacagaataagcatatatatgttagcttcagttattggtatgaatgaaaataaagcagtgtgaggaagaaggaaggtaattctttcttataggttgattatagaaggcctttctgatggagtaatgcttgacccagagatctgaatcaaatgagagagtgaactatgcaggtatttggaaagaatactgtcagcaaaaagaagagccaccacaaaggccctcaagcaggatcatgcttcccctgtcaaagaacagcaggggaccagtatgaccagagcagagtgagagggtgagtgggcgaagatagggaagtaggcactggggggcccaaatcacataggccttccaagccatggactctgtggttttcactgagatgggatgctgccattggtggttttgaatagaccagtgatgtgatttgccttatgttttaaagtcttagtgtggctactatgagggtggggttgggataggcaagactggaaataaggagaccatgagttatcacattaactttagtgacagatgatggtgacttagggtaatagcattgaagatggtagaagctgtcagattctggctatagttagaaggacgagctgaaaggttggctgatggattggatgccaggtaagaaaaagagaagttactcttgactcaggtttttgagctgttacaggaagactatgtttactgttaccgaggtgggtaagactgaggacagagcatatttgcaagagtagcatcagaaacatggtttttgacaaattgaatttgagctacctacttgatatttttatccagtgtcaagcaggcagttttatatatgggtacaaagggagaattgagggctggagatacaaatttgagagtcatcaccagatagtagatggtatttaaagccgtaagtctggatgaggtaactaagagagtaaagtatgtggaaaatagaggacccaagaaaacttagggcagttcaacagttacaagtcagggagctgaggaggaaccagcaaaagaaaataaaaaatacaatggtatccagtgacatgagaactgagaatgctgtctcaaagccaaagaaatgtttcaagaaggcagaaatgatctgttgaatccagtgctagcaaggtgtgaaatgtaaggactgatggctggccattatttttgctgagttttatctgatgattgctcctcaaatgtattttcccccatccatctccagactgaaagggccatgaggtcaagatcttacacctgacgtgtagtggaagctcagtaaatatttattgactgtgtactgctgccacccttttcgagcccccatccctcatctgtttctaaatcacgcactgaagcccagctgtctgacctttcctgcctaaaattcttcagtgactccccactgcttgcacctatcctgccaaacaactccatctatgctgtctctttcagcttcatctcctgccactccctattcgtacttatgccctgataatgtagaacagtttatgtttttccccacaaacatttcatccttccatggctttacttattctattctgtcagcctctggaatgacttccctcctctgcttggctaaagtctagcttaaagaacctggaagcttttctgagccagctcacttctacaggcagcctccatggtatgctttgtatctttatcccagttcttatctttttgtatgtttgttacattctctagagtataaatttttaggattgggagcatgcctttaatcatcatcttctctctggaacctgtcacagtgccattctcttggtaggcactctgtaaatactgaatttagagagaacaggaaaataaaggggcagacatgcaaacatgagctgaagattttaccagtgacttgacagcaggtagaaaggacagtacatggaaaattctagactaagtcagaaggcagacatttgaaggaaatggtaaagacattttaataaatataacagctatactgcataaaggagtataaatgcccatgtcaaaatcatggggaaaaaaactggaaaatcatttgtagcaattccttgtaattctaaaatgattatctagtaatgtgcaaccactaagcgttctcctagttctatattagaatatttgaggtagatgatattatatacataatttatgatgttacagtatgatcttttttaacaattttatattaaatttttaggacatcaatgcaagcttgaataagaaaaacaaattcttcctcctaagccatggcatatcagttatacagaaatactactttgggaaacagtcttcaggagagcctagatgagctcatacaggtgggagactgaattaaaaatcaaacatttttatcttgatgggtttacagtaattcttgtcatatcacttaggcaaagagatatgaggtaaaatatcttggactatttgacccagcaagtcagtaacactgattaaattacctcaaattcttgtttattacactgtcctgacaacaggacacaaaacatgattgaatgatatcattaaatatagctaaatctgggtacatgcagtgtttcatgcctctaatcccagcactttaggaggacaaggtggaaggatcgcttgaggccagaagtttgagaccagcttaagcaacatagcaccacccatctccacaaaaaataaaaaaattagttcggtgtgggcgcatgcctatagtcccagttactcgggaggctgaggtgagaggatggcttgaacccaggagtttgaggcttaagtgcactatgatggtaccactgtactccagccttggtgacagagcaacatcctgcctctaaataaataaagttaaatcttcaaaaatttttgttcaacataaaaattgagattgttggtttcccccttctcaaatttagggaagaaagtcatatactttttagctttaagatagttttgtccaatttaagtcttctgagatttacaagtctgaatttatatttcaattttaagagaattaacccttctgtataattctcccaaataaaaacatattaagtatttccagctgggcaccatggctcatgactgtaatcccagcactttgggaggccgaggcaggcggatcacccaaggtcaagagttagagaccagcctgaccaacatggagaaaccctgtctctactaaaaatataaaattagctgggtgtggtggcacacatctgtaatcccagctacttgggaggctgaggcaggagaatcgcttgaatgcgggaggcagaggttgtggtgagctaagattgcgccattgcactccagcctggggaacaagagcgaaactccgtctcacaaaaaaggaaaaaaaaaaaaaacatattaagtatttccatttgttggtatattttatgagattcaataaaatttaataggttttttgtttgttaatataggccctgtgtatttaaaagaaacacctctttgtctatcttctcctttccagccactgtaagggaaaattgacaaagttttgttctggctttgtaacatcactgcatgttttctcttcaagattgtttgtgtcaagatagtacaaaagatgtcttcaagcttggtgcttcatcatcagttatggcaaaggagataaaggaattctagtttagaggctttggttaacctcagttaaattttagatgataatttgtatatttttatttactttgtctttaatgttcttccttaacgggatttatgacctttaccttttctcagtctcaacagatcaccccccaacttgcccttcaagttctacttcagtttgataaggctataaatgcagcactggctcagagggtcaggaacagagtcaatttcagggtaaggatattttcctgaatctagaagcctgtaccaatggttgttaaaacactgatttttttttaggacccctacatatttattaatcataagaggaagaggtggcttagtcaatttttggaacttgttttatagtaactaaattatacttttcaatcaactataaactaagttgatccacttaatgtgagatacagagatgtttttagatttttatttcattgtttcacaaatcagcctttgtatgtttggctaccttccctgaagagttactgagattccaaacacctgaaatattatctgcaggattaaaggtaagtggcggagtaatccccaaggttctgttatggttttcaaagtctggcctttccccgttccagggaagtagagttatttctagaaacttcatgttgcctccctccgactcttaggtaacttggctgataaaaacctgatctctaatggtagataacagtctattctggtagcttggtctcacttcagtcacttatactttgaacagtagtcatccaaagctgaataaaattatctctctcaatttcctgataacttcagattaagtgcccattgaaagagtcatggtgcaacagaaataattttaccacattatggtattgatggagtcatataatatatgatgatgtttgcttattatttatctaactttatgtttatattgtattataaggcataacctgtagaaatatagtcaaaagaaggttaaaatatggttacaaccaaaatttgatcattagttaacatctgcctacttcatttggtacttaaacattcagtaaacaatttgagtgtctgttaacataccaggcatgctctagatacacagagatgaaaagataacataccaggcatgttctagatactcagagatgaacaagatagacaaagccccatttgacttaaattttagtgaaggataaaatctccatgtattttatattaatataaataagtctcatatatcagtttcatgtgccaaaaaattatctggagtaaaatatgccttcaagactgtataatttgaccagtggatccatgaatttttaacagtaatgattctgccaaaattagtttgtgtttttttatatacccatatgcagaagtctgcccagatgatccatgttaatacataaattttgctctaataagaaatttggtggactacttatcagaggcaagatagttcacaaggcctaactagtcatcctctaggtgcattattgtaggtttctagtttggatttctttagctagagttaaagtaatttgacatttacatttatcttgcatagtgttttgtgagtttgtctattttcgaaaagctataaataattgctctcagccttgatcagaacttttccattcttgctttttattttcctgctgctactattctaactcacgctttttatcaccctactcctgggttacagccaacttgatcaattttaaatccagaatgtttgcaaataacattctgtttagcttagtgtagcatatggccaagacaaaagataatgtgttagaaatacctaattttcagagccattttgctagatcaaatttaggtatatattttttatgtataatttgctgacctagcaatgagtaagcatcctttacaagaatagaataatcctatatagcatgttaaattgttttatagttttttttgtttgtttttgtttttgttttttgagacagagtcttgctctgtcgcccaggctggagtgcagtggcgagatcttggctcactgcaagctccgcctcccgggttcacgccattctcctgcctcagccccccgagtagctgggactacaggtgcccgccaccacgcctggctaattttttgtatttttagtagagagggggtttcaccgtatttgccaggatggtctctatctcctgacctcgtgatctgcccacctcgacctcccaaagtgctgggattacaggcttgagccactgcgcccggcctgttttttgttttaaatccttttatgggttcaatataagtgaaattatttagtagagtgttataggagaaaatcctcttaagtatgagagctaaggttttaatcatttatatgttttaatttattagtaaaaaactcatatgtaccatggagcttgaacttaatttttagggagaaaattcagattgaagtagtatttgtaactaggctaggcttttatttatttatttattcttttttttttttttttttgagacgaagtctgttacccaggctggaatgcagtggcgcaatctcggctcactgcaacctctgcctcctgggttcaagcgattcttctgtctcagcctcctgaatagctgggattacaggcacacgccacaacgcccagctaatttttgtatttttagtaagagatgggatttcactatgttggccaggctggtctcgaactcctgacctcatgatccgcccgcctcggcctcccaaagtgctggaattacaggcgtgaggtaccgcacccggccataactaggcttttaaagagccattgtatggttttgggagaacatatgcccatagataaaagtaatggttactttatagtgttgagcctcgaacagtaattaacaagcgttaaaagatttaatgccacaccccccaaaaataagatttagtgatcaagaaaaatagcccttctaacaaaactgaaagtttccttttccctgttttttgatgtttctgtaacaaacatttattatataacttttaagatgttcttttaggctgggtacagtggctcatgcctgtaaccccagcactttgggaggtcaaggtgggcagatcacttgaggtcaggaatttgagaccagactggccaacacagtgaaacctcatctttactaaaatgagctgggcatggtggtgcatgcctgtagtcccagctacttggaaggctgaggcgggagaatcgcttgaatccaggaggcggaggttgcagtgagccaagatcgcgccactgcactctagcttgggccacagagtgagactgtatcttaaaaaaaatacaaaaacatgttgccccattgtggatacatgtaaaaccaaaaatgtatttattaaaagtgcattgaagatacaatttggccaaatgattaagtgttaaaagtaatatttgaccaaagctaaatatcttatagaagaaactttttgaatttaaagaataaatctaaaattacactttgaaaagtataattatctggcactgcagctcaagcctgtaatcccagcaccttgggaggccaaggtgggaggatcacttgagggcaggagttcaagagcagtctgcgaaatatagtgaaaccctgtccctacaaacaaacaaaacaaacaaagtagctgggtgtgatggtgtgtgcccatagtcccagctgctggggaggctgaggtgagagggcagcttgagcccaggaggttgtggctgcagtgagccatgatcatgccattgcatttcagcctgggtgacacagctagaccctgcttcaaaaaaactatatgtatgtaaatatgtataaacgcatataaattatataatatgaaagacatgtatatattatgtttgtaattatataattatagagtatatgtatatatagtatatacatatatataaacatcgtttttatactatacttaagatactaaatggattctgactttcaaatcagtgaaaaagcaagatatttaaataagtaaaaattatatacagaaaagcttatttcatgttagagattctaattcaaattattctaaaaagattatattatttcttacgtttacctttttaaaaacatttgttggctcagaagttacgtagctaatgtgcactttgatgatgttaattgtcaattttcatttacagttggaaggcatttaatatactttaatatctttcagtcaagttttgtagcattttatttttgtggtaaaataaatgaagcatatacatttatactgcaactaatggaatttcagcatatgatatgtaagatttttcactccaatctacatctaaaatgctttatatttgaaagtgaatactcacatactggctcataaatcccaaggacttgctttgtttaaattatttacataacattatccaatgaaagtaatttactgcaagctaagctatgaggacacaaaggcataagaatgatatgactttgggaactttggggaaagggtgggagggtggcgagggataaaagactacacattttttaaaagagaaagtaaggcaaggtacagtggttcatgcctgtaatcccagcactttgggaggccaaggcaggcagaccacttgaggtcaggagttcaagaccagcctgaccaatatggtaaaacccgtgtctactaaaaatacaaaaattagctgggtgtggtggcgcattcctgtagtcccagctatttgggaagccaaggcaggagaatcacttgaacccaggtggtggaggttgcagtgagccaagatcacaccactgtgctccatcctgggcaacacagcaagactctgtctcaaaacaaaaaaagtaatatacacacttttttttttttttttaaggcggagccttactctgtcactcaagctggagtgcaatggtgtgatctcgcctcactgtgacccccgcctcctgggttcaagcgattctccagcctcagcctcccgagtagctgggattacaggcacccaccatcatgcccgtctaatttttatatttacgtagagacggggtttcactatgttggccaggctggtcttgaactcctcacctcagtgaccctcccacctcagcatcccgaagtgctgggattacaggtgtgagccaccacacccggccagtaatatacacactcttaagatcgtggattacacacaacttcaggatgctggaaatgaacgttgagtttggcatctagctgtttagctttccagaggttcagactgtagcaaacgaggagatctaatttttaaatatattttataggcttacaattttgtgtctttttcccttaacgtcatgggtgactttcagtatatttatcactccactgaaattgctgttgccgagttacttttgctaaatctaatgcatcatttgtagtgctattgatgattgtttttttgaacccctatttcccttgaaaccatactgtgtgagcttttctcgtattccctggcctgttgctctcagactcctctgtagttctgtctctgcttatcatttaattgttggtatttcttagggttacagcgtgcgtccgctgtccttggtctcatccaaccctctggctttggttaaactgaatatcataatcacatgctttctcctatactccaattacttattggacatcatgacttagatatacctgaaattcaacaagttccaaatttaactttactccccaaccagctttttctgtgaatgcattgacattcaagtcagaaacttgggagttaccgtggatttctctgtcccccaaccccaccatatttatagttgtccattcctaccggtcctactttaaaagtctctccatttctattgatccctttactatactattactgtagtaaagccactttcacctctctgattcacccagctaacagacatcagcttcatagttggtcttacttcctttagtcatactcctgtctaacccattatgtcatcaccaaaaatgcaaatctgatcagactcttatgcttaagatccttcactgacttcccagtaccgttaggatggggcaaaggttttccaaggttctcctttatcttaggacctcctgacacgttctgttttctggaatcaaccaccccattccaagtgtttgtcttcctttccattatccctcctctccattgactcttacttattctttaggactcaacttaaacttcactttttgagagaagctctctgccttgtgtcctccatactcttgagtgcctttgctgtactctcattgtacccagtaacttactctttcatagcactgttatactacgtatttacctgttttaatgatctccctgctaaactcagctcaccagtggcagggagctgtgcttaccattgtatcctcagaggccagcatagtctagcacacagtaattactcatttattatattcattcattcatagctatcactttccttagtcattctcacttgatagactatttagaatgaatcccatttttgctattacaataatattgcaagcagcattttcatgcttggtggtttctgagttgaagattttaggcatttaagtgttgcctactaaatttcctatgtgactatatgtgtgcatgtgtatatctcaggttttaattgtattctgttggtgtctatgcacgactttcatcacattctttttaaaaatttccggccgggcacggtggctcacacatgtaatcccagcactttgggaggccgaggtgggcagatcacctgaggtcagaagtttaagacgagcctggccaacatggcaaaaccccgcctctactaaaaatacaaaaataagtctgacatggtggcagacgcctgtaatcccagctacttgggaggctgaggcaggagaatcacttgaacctgggagacagaggttgcagttggtcaagatcacagcactgcactccagcctgggcaacagagtgagactctatctcaaaaaaataaaaataggctgggtgctatggctcacgcctgtaattccaaaactttgggaggccaaggtgggcagatcacctgaggtcaggagtttgagaccagcctggacaacatggtgaaacccatctctactaaaaatataaaaattagacaggcatggtggcctacgccctgtagtcccagctactctggaggctgagacaggagaatagctagaacccaggaagtggaggttgcagtgagctgagattacacccctgccctccagcctgggccacagagtgagactccatctccaaaaaaaaaaaaaaaaaaagtaaaaatttccttttgatgctcaagtatatatatattcctactttaaacaatttttttttcttaattataagaatgtgtcctgggcatggtggctcacgcctgtaatctcagcactttgggaggctgaggcgggaggattgcttgaggccaaaagtttgactagcccggccaacataacaagaccctgtctctatttctttttaaatattaaaataggctggtgcagtgattcatgcctgtaatcccagcactttgggaggccacggcgggcagatcatctgaggtcaggagtttgagaccagcctggctaacgtggtgaaaccctgtctctactaaaaatacaaaagttagctaggcgtggtggcatacacctgcaatcccagctactcaggaggctgaggcaggagaatagcttgaacttgggtggcggaggttgcagtgatccaagatctcaccactgcactgcagcctgggcaacagagtgagactctgtctcaaaaaaaaaaaaaaaaaaaaaaaaattatataggccaggcgcggtggttcacactggtaatcccagcactttgggaggctgaggtgggtggatcacctgaggtcagagttcgagaccatcctggccaacatggtgaaacaccatctctgctaaaaataaaaaaactagctgggcgtggtggcaggcacctgtagtcccagctacttgggaggctgaggtaggagaatctcttgaacctgggaggtggaggttgcagtgagccaagatcgcaccactgcactccagcgtggcaacagagcaagactccatctcaaaaaaataaaatgaaaacgtataaaaaattataagttgcacaagacaatgaatgttgtagtcttagtgaccgatgcagtaatgcatctgagccaagtcacaggattaaaatttagtgtttctaagaaatccctgcttttgtacatttggagaattaacatacacaataaaatatgtaacttttaacaaatatttccataatttgaatgaactttcataacttagccacatgagggcaatagaaatacaaacgcaagtttttattttttcttcatatttcaggtaagtaatttgcaatgcagactaaaaatacagtctgccaactaaaatatttttgaaatcttcccttagcaaatttgtctggtggttgtttttttaatagctaggattaaagttaaggaaaatcttaagctaagcattaaacttattatgttcttggtagctaagatctcttaaattgctttggagaaaaatgtgaggggaaaaaacgtttcacggtatttctaaatgttttgttttaaagggctctctaaatacgtacagattctgcgataatgtgtggacttttgtactgaatgatgttgaattcagagaggtgacagaacttattaaagtggataaagtgaaaattgtagcctgtgatggtaaaagtaagtgcttgccttatttctgtgaaagctacttgaaaccttgtttttatgagcctttagaagatctgcatccatatgaaaagcctaacgggtaaaatggccctatgatcaattcccagataagcccaggcttttatctccactaaattctgattacatatctcaaacagtgctcttactttgtgacttaataacatatagactgcttacacaggttggatttgtgtgggtaaaataagcaaattaataagcatttgttccctatttccattacaaattttaagtgtttatcaggcttttcagacaccttttactttaaggaataatttttacaatcctatggtttctatgttgctggagacccatatatttaaagagttattttaaacaggattttaattagccataagaactttggagtcatgatggtaaatattcatctaatctgttaaatatgacatgtgcaagtgaacttttcacaccagacctaggaacttcttcaggtccttaaatgtttcaaaaactatacacctaatttctgtttcatgattagtttatttcctttttgctaattatattattttaaatatacttcataatctgaaccatttgtgttaagagcagctattccagaaagtaaatagaaaagactgctgctctttgacacagggagttttgaaaagcaagagaaagatatgtagaaagtaaccccctccatttccctgtttgagtcggatttgttttatatattttgcatttccaaagaaatagctaatcaatcaatcactgaaaaaatgtagagaatacaaaaaagcacatggaagaaaaacgttctctgtaacactacctgatggtgttataacttttttttgcaaaaatgtatgtatatgtagacattagtaaatgtatttttgagtttactactcttaagccttaaaaaaaaaaaaaaaaaaagagtcttgctgtattgcccaggctggtcttaaactcctgggctcaggtgaccttcccacctccttctcccagagtgctgggattacaggcgtgagcccctgcacttaagcctgatttttagtagctatataaaattacaccttaagccctttttaaagaaatagtctcttccagatatcagaaagtctctgaacctagcagcgttattgttggggacttgttatagttcagaaggttacctaggaataatcattctaagaactttgggcatagttaactttttattatagtcattagatacatctttgtcattacagcaaggaacaatatttgggtcttttttaaattcctgtgaaggtggtgctgtttcctgaatcacaagataacatttctatatttgaaattgtgtacaatttttttcatatttaaggtaacagcatcctcgtaacccttgttatatttatttttattagtctgtagaattcagggattaatttataatacctagatctctatcaaaatgaattaatgacatacaccagtactgcttagaacttttttttagcacggacatgttctgttgcattttccaatagccactcatggctgttgtacttgaaatgtgggtatgggcagctgaggaacttaactcaatgttttaattttattaatttgaatttagccacatatggctagccagtggttaccatattggacagaacagatgtagactagtagagtgtcagtttcagtcatttgaaccatacatttgaaccatagctgagaaccagaaaatcagtaaataaagcctctgaacagaataaatactggtgtataatatcaaagaatccatgtaaagatacgtattttactgataggagctcctgtctggtagtccttagagtgtgtttctctttactatacaagattgttttccaaacttcagtggatgagaagtagcagattggccttgtttattgcagtagtttttgaggattttccctcacacttcagcacggtgtagtaattgatctttagtgagaagattgttgactcaaggaaagcttaaattgtattccatttactttatatctgcagaaaagaatgcagtgttagaagtttgggacagtaggccaggtgcagtggctcacgcctgtaatcccagcactttgggaggccaagttgggtagatcacttgaggccaggagtttgagagcagcctggccaacatggtgaaactccatctctactaaaaatacaaaaattagccaggcatggtggtacccgcctgtaatcccagctgctgcggaggctgaggcaggacaattgcttaaacccgagaggtggagattgcagtgagctgagattgcgctactgcactccagcctgggcaacacagtgtgactctgtctttaaaaaaaaattgccaggcacggtggctcacacctctaatgccagcactttgggatgccgaggcgggcagatcacgaggtcaggagatcgagaccatcctggctaacatggtgaaaccccgtctctaaagtacaaaaaattagctgggcgaggtggcgggcacctgtagtcccagctactcgggaggctgaggcaggagaatggcgtgaacccccggggggcagagcctgcagtgagccaagatcacgccactgcactccagcctgggcaacagctagactccatctcaaaaaaaaaaaaaaaatttgggacagtaaaggacctgggggaagaaaggttatgtaacaattatgtgaaccaaatgtagttcaacttagttttactctagtatgaatatgaggagctaagcatctttgtatctctgcttaaaaggaaacttactgaagttcaacatatttacagtgtcacctttcctcctgttcttccccaccctgcaagccaccaccactattagtcctgtgttctcatttttgatagtcttaaaatagttaattgtaaaattaaattgctccttgaatttactttactttactttctcttttgtttcctagatactggctccaatactacagaatgaatagaaaaaatatgacttttttacaccatcttctgttattcattgcttttgaagagaagcatagaagagactttttatttattctagaattgcagaaatgactacactgtgctataccagagaattccagtagaaagaaacttgtaactctgtagcctcttacatcacctttattatacagcatgaaaaaccataacttttttttaaggacaaaagttgttgccttcctaagaaccttctttaataaactcattttaaaactctgagtaataactggtgaagctattaaggtagcaatatgaagatattagataatgcattttcccatttcctttgcaaggaacatgatgccctttcagaatgcttatttcaataaagtcatgttttgtcagttgtaactttacctgatgaaagcatcagcaggggcaaaaccaaactctggatggaattttttaagaaaatcccttgctttttaaaatacaaaaccaaagttaatcattggtataaaaaaacccaagtacaacttgattaggaaaagttagacaatcatagcaaaaacaaaaccaaaaaactttccttcttagaccaggtaacatgaggaagggggaaaaaaacccaaacaaaatagtccccccacatgacaggtgtcttcagcttgccatattgatccaaagttcatacattttatcatgtacaagatacattagacttacaataaagtctaattattagacttttatgtcagtggattgtgcttgcagaaatacagaagtaacatactgaccctaggtgaggagtttcttacatggttaactggattgacccaattggagtaaaagatttttgctgttacctcgatgctcctgcagttgttacctcagcatgccactgtagtccttgactctcacattaaaactaactttggctaggtactggtggctcacacctgtaagtaatcccagtactttaggaggctgagactggaggattacttgagtccaggagttggagaccagcctggccaatatagactgtccctacaaagaaaataaaattgtttcatcttcca

SEQ ID NO: 168 - DNA, 13117 bp, Homo sapiens
  source 1..13117: mol_type = other DNA
ggttggtgacgcgcgcgcagttctccaggcgcagtgcgcgcaggcgtgggcagcagcgcagcaggcgcgccaggcagtcgtcggtaacgtggccgcagcccgagagcgtgacggacgccaggttggggcacctgtgaggagagtgcggtgacccggggctcactggcttgttaaagctacccaaccgccccatgggaccgagtggactcatttaccgaggaggactcgggccctgcgaggtgaagacacttggctgcgatgacactgcagggttccaagtcggctttctggccggcccattttccctcctctttctgcccctgcaccccaccgtaccttcatctgcgtgggttcttggctcgtagccttgggagcccctagtgggaagccccgaccccggcccagcagagtcctggggcggctgtggacagagggaatgccggttccaggagccacaacccttgactctttgtttcgctctggatgtgctgccttgcaggggagcggtgcttggcgattgctccagtctagcttcaagctgaggcccctgaatgtcccggcgggacgtgagtgggaagagggatttgtttccttggaggtggcctagtgacaggcccatcccaaccctcaaggcggtgggggcacgcgttagcattgagtccgggttcagcttagtagactagagctgttcctgcatcccctgggccaccagcctggaaaagggtagggttcggaggcagctagaggcaagccctgagcaggtacagtcacggacacccacccaggtcgcttggccagaaagcttgggggaccctctgctgcagcctcaccagcccctcccagcaaagaaaagatcttgagccaagttagacttggtttatcgccgtgtcagtcactcacggagccttcatttcctctgcgtggggggaataatgtctaccactggggttgtgaggagcctgcaacggggccttccacaggcagtcctaacccgctttccctggaaacaaacgggaccagcctgcttccagtccagaaggaccgactaatgggccggggccttggctccccgcagccagagggagctagagtctgggctggggaagcgtttccctttccctgccagcctcccccgcagctccgtgactgcccctggctgtgccagctcggctcctttgtgccaggggagggaagtaaggaacttaaatatgttgggtgcagccaggtgtcacaccgagcccgggcctccttcaggtttgtgtgccctcattagtcaccccgtcaacctctgcacccccagttttgtacatgaagaaactggctccggcagctcaggtgactggctggtgacttatttgctgtcagacccaggacagatgtctgaaccttgctgggcgtcacttcctcatttgtcaagtgggaggaattgttaccttcaaggtggttataaggattaggtgtttaagcctcaaaggtgttgggtgatcttttcttctaagaatctttggaataattctgatacagggaaaaaacaaagagcggactgtccccctgcccagccatcctcagccattcctcccgacctgagctgagtgccagaagaaccagattcagtagacgttcatcagtacctactatgtgccaggtgccactgtgtcatttaatcctcttaccctgttggataagaaaaatttagcacattttatagaagaagaaatgaggttgcaagagtttgaagtatttgagctggggtcacatggttggacgagctgagcggctcagcagagtgctgacagcaaagccctttgctctttatgtgacagcagggccccttgcttgatcagtacagtggcctgggaggtccacttcacaccttgcaggtttggggcattaagctcggttctcttacagtaagaatggaacaacttcaggacatgttgtgccattcgcctccccccaacccccacccatgtcactctagtctaattcctgggccttgttaagcccatcaaaatagccttgtccagtcggggcccaaccccaagtccatcttctgttttcttcctaccagctcaaaagaaaggtggggtcactacgctgtttccttccactcctgtcgtgctgccagcaaatagcagctatgaacttgggtggcagtaaactggctgagtctagttttccatgaacagccagggccagtttgttatatgatcaagggggtgtttttcctcaaaggcagcacgggactggcagaagctcagtgagaggctggttgaatagctctgtgttcttgcctgggccgctctgcccatgaggctgggaccatggagggagcctggcctggtggttcagtgtctatgtctgtgtctggggtgggggttagcagataaacacaagatgtatttgggacatacttacactaaaatattattcactgtttatctgaaattcatatttaactgggcagcctatatatttgctaaaatctggcaaccctagactgggcaaatcataccacctcgtggagcatcagtttgctaatttgaaaaattaggctaagccaccctccttaggaatactgtgtaaatcagtaattcatctactcctggagtctggtttggctcagctgacctgagcaccctggcttctccacctctggctccccaccctctctttcctccgtagtttcccaggccttgagggctgcttgctaggcctaatggaggggtgagctgattgctgcatctggaagccttttcccagagcctgaccttgaaaatccaggcccagctggacccacccagcacttaatgactaccagtacggaggccccacttcttggtgtttgcatgaagcagcccaggacctgtgaggctaagaggaggattagcaattgtttccctcatgattttattgtctcctggggaccctgctttgggcggtctggatgtctgccttgggcctagtttgaggcgccccgaaggtggagccatcttggtctcgtaatttgctcttccctgccccccaagagggaagccagagctagcggggccagcactgctcaggaggcaaggtggcctacctgtcgcacacccggaggaggaaatcattgaccaggctctcgtgccggctgcagatgcttctctggaaggcactcttgagccagtcctcaatgctgcacacctgcacgcggctggagtgccagcagatggagaggctgcggagtgccgggcccaggaggaagttgtccttctggagttcagtgagggaacggaagtgcagcagggaccagagtgcggggtcctcaaacacgtcgtggagctgggagcaggtcctggcaaggctcttcctgctgtccttgtctaggaaggagaagaggtgcagcaggcactcccggttgagctgggttatgtgcatggtgagcagtggccacatgtgagtgcagctgcagccgggggacggctgacctgcctcctctcctcctccccgactctgggccggtggacatatatggttgaggaatggtgtttatttttggctaacaactggtgctgaagctctgcggaggggtgagggaagaaaagccaggacccagacacatgtgcggcagtctgtggttcggcttatgttcagagggattggaggtcctggcagaaaaggagcctattgaagttactttccttaaaagggattttttttttccctttagctgacaatggtgtttagcagtgagcacttttggcttttcccaaggcgttttcattggcagtggtggcggccaggccagctctgtctggctttgcagtctgtacttagggggaaggagtgtaattgtaaatgttaactgttttgattttctagtacatcagtgtgaatcttttgctccacccttactaggaagaaacctgttgcgtgtggagagctaagggtgacggttgtgagttgtgagcagagtccatggctgctgcctcattcctgttatttttgtgccatagagtaattgtctccaggctaggctggttggccttcaagccctgctgcctgccactaggcagggggattttcctgggcctccccaacagctagatttttaccctgagttgtttcataaaagaattttactgaagtagctgctttccaaagttgtgtgtctgtgttttatgttttattggtgctttgttgttgttgttgttgtttttgtagttttggtcaagcagtactttctgtgttttaaatttaaatttacttggctttacattttctcactgataaggccttgtactatgtataacctgtacttcccaaaatgtcaggatggatgaggtagctcttaatgtgaaactgcttgaaacaattttaagttcagtattttagtccatctttgcctttaagttgaccacacaccatccattctatgagtgccctccgttccctcttggagaagccagtgggccacccctgccctctctgactcaactctaggcaaggtgcctggaggtactatccgtgaagctcccccttcctgagtacccgaggcttcacgatatggcagacccgtttcctcatgctgcttcactcccaaacccaggacccaaccttaactctcctgctttgaatcccagtcgttgttttttggtttgcttgggggatgctgatatggtgcagctgtataggccacgttctgcctaggcaatagtgagaagagaatggtttttcctctgccagcccagggaccaccacctcagtggttacttctgtttgttctcccatttggaataagagggaatgggaatccttgtgttttcccatagacacaaatgaagcagcctatgctgaacccacttctggaactaaggtttggtcagggctggtgcagctttgcctttaaagcagaaggcagtcaagcaaagaaggaagtagccattgtcagtggctttcctgagaagccagcctcagctggtgcccctgtgcctccattactccaccatgccaagatgaagtacagtagggggttctcttaaaaacaaaccaaggaggtcgaaaggaagcatttcccaaggaaggggagcaagatactgctgctatttcaagctcatcaatgtagttctgaattatagctgacaccctaatttaggctctgtctaggtgtacttctccacttaaaatggatgctgcaaaaccacaggtggtgttattagaaagccacattatctccactttccctccccaatcctcctcaaaccaatgcttttcagagggtttgacccttaggaataggtggttctttccacttcttgcaaggccagagtggtacttgtgccttccactgagtaagtgtcactgtgcttcagcatggcttccaagttgcactactgcagcccagctggaatggcaaaagattggcagggagaacatttagagcattgcccctctgctgttcctccaggtaggctgcaggaagcatcctagactaccagggccagggggaatgtgctcctgcatgctgcagagggtctgaggcacagccaggagatgacgaagctctgcccctttgggcttgtccagagctatgctgtttggcagcagtgacagcaaccacgcagcctctgaccagcacagctgccaaaagaatgtgccctacggaacaaggatgcataacaatttgagctgcaggcacctgtgtcttcaattttagaagactgacaagaacaggcaaaggatgactgtggaaacagggttctgtctgcaggaggcatgggggcagggaagtagtctataggaacttactgtaaacaggatgtttatttaaaagcacttatttgcctgttttaccttaaaagatgaccagtatcctttgctcagagccccaaaactagtgcctcagggtagagtctagctctaaaggggaagggaaggggcctcatttttataagatcaatagtcacaagagactgagggtgatttcactgggcaaggccgagtgggacctcaggcacctgactgcaggcactcatctccaggccatcactttgcccatacaggtcacttcatcctggcccaggtactgcagctccaaatcgtggggattctgtaagagcttgctacctgttgactgaggaggcccacgagttgagtaagtacatcatcatttatgtggctctactgaaaaaaggtgttcagaaataagtcaaaaggaaagagaacagacttttaatgatatttttaaaaacagttcaggttggtgaagcagaaaagggatgtgattacaatttaaatgaatcagtcacttgcacaattaatcctcttggcatcatacaaactgggttttaatggcaaatgatgacatcatagcatgaccaacactcatggaaggcagtctagagtccatcacgctcacacctgagggggaaggcactgcacccactgacgagacgcagagaccttggactacagatgacaccacatgcccacttctccttcctcaccttcctatggctactcctagtcacctgggacccaggccttggctgcaggaacagactttttccatcggcttttccagggcccaggtgaagaggccacttcagcaacagagggtacaggagagagtttaggggctggtggagattaaagtgggataagtgtatctaaatagacttatgtacactaaaccaatgaaggagaggtttggctttaagaaataaatatgcccccaaccccagaaaccaagctgctgagtaggttccacaggcgagatacacatttaacactcaccccgggccagtacacttgactggtttaattctagtacatctgtcatcactatacactgagtagaatacagtggataagcaaaggtttctccaccatggagagagatttgtgttgccacaaactgtttctgtcacccacccgtgtggggacttctgagaaagttttcttgttccaaggagccatgtgactcagcgcgaggccctgcctcagcagaagctctgagccagaagccacatatattgctggagacaacatggcacaagggaaaagccctgaagaggacaaaagatcagctttcaaaataggtgtggtaaggctgcacagttaaaaatgaaaacacaaataagcacatttacatcactgctgttcaagtgcacaattgagatggatccaatcacttttctaaagaatcttcacaccattcaaacgtttctgttcaagtaaaaccaaccaataaaaacaaattcagagagaagacgtgttcatctcttaagccaacagcatcacctgtctgaagaccactctgcccgacaaagtagtccaacgtgttgctgaagttccatttggtataaaaatacagctttttttcaccatcaactctgcccaggcctttactgtttaacagctgcccattcagagagactgaagatcgaagtatcaatgttagaggttacagctgtctaccttctaagcaaaagagcccggattcataggagatactttgcaagatcaaaggagactcacatttcaggttgaattagatgtgatgttaatgtgtgatacatcagatcaggtggagctgtcatttttgtagatcagaactcatcaaatagcagggtttcatacagtttaacctaatataatttagcattgtaaattaatttaagcacacatctccctattatcttttaggactcaaagttgtaagacctaaacatgatggcaaagttttattctttggagtgaaaatttagaccagcattgtcctacgccgtatgtgggtgctgagcacttgaaatgtggctagtgtgactgaaggcactgagtttctaatttaaatttcagtcacatgtggctaggggccattgtactggatgatataagtttacacataattgtaatttgctccttgtcatgttaaagtgtttagcagatgtgttctgggaagatgtgggatttatccagttaatattaaaatggaaatggagctacatctgctcccacaacttcagatatccaacctgagggaaagccaccagactgtttttatatcataaacttaaaaaaaaaaaaaggtcaagatgtttttaatagaacaggctgggcgtggtggctcatgcctgtaatgctagcaccttgggaagccaaggtgggtggatcacttgagcccaggagtgcaagaccagcctgggcaacgtggtgaaaccccatctctagtaaaaatattaaaaattagctgggtgtggtggtgccagctacttcgaggctgaagtgggaggatcgcttgagcctgggaggttgaggctacagtgagctgtgatcatgccacactgcactccagcctgagggacagagtaagactccattaaaaaaaaaaaaaaaaaattgccagaaagtctcgttggcttaacacaagatacattttgtcccttgtggagaattggtaggctatgtctaccaacccccaccgcccccaaccaaaaaaaagaaaaaaaaaaaaccaccacaggactgtcttagaacacttgtagaaaccacaactgctttctttaaatgggattctggttccaaatttgaatctttgagttaaatctgttttttaaaaacaaaactgtctgggcgtgatggctcacgcctgtaatctcagcactttgggaggctgaggcaggcggatcacctgaggtcaggagggaggttgagaccaccctagccaacatggtaaacccccgtctttactaaaaatacaaaaaaaaaattagccaggtgtagtggtgggcacctgtaatcccagctactcaggaggttgaggcaggagaattgctactcgggaggccgaggttgcaatgagctgagatcgtgccactgcactccagcctgggcaacagagagagactcttgtctccaaaaacccccaaaaaacaaaacgaaaactccacttacttactccaacagtattttcaacttgtcctatcaatcaggataggccagagagaggtgttaaaacccagagcagcgaagattctaaatttcctcctgtggaagcacaccccccagtgataaactgaagtgcgggtgatgatccaagtaaatcccagagggtcacacctcagactcagatgccaaacacaagcagtaagtaagtctataatggacatgtcgtgacttccagtggtacaactaagggggaatgagatactgattcaaaaggaggcagacgccatggctttacctcactggtaacacctataccatgtcagtgagtcacagcattttttttaaacattacatgtatttggtctttactcccatcttacctccccgcaaacaagtatgccccaaaaccaaaaaaaccaacaaagagagtaattcttgtatttgcaggacaagtacaactgaaccaacaaatttatttagttagtgctgataaagacagcagccttgagagacaagcagtaattacctggtctacttaatgatgccctttgttatattttacaggcaaaaagaatgattcctcagcagtcattgtgaaattttgtgggccacaagtattgtgcacacatgatccttgatttagagtcaacctgatgtccattatagctgtggaaaggcagcaggcagttgtgtcgctcttcacaataaggaacacatcttgctttcagcatgtgagaggaacaaaagcattgatgtaaatgtgcctcaaagtgagaactgaaaacattaacataaaataaaaaagtcaaataagactaagttcttacaactacctataaaaattgaattattacaactaaagcagcaaatcaaaacatctgctgaggttttctggtagaacaacaacaaaattagttggtgcccatgttcagtaagtcactaccattgacaaaactaaatccaaaataggaaattgaaaagtgcataatgaaattaaatcttgtatcaagtatttgtggaaaactggaaatgtttctctggtatggttggtgaatgatgatttggaggaggtattaaagtttatccgatccagctttggcctggtgttccacgtagaaaaggatgtaggccttcgccttcaccacagtctcctcgtcagtcagtgttacagtactgtcattgaagtggaaccagcggccttcgtgagttgcgtatgctgtgtaatgtccagaaccaaccctgtaaaggcaaaagaccaaaggaaaaaagaacctcagaaatcacaaaaagacctgtacaactatataatgttagatttaaattttaataagaatacatcctagacttttgatttaagatgcttgttaaattaatgtttttaccttcctccaaactgaccagaaatcgagggtttgctagaacacaaagcagatggccctggactaatggagaaaacagagatgaggaactcgcaacctaacaagcacaggtcaaagcctacggaaacatggaaaactaggtaccaggttttcccatcagaatcttaggaaaaaactaagcttaacaaagaagggcacccttccctgacaccgtggtcatcaggggctctaccctatcagcatgacccacccactcacacacacaaccctggagtcagtcctccaagtcagacggaaggcctgcagctagaacagacctttgtaggtgccaggaaaaccctatttaaataataaagatccatctcatcatttactatgattccaaataaaccaccaaaaccaaattttaaaaacaagccttttgcacgcctacaaaatcacatttttgaggggaaagaaataccgggaagaacaagcaaggcaatcaaccctgaggaattgaatgcagaaaacctaagagaactttacatttttaaattagtgctaatagtttcaaaaagatagtgcaatcataaaacaagaataggctgttacgaaaaagttgtcagaaaaatgtgactgatttaatataaatattttatggaggagcttatcttttatttggatacagatgaaacccaaattggtgatttggaaaagtaggccatggcagtctttagaaacacagacagaaatcattagagtatttaagacatgtggaagggagatccaggaaattcactatgcatataataggggtacagagaacaaatgatttcagacctacagtatagagagtttcatgagctgaaggcaccaaattaaaagtgtccctaccaactaccaagcaggaatacactccaaggagaaaaaagccaggtgcctgtaaagtagtgagaatcagacttgtcattcataacactatgtgagtgtagacgttactttatcacagctctgcgggaaaaggattttcaacatggatagtcgtctgcccacatatagtagtcttaagtttgaaggtaaaatagccactctcaaaccaaaaaccagaaggttagacccctcatacaaactttcaggggaaaaaattaatgttttttaacaagacttaaaatgagtctttaaagtagatgatatggagtaagttattccaagtaatttccccttttgccccatttaaatttcagttggtaaacgaataagcaactttggagtttgtggacaaataaagactgggtcgtaaatactgggttcaaatgaaccattcttcatttcacttttatttaccttcccttaagccttcacaacatcatctgaggagtactcttccgcaccaaaactgaaggaaatttcacctactttatctgaatccattttttaggaagaactagcaagagtggtacaaaactgcaggtcattgggctggccaccaggtattcccacccaccagaagctggctgttgtactcacccggaaccatggtgcaccaccacagcggcgaggtcatacaggcagctctccgggccactgttctcaggctacagaacaaggaagaaggagcagtggtcaatgacatcagtatctcgatgacctctaccctctccatgtgatgacaatcttactgaagagccattttttcaccatgctaaaaaggtaaccaccttacctctagtaagtagcatttcatgtctaggcctctcagtggaaattctacgtatgtatcaactttatttcttaaatatgctgtccaatgaaatcttttcaaatgtaagcatagcacctggaggacagagatgcggtcaaagattgtgaacacctaatttacctttcagtcaaagtttgatactactatcagttcagtaaataacattttagctgccctatcaatcattcttccatgcataccttatgcattcattctgtaaggggtttagcttttactgaaaatcctagagaaaaatacagaacagttcacatagtgtaaagttatagacatggtcttagcagtcaagcactttcccattgaaattgcttcataactcaaaattcaacactcaccttgggtagtttttgaatccaaaacttttttgtggacttttgtttctttttgcatttatggcacatatataactctgtctcatcaagttcttctaagtcggtaaaactgcgaagacaatctaaacaaattgattttggcagcattaaaacaagatgccttttgtagaggcaatgtactgtagaaaaaagacccaggtttaaaatctcagctttattagctatacgaccttagaaaagttaacctttctcaattgcaaactggagacaaaaaataatacctactttgaagaactattataaggaagagaaataatgtgtagagcacctggcatcatgcctgacatctggtgatgatcaattgtgttggttttactattaatgataattcatctggataattctgataaaatggtttcctgatgaatttaaagtttcaattgtagttttctgtcaatatgttacattatacaggacaaagctccaaactcataaaaaaaagtcaaatttagataatttaaaaataaacatagatcacagaaggctacactatcaaccttctctgtccagacgctgtactctcagttcctagataaatcacagctacattttttttcatttaaagatgtaattgtgtaacctggggtttagtaaactacagtcctaaaacatccagccagccacctggttttgtaaataaagtttcattggaacag

SEQ ID NO: 169 - DNA, 32531 bp, Homo sapiens
  source 1..32531: mol_type = other DNA
cctccgggatgagccagaaccctgcccgggcgaccctgaagctctccaaggaccgccccgcccagcgcggagtgcaggcgccggattcccttctgtcgcgcggccttatagttccggctgtggcgcgcggacggaaagtttatgccgacggaaagtttatgccgacggactgtgtccggcgatgggcacggggtgagtggggaggccgagggcccgggactgcctttcgctgcttgttggggttacaggtgaaggggttatgggtgaagaacaacccagggccagcgcttggccttcccgccaccgtggcggccgccccgcgctgtctgtgaggcgccagttccggggcgctgctcccggcctcccctcgctctgaggctcggggtccccagctccgcgtaaactgcacgatttcgccctctgctcagctcccctctgccccctctttccaagagagacttccagatcccacattttcttgactgatttttaaggtaaaaatacatctcccagatgtgattttcagtctggacttttagagatgaaattatatctgagaactggggagggactcccggaggctgacgggaaagccaaagagcaggtgaggcactagaaattcaggtagaatcctgctttgagagcgagactgctgagaatcagttctttatgaatgagctaattatcaccttcagggaagaattacaaacgtctagctgatggacacttggtattcaaggccaaataggtggctagggcctatttctcagactgttcctgagaaagaagagccctagttgtttgaacagtacacgtgggaagggggtgggggtgggagacttgggggctcagaatccacccaagtgaggaatacatagtgttgtgctcacaaaattggtagactgtggtgggcagggattcccccccacccaagacggagtctcgctctgtcgcccaggctgaagagcagtggcgcgatctcggctcactgcaacctctgcctcctgggttcaagcaattctcctatttcagcctcccaagtactagaaccacaggcgcacgccaccacatctggctaatttttgtatttttagtagagatggggtttcaccatgttggtcagactggtctcgaactcctgacctcgggtgatctgcccgcctcagcctcccaaagtgctgggattaaaggcgtgcctggccttttttttttttaatcaggcctatactgcttgagtgaactatccttcaggaactttcagttccctcctttactccaacctgagtactaaattgatctcccacgactttgtaactgttaatgaggtgcatttgggagtcgacacaaatgcatcacttgggagaaagagccagctccagaggtgtcttcagagaaggcaagactgccagctgtcatcactgtcaacagcagatttcacgggctgaaagtgcttttttgtatttgatctaagtctgtgtaaactgtttcctcccattctcctaagaggtgagggcagtactcctcatgatcctcaacttgtaaaaaggcctccctgcatgaatgggactaccacaggagctgggcagacgtgagggagtcccccatatgtctgcttgaatgaggagaagaggaaatgtgtttctggtgtccagagttaacatttataatgtattttgctaaataatatatggtatatctggtgatttaggggtagttcatcagttgttatcaaattgttgggcacctactatgtgccagttactgtgataagttttgaggagacatcatgggcaaaatgtggcatggtccctgcccttagtgagcgtatgttatggtctaatatagtgtagttgaaccaatattgtgcaggacctcactttttttttttcagtcgggcctatactgcttgagtgaaccatccttcaggaactttcagtttcttcttttacgcctatgcttacaacctgagttgtaaacattgtttccatgaaccagtgtattctgagttcgaaacagcctacttacaaatggaattttggctgggcgcggtggctcacgcctgtaatcccagcactttgggaggcagaggcaggtggatcacgaggtcagaagttcgagaccagcctggccaatgtcgaggtcagaagttcgagaccagcctggccaatgtggtgaaaccccatctctactaaaaatacaaaaattagccgagtgtggtgacacgcgcctgtagtcctggctactcgcgcctgtagtcccggctactcgggaggctgaggcaggagaatggcgtgaacccgggaggcggtgcttgcagtgagcggagatcgcgccactgcactccagcctgggcgacagatgtcgcaagactccgtctcaaaaacaaaaaagaacaaatggaattttagaatatgacacatttgcagctgggcaccatccttaaacaagtaatctggctactgttaaatgttttgaagttaatcccaaaaaagaaagttgtgaacattaaatttctaacctgtttatatccacctaatctctctaattgtatatttgcattatgatttttatgaagttgtaagcagtgtataatacagttctggggcctgcttttctcagttactaatgctttctataagtatttctgatatctgtagtacatatgtcatttatttatagttttatgatatttcatcatgtcagtagcctacagtttgcttaataatagagtagcagcaggctatatacccatgagcaggtctgtgtatctgtaaacttttttatttttgagcaccaaaatgttttctttatgctaattctcaatccataattttgaataactccatttgtacattttgacttttctacccaatttcatgagataattccagctgtataaatttttttttttttttttttttttttgagatggagccttcgtctgtcacccaggctggaaggctggagtgcagtggcacgatctcggctcactacaacttccacctcctgtgttcaagggatcttcgtgcctcagcctcccaagtagccaccatgcctggctgatttttgtatttttagtagagacagggtttcaccatattggccaggctggtctcgaactcctgacctcaagagatccgcccacctgggcctctcaaagtgttgggattacaggcatgagccactgtgcccgaccttacatattctttaattttgttcttttccttcacagttgaagcaccattggccagtttatgtacaatgaatactactgaggctgacagtttattacttttgttatgtgtaatgatttccaatttgtctaatttggtttatgactttactagtcctttcatttttatatttggcattcattttactaaaacaagagcaccaaccaacaaaataattaaacacatgcagtaatactgcaaaaaggttgtgacagtgccaaaaaacaatggttgtttgtcaaatagcaccaacatatgacaactagaaatgttcttcagtaaattaagtgttaggagatgtgggagtttattaagttgcataaaagtcgaatgtgtgaaagttaagggctacctgaatttagcagggcttttttttttccagtagatatatttagatggtccttgatttatggtcacttaatgggtgattctaagagtggtccttacaatgaactaagctgctcacttccctctcactgagttctctacagattattcctcacctcaacttaaatggtgtttgcctctgctaatttctgagaagttagttaaagttatggtgaaaaatattattttctctccatgacatgtaagaacgtatttattttctgcagcatttcttcgtttatagctgtctgtttgcattctgattgggaacactgggatcattttcatcatgccgacagtggtggtaatggatgtatccctttccatgacccgacctgtgtctattgaggggtccgaggaataccagcgtaagcacctagcagcccatggtttaacgatgctgtttgagcacatggccacaaattacaagcttgaatttacagcacttgtggttttttcatcactttgggagttgatggtccccttcacgagagattataataccctacaggtacaaaatgtagtaagttattgtatgtacagggcctaaatttattgggaggaaaacagtgttataatgcgttgaatatttagaactttggcattatttaataagtctatgagtacttaatatgtgtaactaaacagcaagaattcacaaccagtaggtcttatgcctactgtttcttcggtacagctatgagttacagctgtgagttgttcccttattttcctctcttggttttctggaattctctgtggaaaagtgagcatctcaggatgtagtgttccattccctaaaatttaggatctttaggctcaacacttaatttttttctactctcccataaaacttgaggaaatgaaaaaatagccctttcttattctagagtaattcaaaatgatatttcctttccaacaaatagctttgattttgataccaataaattataatttttaaatctcagttggtagatattatctttcaaaggtgttttctgtgttatgttagaatttactttctgacaacatctctaaatcataatattcataatatttccagcagtgcctaacacagtgtcttacccatagtgagcagtcaagaagtgtttgtgggccaggtgtggtggctcacgcctgtaatcccagcactttgggaagccaaggcgagaggatcacttgagcccaggagtttgagaccagcctggacaacatggcaagatcccgtctctatttttaataaaaagaaggaaaaaaaaaaagaagaagcatttgtggaattaaactgaacagttttaacaattgttaggtggtttagaaatacaagatcaatagagtttgaattttttaatgtaagtaacaaaattttgttaaataattccttttattatctcagattttttttttttttttttttgagacggagtctcgctgtcgcccaggctggagtgcagtggcgcgatctcggctcactgcaggctccgccccccgggttcacgccattctcctgcctcagccttccgaatagctgggagtacaggcgcccgccacctcgcccggctaattttttgtatttttagtagagacggggtttcaccgtgttagccaggatggtctcgatctcctgacctcatgatccgcccgcctcggcgtcccaaagtgctgggattacaggcgtgagccaccgcgcccggccttatctcagattttttaagtgacttaaaagctttttttaaaaaaattagtgacttaaaaaattttttttaaatttcttttcctgtaaaaggatattaaacttttggtatatatgctgactttcttacaggtgaataaactaaggatttctgatgttctgcagttctgaaatttagagaattgctatataaggagtgagacgtaatgttttagaccaggagccctgaagtcagactgcatacttacaaatccaggttctgccaccttagtcatgagacctgggaaagttatttaatctttctataccttaattacttcatttaaagatagggttaataatctataccttatagttttattgtgatagctaaatgcataaaagtgcctaggatggtgtttagaacatagttaatattcaatagattttgttattatttttgtgatgtgtttaaaagttccttttaattttttccttcaaagtccacttaacaaaaatgtaaacttggtggactgttcactcttacctgataagaggatagaataaatggaattcttttaactatctttaatagttgaagaagtctgttctagcatttttctttaagaagctatgctttggtgctctcagatacatcagtgtcccctgtgtaacattcatactttgaacaatttatgttgttttctaatacctaattaaaactaaagagtaactagcaattttatcttttattcaataaggaagcactaagtaatatggatgattatgacaaaacctgcttggagtctgcattagttggtgtttgcaatatcgttcagcaagaatggggtggtgcaattccttgccaggtaatgatcaattctttttcattgccctaagttaacaacattaaccactgaggtgcttcgattttcttcaggctctgacacagcatgcattgtaatttctacaaactacattttacactattggtatcttcttaagtgaaggtactaaatcaacactaatgtgttcagaaagcagcaaagttatgccttaaggaaagcatcctcctagtaaattgacttattgcaaactagtactgttatataaaacacaaagggctcacagtggaatttttgaactacaatccctggaaggggtcattataattttgagtgataaaattgtaaacatcagtataatatagcctgtcttcattatctcaatgcaattattcagcagacttttttttttttttttttttggagacagggtctcactttgttgcccaggctggagtgcagtggagctattatggctcactgtagcttcaaccaccgaggctcaggtgattctcccacttcgtcctcctgagtagctgagactacaggcaaatgccaccatacctggctaattttttacattttttgtagagaccaggttttgccatattgcccaggttggtctcaaactcctggctcaggcgatccgcccacctcgtctcccaaagtgttgggattacaggggtgagccactgtgcccagctttattcagcaaacttaaccatctcaactgagttgtctaaaaagtgaggagtataaaacataaaatctagccaggcgcggtggctcatgcctataatcccagcagtttgggaggctgaggtggacggatcaccaggtcaagagatcgagaccatcctggccaacatggtgaaacccccatctctactaaaaatacaaaaattagctgggtgtggtggtgtgcacctgtagtcccagctactctggaggctgaggcgggagaatcacttgaacgtgggaggcagaggttgcagtcagccgagattgcgccactgcactccagcctagcgacagagcgagactgtgtggcaaaaacaaacaaacataaagtctgttgctctttacttagactccacagtaggccacattagtatcaaatcagagcagagtagtagcagaaaaagataactggaaatttgttctatacagatacttttgaaaagtagtagcatattttgaaggaaaaagcagaaacattgctaaaagaaaaatcataatagtctacaacaggagtccgcaagtttttttgtattttaggctttgtaggtgtctgtggcaactactcagctctgctgttatagcatgaaagcagccatagataataagtaaatgaatgggtagggctgtgtttaaataaaactttatttacaaaaacagacagtgggccaaatttagcctgtgggccatggttggctggaccctggtgtgtgacttttcattatggggtcaaacaaaggattcctcagtaatgtcagtagcatcactagtatttatttattaataaaaaaaaaaaaagattgtagctaggcatggtggctcacacctataatcctagcactttgtgaggccaaggtgggaggataacttgagcccaggagttcaagaccagcctggaccacatagtgaggccctgtcttaaaaaaaataagattgtagttgcctgggagtcagggaaaggtatgaattgactcaaaagaagcaggagggaatctgggacgtgttgggactattctttatcttgtttgtgggggtggttacacgactgaatacaactgtcaaaactcatagaactgtatactaaaaagggtgattttactgcatgtaagttatatctcaataaactcacctttagaaaacaacaaaaacattttttcttgtgaaaacctccctgttttatagaatatagtggatacttgctgaagaaatcaatagatgccttttgatcaatttcttttctgaaataaaaaagctttttatggcatctcagcttataggcattacttattttggtaaatccatgcatataggatgtcttatttcctaacattatagtgaataaatgaagttttgttgtcagtatcttctgaactgaaagctagcaagtagcacagtttcatttgctatttcttctttggttttagaggagaaattcagattttaagaaccagaccttgtgcatcatgcagacttctgacttttatgattttcttcttttgaaaaaaaggaagaatctgaatttgagacaacgtgagggcaaggggccaagcctgaatctgtctctactaaaaataaaaaaattagccagacgtggtggcgcatacctgtaatcccagccactcaggaggctgcggcaggagaatcgcttgaaccggggaggcagaggttgcactggtcagccaagattgtgccatcgcactccaccctgggcaacaagagagaaactccgtctcaaaaaaaaaaaaaacattgtagtagaggtggtgtttactggttattgtttttataatcagttactataaaacaaacttgcttaaatgtggaatttttggccaggcgcgacggctcacgcctgtaatcccaacactttgggaggctgaggtgggcagatcacctgaggtcaggagttaaacacaagcctggccaacatggtgaaaccctgtctctactaaaaatacaaaaattagctaagtgtggtgtcgttcatctgtaatcctagctacctgggaggctgaggtaggggaatcacttgacctgggaggtggattttgtagtgagccgagaacgtgccactgcactccagtctgggcaacagagcgagactctgtcttaaaaaaaaaaaaaaaaagtggaatttttagccaagattttgttttttatttattattatttttttgaaacagagtcttgctctgtcgcccaggcttgagtgcagtggcatgatctcagctcactgcagcctctgcctccgggctcaaatgattctcatgactcagccacctgatgagtagctgggactgcaggagtgtgccatcacgccctacagaagtgcactaccacacccagctaatttttgtatttttagtagacaaggttttgccatgtttgccaggctggtcttgaactccttgcctcaagtgatcctctggcctcaacctcccaaagtgctgggattacagctgtcagccaccacacccagccttaaccaaggttttagacagctgtactgtgtctttattatttagtaaagtctgtttcattttgacattacgtgaaatatttcattatcccatagcatctgaaaaagccgatggaggtaaatcattgtatagcaattcttggtacctagaaaaggaaattgccttgtagtcaattgactgtcatgccaaaagatgacatccttccaggggacctctattaagcattcttgggctttatcagtaagtgccaatcttgatatttcacacagtgccaccacttaatactgccttaagggccgggcgcggtggctcacgcctgtaatcccagcactttgggaggccgaggctgacggttcacaaggtcaggagttcgagaccatcctggccaatatggtgaaaccccgtctctactaaaaatacaaaaattaggtgggctttatggcacacacctgtagttccagctgctcgggaggctgaggcaggagaatcactttaacctgggaggcggaggttgcagtgagctgagatcacgccaccgcactccagcctgggtgacagagtgagtctccttgtcaaaaaaaaaatactgccttaatggcctattgttatcaagttactggactaggctagggagagcaaaaataatcctctcctgggatgcatgggaagtctgtccaccacaggatcattctgaagcaatgaagaaaaggaaaatgattttgcaattactatccattgttggtatattttgttggttttttcaaattacaggttaagaatgcgttttaaagatcttatatatttctggttaaatagcctttataaatacatattctaactaggtgtcattttagttgaccaggcgtagagtttgtcatctttgaaaataaagtggcaaagttcagactactgtgctggtacttcctaggagcacatgtgaaatgaatcttcattccatatttgacattgttatgttaggtaccaactccttatctaagagttggggttctagttttaatacaattaagtaagaattggttgtgaatgtttttgtccttttttaagtgttcagaggcaagcttttaaaaaatattttattagatgaaatagagtaaaacacattgatcttaagtatacagttcactgagttttgacaaatgtatacacctatataaccactactacaattaagatatagtattctttatcctataatgtggagtggggttctagcacctcacaaaattttctcgtgcctttttttgttgttttttttttttgcggggccaggttgagggtttattttgtttttccaaacagggtctcactttgttacccaggctggactgcagtggcatactcactgtagcctcgacttcccaggctcaagtgatcctcccacctcagcctcccaagtagctgggcctgcaggcacgcaccaccatgcccagttaattcttgtattttttgtagaggcagggtttcaccatgttgcctaggctggtcttgaacccctggcctctagtgatctgcctgccttggcctcccaaagtgctgggattacaggtgtgagccaccatgtcaggcctgttttttttgttttgttttgttttgttttgttttaaaaagacagagtctctctgttgcctaggctggagtacagtgatgtgaccatggctcactgcagccttgacctcccaggctcaagtgatcctcccacctcagcctcccaacgtgctgggaccacaggtgcatgccaccactcctggctaattttttttttctaagtttttttagagatggggtctccttatgttgcccaggctggtctcaaactcctaggcttaagcagtcctgccttggcctcccaaagcactgggattacaggcttgagccaccatagccagccctggtgcccctttctagcagtgaaaacactgctaaatgggactgcgttaaatatgtaatttaatgtacaacctcctctctctctttttacaaacaggttgtcctggtgacagacggctgtcttggcattggtagagggtcactgcgacattccctagccactcaaaatcaacgaagtgagagcaacaggtttccactaccttttcctttcccatctaagttatatatcatgtgcatggcgaatttggaggaggtaataccttttgctaagtttttagtttgattaggcatattttacagcttagtttatttttcagtatataccactagtgctatattgtatatactgtagcattgaactccattggtttcagctgaggctggtattttatttgaaaagattctgggtctcaaatgttctttgaaatttcagagtgttgcctcatctggggaacatagctggagttgttatccatcctgctgatgggtgcataaagggtcaaggtgttctttttggtgttgttcatttcccttatatagaattcttatgtccattccaccagaaatgttgacaagagtgtgctttgactttgacagaagagtaaagtaacattattctgatacacgttttattaaacacttaaattcttggttttcccattcatttgggaaggtgatttaaccttttttcccctcagtttttctctctgtaaaatgtagataatgatggttctcaccaaaagacgttagaaacactttggagggaagatgctgtgtaaatactgtggtcacctctgagaatctttgcaaaactactcctgaatgaaatagctctacctgtgttattttacgtaacattcctctttggtaaccttgagtcaaaattgttgttgttattttcttctcacattggctattaaaaaaatcatctgttatttattgcctatgttatcgtaatggctttgaccttggtgagctgagaataatctggcattttgtgccagccactttaagggtcatctgttttgctttatagctccagagcaccgattccttggaatgccttgaacgtctcatagatttaaacaatggtgaagggcagatttttactattgatggccccctgtgcttgaagaatgtacagtctatgtttgggtgagtatatgcttagagctcttttgccttctttacaatccagtattataatttgacatccaggaagactatctgttttactgttcctaattgtgtcatttcattttccccaagttgtacatttttcagataaagtgatgggtagtaatggttttttaaagtaaatctatactgtctgtagatactgacttccttataatgactcagcaaaatttcaaattaacttgctcttgggcttttcagaattgaaatttcctcaccaaaaatgtcagattttgttctgttttacagatggtcagatcttagttttggaaccaacttgaaaggaaaacaacccttgcgtcctgaaaaattaacttcatatgtatcgtattactcttcctataactattaattatcatattctagaaaactgatagatttggcatatacgcctttccatgctgttctcaagtgtggccacctaactgctgatgtacaagtcttccccaggccagaaccttttgttgtagatgaagaaattgatcctatccctaaagtcattaacacaggtaactttttaaaaaaacttatttcttagtttctctgttatccttactttcttctgacttgtgacttttactctcttctctgtctaggaaggttgaaaagaaatatatattgtggtacaggttgagtattccttacccaaaatgcttgggaacagaggtgctttagatttcagattttttggggtttgggatatttgcattttacttagtgattgagcatccttaatctgaaaatccaaagtgctccagtgagcatttcctttgagcttcgtgtcagcttcgtgcatgtgtaatagttgtggattgttgagcatttcggatttcagattttcagataggggatactcaacctgtactagggtgctgttgtcatcagcactttggattggaagattcattacctaaggggtggcagaatattggtcttttatggtaaggtcatcagttgatctccaatcctagataattataaccacgaattattagagttggaaatcatagccgtattcactagcattgaaatctttgagatgattcttaatagacatactgaacttaattagtatcataattaaggtcatataagaagggctagcttctatactttgcagtatgactcttgatatgtgaccctgggaagtcttcctctagttcttattggctaggcagggagaatcaaccagatggtcttggagttcttggatctgatatagtgtactcttctagcactgctgcttatattatgactgaaagaaagtgatgtaccacagcttttacctggttcgtgttgccaatactatgcttaactgagactggcaaagtgaagagtcaaaaatagcaaggagcagtggagaggagacttgcttcctattggtgggtggactccttgaatcttaggtgcatgttaaatcttttagggctggatattatcagtgtttcagtcaccattacagccttgatgtccagcatagtgcctgacacttagtaggtgcccaataggtaattgttcagtcaataaatgattagaattaaatgttcagtgaatgctcattgtttgtggtatacagatttttaaggagtgttggagtgaggggctgtgaacagtctttttactttttgtgcctttagcttctggaagcaaggcatccatctcttctactgtgactagacagtagtacattaagttgtaccaaaagtcttgttgccttcataacagttagattccacttccttcccatcctttttcgatgagtaaatttgaataggtcttttctttcccatataaactcttagtggaagatctttcttgcagctaaactgctttaaaataaagtagacctttttctactcaaatgaaaaatatctagctgcttatactaatgcatttattactcagctaagggaggtatggacagcaaatctccagagaagcacacttcctaatattttagaaatagggtcgggcacggtggctcacacctgtagtcccagcagtttgggaggccaaggcgggcggatcacctgaggtcgggagaccagcctgaccaacatggagaaaccccgtttctactaaaaatacaaaattagccaggcgtggtggcacatgtctataatcccagctgcttgggaggctgaggcaggagaatcacttgaactcaggaggaggaggttgcagttagctgagattgcgccattgcactccagcctgggcaacaagagcgaaactccatctcaaaaaaagaaaaaagaaatataaggtgttcaccatgattctgatttttaaaaattcttttgaaaatatgggtattaatctagaagaaagactgaaaagcacatcaataaaatattaatagagatttcctttgattatgaataatgagtgactttttcttctttataatttttattgtttttaagtttttatattatataatcgaaatgtttaagttcttttggttacaacattcatttttatttattttaggttttcaacaaatacttttggtctttactacagcgtctataaagcagagaagtcattgtcatatttagactgcttaccctagttttgtagagaatacagttctttctcagagagatgtttttaatacaatagctttattcttcaaaggctgagtgtagttgctgcggaagtgtttgactatgatgccccctggtgacctgaacatccctgactacacagagggattagacctttcagtttttgccttggctggggtcctaaccttataaaaataaaatttagctgattttgtcatataacttagactcattaaatcaatgacagttatcattatttcctgagcagcttaaaatgcaaattattagacgactccatatacaaatctaataactttcccagtcatcatatttgaaaccccaacctaaacagtgcatttgtgaaatgtaatacatggaaaataatgtacttttccatagaatgaattaattctgtgttgattccttcatttcagatttggaaatagtgggatttattgatatagctgatatttcaagtcccccagttctgtccagacatctggtcttacctatagcacttaacaaaggtgagttcctattccactgatacgtctgaagcgtcttattaactaaagttgttcttaaatcttagatagtaggatagcccattttgcagaatttaggggaaaggaatagttacagaattggattttagaaaatggaatattgcctaatatatcaaaaaagtaattctgctttacatggtagaaacattttgacacatatttactgtgtgttggtttgtgaattgacagtggaggtcctctttagagatgagaatgcttagtccctcatccagggctctgcctttcctagtactaacatgctgagaaagcttaagtagttatcagatggttacttgataaatgtgcaagtcaaatacagctttatacacggaagaatcacatctgttctttgttctactggtgcccagcacatagtagataactcagtaaatattgttgaatgaatgggtgaatccaggcccttgtgggtcctccttactgcagcatatatctctaggaactataaagtcatctcctcaaattcagcatctctctggagaatgctagactctaactctttaaaattatctttttcaggggtggcactgtgctgtggtgggtatagagcaggagcttttgtccctgactggctacaggttcaaatcctagttctacccttaaaattatcttttcctctgttttaagctgaccatccactttatatttatcagctttctctaagaactgtatgtagtcagtcaggttttcacatactgagtaatgaccacatcccatttatgcccaggttatctcagttggagtattggatattctataaccaatcacatgttcacagacagaatcttgaatatatacccacagacagctttataatcactgtgttggtaattattattctcagagaacagccagatttcccttagttctaaggccctggggaattctgcatgccagtatacttaccaagaaagaaattaagcaaaataaaccatttatataggggaatagtgaaaagaaaaatacgggaaggtggccgggcgcggtagctcacacctgtaatcccagcactttgggaggccaaggcgggtggatcacaaggtcaggagattgagaccatcctgactaacatggtaaaaccccatctccactaaaaatacaaaaaaaaaaaaaaaaaaacctgggcgtagtggcaggcgcctgtagtcccagctactcgggaggctgaggcaggagaatggggtgaacctgggaggcggagtttgcagtgagccgagatcgcgccactgcactccagcctgagcaacagagcaagactccatctcaaaaaaaaaaaaagaaagaaaaagaaaaatatgggaaagcagagtagggccattttgtaagggctgttgaattttctagctaaactgggctaattcttcctgttgaattagaaagtctttgaacaaagcagagcagacagatatttttagagggaagttaattgtaggaagattcatctgtcagcagagtgtgagagaaactggagaatccagtcaaaaagcttataatcattgtttacctttggggactcacatgcatgtgctgccctaagcctgttggttatgaatgcacttgacatctctgtatctaattctgtttaaatgggtgcctgaagcttccagatagcatctaactaaacatcctagtggaactgtggagaatggatttttgtgtgtaagctttactgagatataattcacataccatatacttcacccatttaaagtggtttttagtatatttgcagagttgtgcaaccatcaccacaatcaatttgagaacttttttataaccccaaaaagaaaccctgtaccctttaactatcaactcccagacccctccccccatttcccctaccccaaataaccactaatatcctttctgtatatatagatttgcctattctggatgttttatataaatggaattcatataatgtgtggaaactgacttttatgtagatattggaaaactggaatgagtttttcctgcttgttataatattcccttagaactctacactatcccttaaaggctagaaacatccaagagtataaattggggtttggggtttttgtaggtaatttcagtctgacctgttttctctttttttcacagaaggtgatgaggtgggtactggcatcactgatgacaatgaagatgaaaattcagccaatcagattgcaggcaaaatacccaacttttgtgtcctgctccatggtagcctaaaagtggaaggaatggtagcgattgttcaattagggtaggaaactttgtttacatttggttgaatgaaagggaaaatcattttacaaagtgaagtattttgcagacttttctgaaggaaatagaaaggtccttgtcacctttttccttttcctgccacacacttttcccacctgctactacagtcctttttttttgttttttttgagacgaggtcttgctctgtcccccaggggtacagtggcatgatcacggctcactgcagcttcagcctcccaggctcaagcaatcctcccatctcagccttccaagtagccatgacccaggtgtgcaccaccatgcctggctaattttttttttttttttttaatttatagaagtggggtctcactgtgttgcccacactggtcttgaactcctgggctcaaggatcctcccaccttggcctcccaaaatgctgggattacgggcattgagccacagtacctagctgctattaccttctaaactactcttttaatcatcccctagaataagtgtggagtgagccttttaattacgttgcctttattttatatcctttctcaattttcctctttctaatcctatctagaatacctgggttctggttatagcaatgctactaacttgctttaggatcttaggcaggattcacagacttctcatctataaaatgaggggatagaacgaaacaaaaaaaaagatgctaataacattgagcattttattatgtgccaggcactcctctaggtattttacatatgttagcacatttaatccctcataacaacactatatgggaggtatcagcattatccctatctatagatgaggagacaggcttaagagaggttgtggaacttgcccaaggtcacacagctagtaatgaaagaaccatgattcttacccatgcattctgactccagagcctactcataatcattctgctgtgttccttccctgtgaggaaaccccgttagcttttacattttctgaagtctcaaaatctgcaaaaccatctatttccctttctataatacatatttttagaaaaaaggaggtcactgatcattttctggccactacctggggttggctggtatagatcaagagttaggattaattaaaggaagcatggctccatttctgctacagttaaaattagctggtccaaaaagaggaatgcagatcttactagatattagtctgctatatttcttggcacccaagctacttgtactggtctgaatatgagaatcatctgggaccctttgagaaactggggacagagtctcttttacataacaggatgatggccttgagccctgtggtagaagggcttctcttggtgctgctgtgagtgactcagtgaggcaggtgacaggacctataggtcacagcctttacccctcctcatcacctctccagctacttgctgccctttgtgatttgttttttctctttcaagattgcttttgatttccatatccacataattttacctgaataataataaatgtctcagaagaatggaaatattaggggacagcagtatgcattttcaggtttagggtttggctttggtaaaagtagtgtgcctgatttcaaagctgaagcctgtgtctctcaagagaaaaatacaggctagacttatttaacttgacagtctcaggcttgatgttcttctgatcttccgtcttctctccatctagtcctgaatggcatggaatgctctactcccaagctgacagcaagaagaaatcaaacctcatgatgtctctctttgagcctggcccagaacctctcccatggctagggaaaatggcacagttgggtcctatttcaggtataatccagatcagattttacttatcctgactttgttttcattctgctgttctcaatgtctctgactgtgcagtcagagaactgattgatctcccttactggtatgccatggtctcggatgatgctggatgtgtacggtgaaaacttgaagagagtttgatgtttgaactcctaaattttacagctcaggagaaatcaacatttagattgctttaagtaaatgcaaattcttcagcggcttagagtgaaaaactaatctccataattttttttcttggtgtactatagttcaagtaatttcctgtcattcctagataatgtaatctttcctccttcttgaaactttttttctgtagctttcctgacattgcttctggtaccgatttgactttttctttggcggacttttctttctctcttcgttttgtcttttcttctccttgcctcatggtttccaacatgttctttgccttcttctctttggttattcttctcccttggttattttatcagctgtaataacttcacatttcccaaatctataactctagtcttacctgatctctccctggaatttgcatatcatatttccagttcctagttggatctctacacctggatattctgtcacagtctcaagctcagctgtttgttacagacctattgtcccgcacccctttctcctcaaactattcctccttctgattttcctcctccttttgattaagtcatttgtgccactagctactcaggttccaactgtagtcatctttgactcatttgggcccatttcaatttcaggaacatctaccaagcaacctattctgtgccaggcctaagggataaagagttagctggagttgttcaaagtctagtggaaagtggaatgatcacagactggcacaaatcagagttagcctggaggagatgatgatgagctctgcctagaggactcaggagaatcttcacagaggagaaataccctagttgagttttgaagaaaaggaggaacttgctgagctaatgaagggaagaaagggcatcctgggcaaacagaacacctacagaaagaaaaggaagtgtggcacaaaatgtgagagtgggtgtgggaggggcagatggtagattggagattggtagtagctagagtggagcaggccttgtctgaaatgtgaagaaccaggaatttatcttgcagatactgggaaaccactgaagaggagtaatgtgatcagatccttctggctacagtgagaacagggggataccagttaggaaactatattttaggggctggtgccccctgcagttgtacagtatggccataatccaagtgagagataagaaatttgtatttagaaagatatctctgtggagtgtggatctgaaaaggcaaggacctgtggctgaaagttactgtgttaatcctggaaatgtgaagatgagagccagaccgtggcaatagctgggggtaaaagatatttaggaggtaggatcaataatgtttggatatgaaaattatggagagagaagtgttaaaattgatcccaggtttctgacctgggctgcagggtgaaagatagtactattagttgaaatagataatacagagagaagagtaaatttgggaagaacatattttgtttatgttgagttcgtgcctgtgagatacaggtggaggtacctagagacaattctgtagaagtctgaagtttaggagagagggcagagttggagataaaattttaggttgtaagcctatcataaatagttaaaatggtgagaatgagggagattgctcagggcagtggttcacaaattttgagtttttgtgtacaaaaataaacttggaataaataccacatgttctcacccatatatggaagctgaaaaaaaatgagctcatagaagtacagagtagaatctagaatcatggtcattagaggttgggaagggtagtgaggagaggagaataggcagaggtaacagatacaaagttacagctgttagggaggaaaaagttcagtgctctgtagcatggtagcctgaatattgctcacaataatttagtgtatattttcaaacagctagaagagaggattttgaatattcacaacacaaagaaatgataaatattcagccaggtgtggtggctcatgcctgtaatcccagtactttgggaggccagggcaggtggatcacttgagtccaggagtttgagaccagcctggccaacatagcgaaaccctatctctaccaaaaatacaaaaatttgctgggcatggtggtgtgcacctgtggtcccagttactcagggggcggaggtggaaggatcgcttgagcccaggaagcagaggctgcagtgagccctgattgcatcgctgcactccaacctgtctggccctcacagaaaaagtttgccaacctctgactagactattgtgatggttttcaccaaagatgcctatctataatctaagatagtagtagcattcagactcctttctgatctggcttccaacatagcaacacttggcttgttacaattgttcttcattccagttgaactgctgttcactctgccctgtgttcatgttgttttttcctcctggatctgttctgcttttcagtgtggataataatagctaatattataatgaacttaactttgtgccaggcactgtgctggacataatgagcataccatctcatttaactctcacagcagtcttggaattggaattatgataacaaataacaattaataataaaacttacctcagagggttgttgagcaaaacatgcaaaatagcactattgtttgtaccaatccctcctactcccaattctgttcctagagacaactactttttaaaacttatttgtttcttttggtatttatttatatttctttttttttttttaattgagacagagtctcactccatcgcccaggctggagtgcagtggagcagtcttggttcactgcaaccttcacctcccaggttcaagcaattcttctgcctctgcctccctaatagctgtgactacaggcacaagccaccatgcccggctaattgttgtatttttagtagagatagggtttcatcatgttgttggtcaggctggtctcaaactcctgacctcaagtaatcctcctgcctcggcctcccaaagtgctgggattacaggcgtgagccactctgcccagccttatttacatttctaaataatataggtatgtccctatttctgtcaggggttcccccattttattattattattattattttatttatttattttgagatggagtcttgctctgttgcccaggctggactgtagtggcgtgatctcagctcactacaacctctgcctcctgtattcaagcaattctcgtgcctcagcctccccagtagctggaactgcaggtgtccaccaccacgcttggctgatttttgtatttttagtaggtacggggtttcaccatgttggccaggctggtctcaaaactcctgacctcaagtgatcctcccgccttgacctcccaaagtgctggaattacaggcacgagccactgtgcccggcctcccgtcttattattttttatttattttttgagacagggtctcactctgtcacccaggctgaagtgcagtggcacagtcttggctcactgcagccttgacctctcgggtgatcctcccacctcaacctctcatgtggctgggaccacgggtgcatgccaccatgcctggctaatttttttgatttttttatagagacaagatctcactatgttgccaaggctggtctcaaactcctgggctaaagcaatcctccaccttagcctcccaaattgttgggattacaggcgtgagccaccacactcagcccttttcccccattttagatgccattttttgactttttaaaggatgaatatttagctctattaacaccaccatctcccacccacctacacaagacgcacatttcccctcctactatcctcccaatatagttataatgttctttttggttaaatcagtattcagtccttgttacatgatgtaaatgttatttacaactaagctataccaatttgtatttcctttgttttgcaactttttgtcccctagctcagtcccagttattttttttctttgcttgttttctatataactaattcctccctaagtaaaatacattcttcaggtattttctcagtttcctttttttttcttagcgtcatctcccatcctcctgcttcataaatggtatggttattccccagacctgttgcataggtgttgtcctgagtctcccctttacatctctcctatggatctcctgttcataactcctcctgaaaaaaagggtacatgggaagtaaatattttgaaatcttgtatattttgaaaatatatatatgtttatttcattctttatatttaatgatagtttggttgggaattgagttctaagttggaagtcattttccctcagagttttgaagcattactctgttgtctcttctggagtccagtgttgctacggaaagttagtgccatggtgactcaaagacctttgaccctgaactgtattttctccatattccttggtgatcttctttgtatccctggtattctgaatttcagaatgttggtctcttcattgattttgctaggcactcagtggaccctttccatctggcaattcatgatcttcagtactgggaagatcaattatttctttgatttcctctttctgtattctctgttctccttttctggaacatatatttgtgatttgtgtttgtaattttctatctctttctgcccattttcccatttttaaaatttttgttctgtcttctgtatcttcaaatttatcttataacttttattttttgtttatactatctttttaaaatttcttctttcataaatgtaatatttcctgtctcctaagccagttagttaccacatataggctccagacaactaatgacagtacaaaataggctctgattagatgttgaaatgtttggtactgatactaagtgctaggggataaaagggtctacaaaaaccactatctgccagaaaaacttgaaacaatttcatggaaggggtaagataggatctggacttggaatataggtaggtaagtttggataagtaaggaacagcagtgttgaatggtggaaaaagtgttggcttttgaagcaggcccaactgagtcactgtgaaaccttgtataagtccaacctctctgtgccttagtttcctcatctttaatgggactaataacatcttcgctctagagttgctataaagagagaagttgaatatgtaaagtatcttgcacatagttggaacttaataaatattctttattctgtaagttccttgaggctgaaaagtatcttctctaggcacaattcctggcacagtgcttgctacgtagtggggtcttactatagataatgaatgaataagtgaatgagtaaatgagtgaataagaagggagagcattctaggcagtgaggagtaatagaaatagcaggaaagttggaaatgaactgttgtgtgggaaaggacttgcaggaccttagcctgactcagaaggtttatatattgacaaatattaatggaaatacgtctggagagttgggccagtattttatggaggagtcagggctgaagagggttgacaaaggaagtgttggtccaatatcaaggtgtttcaattaatgaccaaatcagggatagagaatgtctggctcaattagacagactggtctaattacatttttcaacacaaacttttgggcaagagatttaagttctctgaacttgtaggaaaatgactcctgctctgtctacacgagaaggtggtaataataataaagatcaaatacaccattagaagtatgtgtgctttataagtttgtggcagtttcatagactcaggaagcaggtacagagacaaaccctgtttgttcatgtagctataaaaccaatgtggctttacatttttggaagcaataaactaataagccatattggggtatgcttcaccaataaaagtatttcttgtcttgccctttgccttaatttggctatatatatagttttcctttttaattattttaatgcctagacctatgctgtctaatccagtagctactagccacattaaatttaattaaaattaagtacaatttgaaattcagtttctcagtcacactagccacagggcaagtgcttagtagttagtagctaccacattagacagcacagatatagaacatttccatcatacagaaagttcagttggagagcactgggttagactatatagaattgcagtatatatatgtgtgtctatgtgtatgtatatatatatatattttttaaatatgtatttgttttatcctttgaccttaatttataaatcagataagtgaagcttgtttctttaaaaacattaagctgtttttcacttaaatgggcctcctacatcagtggctttctattgagaacaggttctccaacctgactgaagttaatggattttcttaattaacaaagtgataggatatcaaagattgagtgattcaaagagcttctagtctaaatggaaatgtaactgattgtgttttaccagatgtcatttcaagaatgtcttttcttttaagatgctaaagaaaacccttatggcgaggatgacaataagagtccattccccctgcagcccaaaaacaaacgcagttatgcccagaatgtgactgtctggatcaaacccagcggcctgcaggtaacattaccatttatgttgctttccactggggacaggagacatttgggtaggcaggcaggcattttatttgattttcttttcctttgatacttagtaattcatttacttctaatgtttgtcattatttccaaaagggatttgagatgccctacagtaaaacatgtatatagcaaaatcattttttacaaaatttagagcaataagaatcctagaggaaggaggaagaaggaagacaattgtgccaggaacccaaggcaaaataataactttatgtgagtgttttggctctgagcttcctgttaccaaggtcagttgttcttgtctaaagaaaggaaatttgtcagtttgtctagagagacatattttcctggcattgaattttagtgtgaaattttttatatggtgaggcattgactaacataatgggtattggctttaacaacagttttggaaaagatgtaaaagtcttcataactatatttcttccatcccttcagtagaactcaagccatagcattacatttcacaaaaacacttccataggaagttatgataatatgattatcaaggaatgatgctttcaggcatggtattcaggaacatatgataatatgattatcaaggaatgatgctttcaggcatggtattcaggaacatttctcctttcatcagcaaaaagtcatttatacctgtttttaaaaatcacttattgaaacttttttctcctttgagcacctttatttacatttgttcttccagtaagttcaacctaaaccaaatgagaagagacaggccacttggacaacaaaagtagtttctgttgactgcacagtctctgagccccgtttccatggagactgaaccacatcctgccaaggctaaagtgtcaggggcctctttgttggaaaatcagggtcttctattttcctgatatccctgaccccagtgcttccttgtcagagggatattagaaccactttcaccaccagttatagctgagcttttcttaaattattttttttaattttttttgtttgaatcttcactactatcttgggtttatttttcttattctggtaaaatatacataaaatgtaccttcaaccattttaaagtacacaattcagtcccatttagtacattcacaatgtaccatcaccactctctagttccagaacattttaatcactccaaaaggaaaccctgtgcccattaggaaagtcactccacattccttcttccgggccctggcaaccattgattttctttctgtctctatggacttacctattctagatatttcatgtaaacagaatcatacaatttgtggccttttgtgtttgacttcttgtacttagcatgatgttttcaaggtttattcatgttgtagtatgtatcagtacttcattcctttttatggctaatattccatatgtctatatgtatatgtcacattttgattatccctcagttgacggacattagggttaccttttggctattgtggataatgctgttacaaacattcatgtataagttttggtctgaacatttgttttcaatactcttgggtatatattttaatgggaatgggattgctgggtcagacagcaattctctttaacttactgaggaattgccacactctctcacagcagccacaccattttacatttctgctagcagtgtataagtgttctagtttctccacgttcctaccaatactcattgttttccttttattattattatcatatagctatcatagtaggtgtgaagtggtatgtctttgtttttgcatttccttgatgaccaataatgtgcatcttttcctgtgcttattggccatttgtgtatattatttggagaagtatatactcaagttctttgtccattttttaattgggtttgtctttttgttgttgggttttttatatattctggatattatgatccttagcagatacatgatttgcaaatatcttctcccattttgtgagttatcttttcactctctttatagtgtcctttgatacacaaagtttttggttttgaagaagtcaaattttgtctcttgcttttgttgtttgtgctttgtgctgtcttaactaagagatcattgccaaatccaaagtcataaagatttacccgctgtgttttctttttcttcttctctttttctcttgagaaacacatctcactacgttgcccaggctggtctcaaacttctggcctcaagcaatcctcctgagtagctaggattacaggggcacaccactgcacctggcccgtttttttctaagagttttatagttttagcttttacatgtaggtctctgatccattttgagttagttttttgtatatggtatgatgtaagggtccaactttattcttttgcttgtggatatccagttgtctcagcaccaaatgttgaagagactattttttccccattgaatcgtctttgcaaaaaagtccctggcaatagatgtatgggtttactgggtacatttttatgaggcaagttcgtttctgtcaggggatttattttactgtcaagccttttgaaggagggagtgctttactaatgttgaactgacattaactcagaagggatcctcatcttgacattgtagctgtgttctcattttcatctctttaaacatttagatccattcttttatattatttcccttttttaccacagaattctaatgttggatttttttttttacccttaatagacagatgtacagaagattttaagaaatgcaaggaaactacctgaaaaaacacagacattctataaggtgagacagacagaagaggatgtgcccaaaatatatggttcacgacagtaaaactgtgagatggcagtgtgaatatgggcaggggttagagatgtatgacttgtgcctcagttttttcaaataaactcagtaaaagtgataggtctgttccttccctaaaatccaagaattggaagaatttaaatggcctaattctgtacaggcagaaggtttttctgtgttggggctgctgtgaatgaatgactgatggaagcagcttagaggacctgtgggtcatagccctgaactctcctcatcactcctatatgggtatccaggccaaccccaggcaaccaatgtatgtggcttcctggatggggaattgcccagaacattcttttttttttttttttttttttttttttttgagatggagtcacactctgttgcccaggctggagtgtcgtggtgcaatcttgggtcactgcaacctctgcctcacaggttcaagtgattctcctgcctcagcctcctgagtagctagtactacaggcacgtgccaccacgcccagctaatttttgtttttttgtttttgagacagagtctcactctgtcggccaggctggagtgcagtagcacgatctcagctcactgcaacctccgcctcgcgggctcaaacaattctcctgcctcagcctcccaagtagctgggattacaggtgtgtgccaccatgcccggctaatttttgtatttttagtagagacggggtttcaccatgttggccaggctggtcttgaactcctgaccacaggtaatccgctcgcctcggcctcccaaagtgctgggattacaggcgtgagccaccgttcccggcctaatttttgtattttcagtagagatggggtttcgctgtgttggccaggctggtcccgaactcctgacctcaggtgatccacccaaagtgctgggattacaagcgtgagccaccccacctggccaccccagaacatttttattgcaccagagactctgcttctaggaatgatatctaacattacacatttatgaattgcagaggagatagccctgcagaatcatatgcagctaatccagaacgattggtgaagagactgttaagttacagggggtggggtagagtggggaacatttaggtttgctccttgattctcccctattgttctggtgtttggctggaattaaattaagtgcagcataaagtatgtcatttgtgtcttagctttctaattctaaaatgtggcacacacagccagccttaggctagcatcttaaccagagaagatacatgctactttgtctgggtgttatctcattacctttatgtcactgttgtcttcaaacttaattatgtagtaagctggtgaaataaaacagctttaatcaagagttcaactggagagcttcttagccagccaggcccctccctaaactgaagcccataatccacacagtccatcctccctgcagagcttcctacagtcatcagctatttactcatgatgacacacttgtttggccttcttcttaactttccacttttttaacagatgatagtagaaagatggtcagagagcccatttctcttttctggttttatataatgctacatattagagctcaaaagggcctagggaaagtgcttcagcctctgcagtgggtaaggaaggggttattctcctcattttataaatgaggcctttgagacccagagaggctatataacttgcccagaccactccactaaggggttgttggggcacttcatatttctctgcttctatcagtaaccagcctttctttttgttggtctttccactctgactcctccagggcctcctcttgagcctgtttattgtcttagcctgaggccccaccacagtggcatcagagggttaagagcgttttcagattgagggcaagtcttttccatacctaaataacaggggaaaagtactcctccttaaagttaggagtaacgaaatgatggatgcaaagtgctgactaccacatgtggcataaatgctcattaactgtgatgatgacgttgtttcattcagctgtcttccttagcctgcttctggtcacctgcagaggaaccacttcccagtaaaaccatcacattcttgttactggcatccctaaataaacatttgttctcatataaaattgctccctaaagttcagtcaaggagaacttatgctaagctgagcacttagaaagtatgtgttaggaacacatttcaggagcattggtgattttctgtcttgtttcaggagctgaaccgtttgcgaaaggccgctctagcctttggtttcctggacctgctgaaaggggtggctgacatgctggaaagggaatgcacactgctgcctgagacagcccaccctgatgctgcattccagctgacccatgctgcccagcagctcaagctggccagtaccggcacctctgagtatgccgcttatgaccagaacatcacacctttgcacacggacttctctgggagcagcactgaaagaatttgaaactgacttttggagctttccttcttttttcatttcaactgaaaatgctttaggtaaaaacctttccagtatgttcacctctagaatagccacccaaagaccttcctgaggctgcctcagaagcaccacttgctgttttgaatgactctactagtatgagaaggatgtgaaggtggttggctggttgggctttaacttcctgggattcataatttttaagcttggaagatagctgctgttcccatgatgggcacatttcctgagaagcttgaatgactgatgagcatagagcacccctgccttcctcaggaaacctgaccggcaggggctctctggcttcctgaaagcttcacctcttccctcgtttatatctcaactgtaagggcattttcaagcttctgttcatggaatgagcaactcagactgtctggagcttgctgagtacaaacacaccaccactaagtttcagaactttccttagaacttgggcaaaatgtggtggtaactcttaagtgcttttggtatctcttgagattctaacttttaaagagcaaccattaatgtgtaaaatgattcctattattcaaggtttttttttaatgaaaataaaatatttgattttctagaaaatggtttcactatgaaacta

SEQ ID NO: 170 - DNA, 20046 bp, Homo sapiens
  source 1..20046: mol_type = other DNA
ggagttcccgagtatcgcgagaagcgcgcttagtctgcacgccgaggtccgcgctgtgtcccgtgttttctgcgtgaggtgagagctggctggcgggccaatgaagttcttgcggggagaggggagtcggactagccagggagccagatggaagagccagggagccagacagactagcgggaaagcctaattgtcgcaggaagggggtcaggaggttggggggtcgacctgacccggcctggagaggcggggaggtgggcgcgtgtcccggttgcttaggttttgggatgcctcttactctgccaagccgcttagcgggagggaacgtgttcctgatcatctttaccccaggcttctgtccggggcgtgtcaatgtagaaatcccccagcgaatgttggatgaatgaatgaagttgaagagagggtaggcggggaacgaggatgagggggacggctggagaagaggtatgggaggttcgatgtttcagggatggcacccaagggggacatcgaggcagcacggtagcacttcctttgcgatgaggggcgtctctttggacttcttggaaaagaggtgggcattggaaaccagggtctgggaacaaaccgtggtttggacataacatttgttaccttcactcttctgggagttggagaagtagaggaggaagttcagacaatttcataagtgtctaaaaagagacagttatgcgaccattgacgaggagtaaaagtcgtctattgagcatcttattcactacaaatagaagaaagaaataccagtttcctgacaagccccaccccatgcttggccagttcctgagtacacttaatatattttaggtactgtcatcaaactcaaagctcgctgtcagcctcaaaggtctgaaccctagtatagattcttgtagcttgcttgaagttacagtgggtcatgatcaggaattgatgctttgtttttgttttgaaacggagtctcgctctttcgctcaggctggagtgcagtggcgcggtctcggctcactgcaagctccgcctcctgggttcaaatgattctcctgcctcagcctcccgagtagctgggactacaggcgtgtgccaccacgccccgctaattttttttgtatttttagtagagatggggtttcactgtgttggccaggctggtctcgaactcctgacctcatgatccgtccgcctctgcctcccatagtgctgggattaccggcgtgagccaccgcgcccagccgatgctttgcttttatatttatggtaaccgaaatttagaattagtgagattttaaagatcgtctaactccaatttggggaaactggaatttttttttgcattccatcattcatcaaatatatattgagcacctggggccgggcgcgatggctcacgcctgtaatcccagcattttaggaggccgaggcgggcggatcacgaggtcaggagatcgagaccatcctggctaacacggtgaaacaccgtctctatgaaaaatacaaaaaattagccgggcgtggtggcaggcgcctgtagtcccagctattcgggaggctgaggcaggagaatggcgagaacccgggaggcggagcttgcagtgagcagagatcgcgccactgcactccagcctgggtgacagagcccgagactccttctcaaaaaaaaaaaaaaaaaaaaaagatatatattgagcacttgctgtgtaacagcattggggttccagctgtgtaacacagagagacttaacctcgttgccctttttgagctacagtctagtttgggagacgaacaataaataactgtataaataaaacctgatattgaaactggataagtgccatgacacttgtacttgacactatgaatgcttactaaagaaggatttagagaaattgaggtaaacttttgaaaaggtgatagttgagatctggaagatattaggagtcaaggaatagctttttcaagacaggaaatagtatttgtaaagagccagtggcctgagggatatagctctttcaaggaaagaaaaagcatagagtagtgtgaagtgagactggtgaggtagtaagaggctggatcacacagggccttgaagttttgtctttatcttaagagcaatcagaaaccattgaaatacttaatccaagtgaggtgatcagctttatattttcagattcagtctagatgtaatagggacaattgaaggagacgagtggatgagagtagtggagtaatgcaagcaagaaatgttgggaagtggttatagagataaggagaaatagacagattcaagggatatttaggaaataagatgggcaggatctgtgggataggggaaggaattgctaaagatgacttgtaggtttctgaattgcatagctggatagatgtcatttaatgagttaggaaaatttagaagtttggttttgtacctgctgagttacaggtgcctttcaggcgtttaggaagtgtaaaatgggaagtagtgatctggatcgcagagtcaaggcctagggtagagataaaaatcagggagtcatctataaatcagtacttattaaagctctgtgcataaatgaatgaagaagccctaggatggagtcttggatacttaatggccggggtagaagataaacctgcaaagaaaatccaggaggagtgcccagaaagggaggaaagcctcagcctcctgagtagctgggactacaggtgcgtgccacaacacctggctaaattttttttatatttttagtagagacggggtttcactgtgttggccaggctggtctcgaactcctgacctcatggtccgtctgcctctgcctcctgctgggattaccggcatgtcttagaagttaaggtaaacatttttcccagaaaaaaactgaccaaaagtgtcagttgttattgagaagttaagtaaggcagtactgaaaaacattctttcgagttatcaacctgaggataatttcccattcaggaaaccttacctagaagaccaatatgtaaacacatttaaaaatttttttttatttttaatttttgtgggcacgtagtaggtgtatataaacagatttttttttttttttttgagacagagtgttggtctgtcgcccaggctggagtgcagtggcggcatcttggcttactgcaagctccgcctcctggattcacgccattctcctgccccagcctgccgagtggatgggactacaagcgcccgccaccacgcctggataattttttgtatttttagtagagacggggtttcaccgtgtagccaggatggtctcgatctcctgacctcgtgatccgcccgcctcggcctcccaaagtgctgggattacaggcgtgagccaccgcgcccagcccagattttttttttttaagcagctctaattgaagtgggggtgaagtacctatatcctgcgtatttcataccctattggatcacagtttgaaaccctctgaaaagtcaaattcatctttttatggtaggggaaactcaatagttgaggtaaaaggatttgttcaaaatgatatagttatttagtgttagggtctacattggaacttagatttctaggctagtcttttttttcataattagtatcttctctacttttcatgatgtgtgagtttgaaatgtggtctaactgattgaaacacatgaaatggctgcaggtagaacttgtctatatagtggagactattttggatgaatacaaataactttaattttttcccctagaggaaaagatgctagaaccacaggagaatggcgtgattgacctaccagattatgagcatgtagaagatgaaacttttcctcctttcccacctccagcctctccagagagacaagatggtgaaggaactgagcctgatgaaggtatgtatagagagttttaaaaaggaggctgtgaggccaggcacggtggctcatgcctgtaattccagcactttgggatgctgaggcgggcggatcacaaggtcaggaatttgagaccagcctggccaacatggtgaaatcccgtctctactaaaaatacaaaaattagccggggtgtggtggctgtggtaaaaggtatttgaggagaaaaaagaaaaaaaaggaggctgggcacagtgggtcctgcctgtaatcccagcactttgggaggccgaggcaggaggatggcttgagcccaggagttcaagaccagcctggcgagacctcaactctactaaagatttaaaaattagccgggtgtggtaggcagcacctgtacttccaggtactcgggatactgaggcagaagaatctcttgagcctaggagtttgaggctgcagtgagccaagatcgcaccactgcactccagcatgggcaacagagtgagaccctgtttcaaaaaaaggtgtcccatgtttagttatcttatcagcttggaaatgatacataataaataatacaaatcatttaagtacagtaatactgaatcgtggtttgtttcaccagagtcaggaaatggagcacctgttcgtgtacctccaaagagaacagttaaaagaaatatacccaagctggatgctcagaggtacatttactatattcttatacatttatactttttatttttaatatccattgtttttcttctaatgttataaacttttggttggtatgatgtggagctcttatatttctaaaaacttttttttagttcagcagaacatattttttcttatggtcttgctttggaccaaactctagaaaacttgaaattaggctgggcgtggtagctcacgcctataatcccagctctttgggaggcctacgtgggcggatcacgaggtcaggagattgagaccatcctggctaatacggtgaaaccccgtctctactaaaaatacaaaaaattagctgggtgcagtggtgggtgcctgtagtcccagctacttgggaggctgaggcaggagaatgacgtgaacctgggggaggccgagcttgcagtgacccgagatcgcgccaccgcatcccagcctgggcgacagagtgagactccgtctcaaaaaaaaaaaaaagaaaataaaacttgaaattaaaaacatacttttattcacagattaatttcagagagaggacttccagccttaaggcatgtatttgataaggcaaaattcaaaggtaaaggtcatgaggtaagaactgatttttatgttagacctttgttttttaaaatagcaataaaaatgtggacccattatgatcttggaaatctcagaatgctttaagatactatccttagtcgtcgtatgtcttgagaaacagttgtgatgtactagaaagggaactgtttgaagaattagaaagcatgtcttgtgcagtctcattttttgctgcttaaaccttggctataggaaaatcacacctgtgtctgtaaagtctcagtttttattttataatttacaggaataaaatttactttgtctacctcaaagttttaaatttcatgagggcaaggactctgcctgtatcagtcacttatgtgtccccaagatgtggcacagtgcctggttcataataaatgtcagtaaagtgtggttaaaaaatgaatacatttagtaactgaatcactttacaaatgcacattttgaaatctatttttgaattatgtaggagtgtaggtataattttttgcagatgatagtatatttttagagagttttgtagtttttcaagtgtttctaatatctaatatattcttttttttttttttttttttttaagacggagtcttgcttgctctgttgcccaggctggagtgcagtggcgcaatctaggctcactgccagctccacctcccaggtttacgccattctcctgccttagcctcccgagtagctgggactacaggcgcccgccaacaggcctggctaattttttttttttgtatttttagtagagacggggtttcaccgtgttagccaggatggtcttgatctcctgacctcgtgatccgcccgccttggcctcccaaagtgctgggattacaggcgtgagccactgcccggcctactatcttttaactttattaagtgtttttttttttgtttttttgagatgaagttttgcccttgtcacccaggctggagtgcaatggctcgaccttggctcactgcaacctccgccgcttgggttcaagcgattctactgcttcagcctcccaagtagctgggattgcaagtgcccaccaccacgcccaactaatttttgtatttttggtagagatggggtatcaccatgttggccaagctggtctggaactcctgactcaggtcatccacccgcctcggcctcccacagtgctgggattacaggcgtgagacactgcgcctggccaactttattaagtttttgtactgggattttttttcatctaatttttatgaatctgtatccaggcggggtgctatggctcatgctgtaatcccagcactttgggaggccagggtgggcggatcacttgaggccaggagttcaagaccagcctggccaacatggcaaaacctcctctctactaaaaaatacaaaatttaggccaggtgtggtggcgcacacctctaatcccagctacttgggaggctgaggcatgagaattgcttaaacccgggaggctgaggttgtagtgagccaagattgcgcccttgcacttcagcttgggtaagaaagcgagaatctctctgaaaaaaaccaaaaaaaccaaaaaaacaaaaaaaacccctgtatccagtgctcttttagactgcagtcctctaagttcttaataattttctctcttttttttggatataggatctcgctgtcacccagtctggagtgcagtggtgtgaacttggctcactgcaacctctgccccccaggctcagggagtcctttcacctcagccacctgagtagctgggtccacaggtgtacaccaccatgcctggctattgttttgtatttttagtagatatggggtctcaccatgtttcccaggctggtcttaaactccttagctcaagtgatccgtccccctaggcctcccatagtgctagaattacaggtgtgaaccactgtgtctggccaatatttttcttattaaagttccttttataagtttttcaaccttataaatataaaatgaccccagtgattttggcatagcttttcagttctgaaagttgctgacggggtcagctgtgagaatgagactcctgtttagcatttttatttttatgtggcaggctgaagacttgaagatgctaatcagacacatggagcactgggcacataggctattccctaaactgcagtttgaggattttattgacagagttgaatacctgggaagtaaaaaggaagttcaggtaagtgttgagatgattataaatatcattcacatgctaaatggtagggtagatttagttgaggctaaattgctgtttaaagtgttcattttgaaatctcttttggtagagagggaaaagtaatagcaaattatctccccccaacatgattggtaaagaggtaaaaataaataatctcttttcattttcagacctgtttaaaacgaattcgacttgatctccctattttacatgaagattttgttagcaataatggtaagaatataggtttatctactttataacaattttgcttttagaaatagatctaggcagggtgtggtggctcaaccctgtaatcccagcgctttgcttttttgtttcatgtttagggacagaatcttgctctgtcacccagtctggagtgcagtagcacaatcatagcttactgcagccttcaactcctgggcttaagggatcctcccgcctcagcctcccgagtagctgggactgcaggtgcatgccattgtgcctggctaattttaaaatttttgtagagatggggatctccctgcgttgccttggctgctctcacactcctggcctcaagccatactgtgcctggccaacttttttttttttgagctggagtctcactctgtagcccaggctggagtgcagtggcatgatctcggctcactacaacctccatctcctgggtcccagttcaagcaattctcctgcctcagcctcctgagtagctgggatcacaggcatgcgccaccatgcccagttaatttttgtatttttttttttttttttttttttagtagagatggggtttcaccatgttggccaggctgtttttgaactcctgacctcgtgatccgcccaccttggcctcccaaagtgctgggattataggcgtgagccactgcgcctggcttgttattttttttttgaagactagccacatgcaatagtgaaaagggaggaaagagtagaacaaggagtttgatctgtgactgtgaattgataactcattacctttggagcaaccccagttctttgggaggccatggaggtaggattacttgaatcctagagttggagatcagcccgggcaaccgagtgagaccccatctacaaaaatttttaaaaagttaatcaggtgtggtggcacatgcctgttgtagctactcagggggttgaggcgggaggatcacttgagcccaggagttcaaggctgcagtgaaccaggatcacaccactatactctgggcaataaatagggtgagagaccttgtctggaaaaaaaaaaaaaaaagaaagaaagaatagaagtagttagaggaggcagtattataggaccagatccttagtccatattgtgtatataattagagtatggtaaagtacaataaatagataagttaaaatgccttggtagtgggctgggcgtggtggctcatgcctataatcccagcactttgggaggctgaggtgggcagttcacttgaggtcaggagtttgggaacagcctgaccaacatggggaaaccccatctgtactgaaaatacaaaaattagctgagtggggtggtgcacgcctgtaatcccagctactcaggaggctgaggcaggagaattaacttgaatccaggaggtggaggttgcagtgagccgagattgcgtcgttgcaatccagcctgggtgacagagtgagactcttgtctcaaaaaaaacaaagccttggtacatctagaatgttgtatatcaaatttgttgtagaatatgaacttttgaaaactctggtgacccactgatcctatatagcacttgttaataaaaatatatatcaagataaaagtgttcatatacatatacaccattggataaagtggtactgggaaattaggcaaaataatttatgatgaaagtttgcatttcacttggagcgcagctctcggatataggactttagtgagacctttgtgactgttcctggtattgattgcatttgttagttgtacagtgcaaccatagacagtcacacacattaaaacagatggttcctgccgacagggtctgtatagttatcagattttctgtgcgatggctccatacatgtttgtttttgttttttaacttttaacagatgtggaagaaaatacaggttccatgtagaataccctaaagttatttataaactactttcaaacatgtaaaggaatgtgatttaggccgggcgcggtggctcacgcctgtaatcccagcactttgagaggccgaggcgggtggatcacaaggtcaggagatcgagaccatcctggctaacatggtgaaaccccgtctctactaaaaaataataaaaaaaattagccgggtgtggtggcgggcacctgtagtcccagctattcgggaggctgaggcaggagaatggtgtgaacctaggaggtggagcttgcagtgagccgagatcacgccactgcactccagcctgggcgacagcaagactccgtctcaaaaaaaaaaaggaatgtgatttaaataatccgtgatttaaatttcttggtaaaatatggtatgtatggatggcataggattgggtatatgtaaaggaatgagttattacagttctaaattccacagcatatactactgggttactttttgaggtgcccggtatgtgataaaggttcagggctaaaaaaatgactacgatcaggcccctttgtgggcaaatacagtagtgaatgaatcagacatacaacattgccagtagtgtggtaggtgttgtaattagaggtatgagtaggtcgcagggtgggatgcaaaggagagcatagttacatgtccctgggggtagagggagaacttcacaaaggaggattcagaagaattttgatttgggggtgagaggaagaaaaaagaaattaaaaagaaaaaaagtattttgaatgaacagtagaggtcaggcagaggtgattttgaatgggggagccatctatgcagaggtgtaaattaacttggatttcaggctctatattctatggcagtaaaaaaaaaaaaaaaaaaagataaattaaggccaggcgcagtggctcacgcttgtaatcctagcactttgggaggccaagacgggcggatcacttgaggccaggagttcgagaccagcctggccaacatggtgaaaccccatctctactaaaaatacaaaaaattagcctggcgtagtggcacatgcctgtaatcctagttactcgggaggctaaggcagtagaattgcttgaacccggaaggcggaggttgcagtgatccgagattgcgccattacactccagcctgggcaaaaagagtgaaactctgtctcaaaaaaaaaaaaaggagataaattaacatggaccattcagagaattacaagcatgctgaaatatagggtacaaataagagaactgaatctgagatttttgtttgttgtgtcatatatttaatttgtatcttaatagtctccaaatttttttgatcaggtgccacagaagtaaaaatgttttgaccattttatttgttgattaaatacatttacttctatacggatgtgatttgtaatgtacttttttttttttgagacggagtctcactctgttgcctaggctggagtgcagtggtgcgatctcggctcactgcaacctccacctcagttcaagtgattctcctgcctcagcctcccagtagctgggattacaggtgtgcaccaccacacctggctaatttttgtatttttagtagagacagggtttcatcacgttggccaggcttgtctcaaactcctgatttcagttgatccacctgccttggcctcccaaagtgctagagttacaggcgtgagccagtgagccactgtgcccggcctaaatttagtttttgtagtgacaggatctcactatgttgcccaagctggtctgtatctcctggcctcaaacagtctgccttggcctcccaacgtgccgggattacaggtgtgagccactgtgcttggcctccagctgttccttggacatttcaggcacatttttattctaaggcttttgtattgccgtactctgcctggaacactcttcccttgtacccctcaagtccgcatgactgtcttacactcctcaaactgtgctcaaatgacaacttggtgaagcctccccattacactgttatagttgcatccccactcccatcatttctgactcccctatgctgtttccttttgcattgcccttgtttccctttaatttttatatagtttacttatgttttagtttgtctttactacaatgacggcatcctgtaacacactgaatatttctagctttagcttctttgccataatcacttgccaatgaatgttgcagtaaatgaatttcatgcgtacttctaattttttaaaatttcatttttatttacttatttcttttcgaggcagggcctcactctgttgcccagggtggagcacagtggcatgatcatagctctgcagcctcgacctccagggcttaagcaatcctgccacctcagtctcctgagtagtttggattacaggcatgcaccacctgcctgcccaagtttttcttttttttttttttctttttttttttgtagagaaagggtctccctatgttttgcaggctggtctcaaactcctgggtccatgtgatcctcccaccttgggttcccaaagtgctgggattataggcgtgagctgctgcacccagctttaaatctcattttaatcctactcaaaggaaccagctgctgcttacaaaatatattgtttatataaataggtcatttactactgaagatacctttgttttcttggttcataaaaagtagttttttgcttttttttttacttttttttgtaatagagacgaggtcttgctatgttggtgatgttggtcttgaactcttgttctcaagcaatccttctgcctcaatctcccaaagggccatgattacaggcgtgagccaccttgtccagtcaaaattagttctttgagttcatttgaagccaggagttagggaccagagtggtcaacacctatagtcccagctatttagaaggctgaggcaggaggatcctttgagtccaaggagtttgaggctggagtgagctatgatcataccactgtactctagcctgggtgacagagtgagtccccatctcttgaaaaaaacaaaaaaaaagtagttatttatgtattttcttattgatttagaatcctgcaaccctgtaagatgaagcacattaaaaaccccatgtttcataagtggttctttttttgagacggagtttcactcttgttgcccaggctggagtgcagtggtgtgatctcggctcactgcaacctctgcctcccgggttcaagtgattctcctgcctcagcctcctgagtaggtgggattacagtcatgtgccaccatgcccgactaattttgtatttttagtagagacggggtttcaccatgttggtccgactggtcttgaactcctcacctcaggtgatctgcctgcctcggcccccaaaagtgctgggattacaggtgtgggccactgcgcctggctcataagtggctctaatgcttgtttcttaactgcttcagcaatgtttcatacatatactcttatcagtatttcctgacaatggaggccattttagtttcttcctacatttttgttttccatgtcaggaaggaaaagtggcttttcgtttttcactattaaggaagaaaccttaaaagggagtttgattgtaaagggctgaattaagtatcatgatttttaaatctcactgaaataattgtaaaggtctgtctttatgttttaaatgtttttttaattgtgatagtttttctataattagctaatatttcaaggcataatatatacatagaacaaggataatgtatataaatatttcaaatggtgacttgaattttttgaccaacttgtcagatgtgatggggtttatctttcttttaatttcataatatggatgatgtagatagaaggtaaagtgtcagctctgctgttttttttattttttgcttgtgcttctattctacctacaggcattttgttattttgtagaatctttttaacctaacacttgtacattttgttggggttgtttggttaaattagtaagatgaaatccatcagtttatttgactgggcaatcagaaacagctgtatatctgacattgtaaagtcagtgggggccccattctccacccttttacaatatggatcttgcctatagagtggctcacagatcagacagtaactctgtcataaggacaagggacagttaaccactgccagtcttattttaaatatgttagtaaaacatagtttttcttaattcttaaatgaaatataaatggaagatctattatttactttaataccactgtggatcatgttggggacatcctaccttgagttaactggtttacagggctttaataatgtattacttataatgtagagcacactgaatttaaaaagaaattaatttggaaatatgtccataaagttttaaatttcttttcttttttcatttgtctgtgtttaactctacaaaagataatgtcctacataaaattaccttttactggccgggtgcattggctcacgcttgtaatctcagcactttgggaggctgaggcatgtggatcacctcaggtcaggaatttgagaccagcctggccaatacggtgaaaccctgtctctactaaaaatacaaaaattagctgggcatggtggcgggtgcctgtaatcccagcttctcgggaggctgatggaggagaatcacatgaatctgggaggcggaggttgcaatgagccaagatcgaaccattgcactccagcctgggtgacaagagtgaaactccgtctcaaaaaataaaataaaatgtattaaaattaccttttcccatattgacactgggaaactattgaaatgtgttggtttaatgtagaacaagaatatggtttggattccttaagctctttgattaggccaagcataaaatatttctaattacaatcaagaactttttgtttctttcttttttttttttttttttttttgagacagtcttgctctgtagcccaggctggagtgcagtggcgcaatcttgctcactgctgcctccgcctcccgggtcccggttcaagcaattctcctgcctcagcctcctgagtagctgggattataggcatgcgccaccatgcccagctaatttttgtatttttagtagagatggggtttcaccatgttggccagactggtcttgaactcctgacctcatgatccacccgcctcggcttcccaaagtgttgggattacaggcgtgagccaccgcgcccggccttcatgcatattttaaattgtatttttatttgacttagcattcctctttaaactgatttataaatatttcttatttaattgaatcaagcatgtattcacaacattcttttttttttttttttttttttttttttttgagacggagtctcgctctgtcgcccaggctggagtgcagtggcgggatctcggctcactgcaagctccgcctcccgggttcacgccattctcctgcctcagcctcccaagtagctgggactacaggcgcccgccactacgcccggctaattttttgtatttttagtagagacggggtttcaccgtgttagccgggatggtctcgatctcctgacctcgtgatccgcccgcctcggcctcccaaagtgctgggattacaggcgtgagccaccgcgcccggcccacaacattcttatacttcacaaattgttttttcaggtctgtcaccttgccactttaaattctttttcaatgagaagcccttctctaactagtctaacaccacagatgtactatttcttttctattgcagatgaagttgcggagaataatgaacatgatgtcacttctactgaattagatccctttctgacaaacttatctgaaagtgagatgtttgcttctgagttaagtagaagcctaacagaagagcaacaacaaagaattgagagaaataaacaactggccttggaaagaaggcaggcaaagctgctgagtaatagtcagaccctaggaaatggtaaattttatgccaaattttatatgctaccattaatatatcaaggacatgttagaaattttaacttctctgctagcccccaaaataaaatacttctaggagtggaaaagtgtgatattaagtttatgtatattttagagacagtgtgtgtgagagaggagagagagaatggctgtgttccttaaagaataaatgaatccaagatggttttctggatagctgagtacctcttaaaaaattattttaatcacctggccaggcgtggtggctcatgcctgtaatctcagcactttgggaggccaaggtaggtggatcgcttgaggtcaggagttcaagaccagcctggccaacatgatgaaaccccatctctactaaaattacaaaaattagccaggtgtggtggtgcacaccagtaatcccaactacttgggaggctgaggtacgagaatcacctgaatcaagaaggtggagattgcagtgagccaagatcgtgccactgcactccagcctgggtgacttgagtgagacgctctcaaaaaaaaaagaatttattttaatcacttgaaattgattttaaattcttaataaacattcttccctgactccttaaagcatgtgccatatactattacctttaggacaataattataacaataaataaagaaaaaaataggccaggtgcagtggctcatgcctgtaatcccagcactttaggaggccaaagtgggccatcacccgaggtcagcagttcaagaccagcctggccaacatggtgaaaccccacctctactaaaaatacaaaaattaactgtgcatggtggtgtgcacctgtaatcccagccacttgggaggctgaggcaggagaattgcttgaacccaggaggcagaggttgcagtgagctgagatcaacccattgcactccagcctgggcaacaagagcaaaactccatctcaaaaaaaaaaaaaaaaaaaaaaaggccaggcgcagtggctcacgcctgtaatcccagtactttgggaggctgaagtgggtggatcacaaggtcaggagatcgagaccatcctggccaacatggtgaaaacccgtctctactaaaaatacaaaaatttgccgggcatggtggtgtgtacctgcctgtaaacccagctgcttgggaggctgaggcaggagaatcgcttgaacctgggaggtggaggttgcagtgagctgagatcgggccactgcactccagcctgggtgacagagcaagactccgtctcaaaaaaaaaaaaatgctttttcttgtgttttgtcacttggttgtgagctgtacttttgaaagtagctgtttaatttgcttatctttagcattcccttttcacttctaaaactgcctgaagatttgctttattaaaaaatatattattagtatttttagaaacgttgtcaatctgtcacccaggctagagtgcagtggtgtgatcttgactcactgcagccttgaacttctagtctcaagcaatcctccagcattgggcttccaaagtgctgggattgcaggtatgagccagtgtacctggcctaaatttgctgtttttaacacacattgtgggtttggaaactatataaccaaatttgttaaaactatatttagaaagaattgcaagttggttttgaatgaagtaagcaggattgcgtatatctttcttaatttcccattcagtttttcctttcaaaatggaaaaataagaattataggcccagcacagtgtctcttgcctgtaatcccagcactttgggaggctgaggtgggcagatcacttgagcctgggagttcaagaccagcctgggcaacatagtgagtccccgtctctacaaaaaaaaaaagaattataataactagataccatgttgtaaacgaagtttcacccaatatattaacatttttaagtgaaaattattttggctactttttttttcagttaagatgaatttactttttctttttgcttttttttttttttttttttttttttgagatggagtcttgctctgtagctcaggctggagtgcagtggcgtgatcttggctcactgcaacctctgcctcccgggttcaagcagttcccctgcttcagcctcctcaagtagctaggactacaagtgcgtgcccccatgcctggctaatttttgtatttttagtagagaagggatttcactgtgttggccagggtggtcttgaactcctgacctagtgatctgcctgcctcagcctcccaaagtcctgggattacaggtgtgagccaccatgcccagctgaatttactttttccttttttttttttttttttttttgagacggagtcttgctctgtcacccaggctggagtgcaatggcgtgatctcggctcactgcaagccccgcctcccgtgtccatgccattctcgtgcctcagcctcccgagtagctgggactacaggtgcctgccaccacgcctggctaattttttgtatttttagtagagacagggtttcaccgtatcagccaggatggtctcgatcccctaacctcgtgatccacccacctcggtctcctaaagtgctgggattacaggtgtgagccaccgcacctggccaatttactttttctttataaatggatgttttattagtaccatgtgaaacattacatgaagatagcattattcttgatggcagtggcttctttgctgtcaatatcaagtatacctggcagttggtatttaaagctcacctctgtttatcatatacaacttaaaatttgtccaaatggaaataagtactttaaagtttcttatggatcactctgacataaaacctaaacgcacttggtttttattagacctctttctagtagttttcagttttgtttttttagatggggcctcactgtattgcccaggctggagtgcagttgctgatctcggcccactgcaacctccgcctcctaggttcaagcgattctcctgtcccagcctcccgagtagctgggattacaggcgtgctccaccatgtccggctaatttttgtattttttgtagaggcagggtttcaccatattggccagactggtttcaaactcctgaccttgagtgatctgcctgcctcagcctcccaaagtgctgagattacaggcatgatccactgtgcctggccaatagtagtttgattttgaataagaacagttacatttgactatgatccaagagtgtgagttgaataacattcaaaaccattttgctttttttttgtttttttttggttataggatctcactttgtcacccaggctggagtgcagtggcacgatcatggttcgccaccatagccagctaattatttttttttttattttattttttttgatgttttgttgacatggggtctcactatgtggcccaggctggtcctgaactcctgagctccaatgatcctcccacattgttgggatcgggcctggcctctcttgcatttaaaatggatcttaattgtataaaaatgggcttattggctaggcgtggtagctcacgcctgtaatcccaggactttgggagcctgaggcgggtggatcacctgaggtcaggagttcgagaccagcctggccaacatagtgaaaccctgtctcttctaaaaataccaaaattagccgggtgtagtggcgggtacctgtaatcccagctactcgggaggctgaggcaggagaatcacttgaacccggtggaggttgcagtgagcccagatcgtgcgattgcactccagccaaagtgatggagcgagactccatctcaaaaaaaaaaaaaaagatatatttagaagaaagtgatcataattaacattaagtgatcttagacttcattttactaaactgagcttttgaagaggtttgtactcatgcggtaagattggatcaggtacttataatgaataataatggtatgatttctttcagatatgttaatgaatacacccagggcacacacggttgaagaggttaatactgatgaggatcaaaaggaggagtcaaatggattaaacgaagacattctggacaatccatgtaatgatgctattgccaatactttaaatgaagaggaaacactgctggaccagtcttttaaaaatgtgcaacagcaacttgatgctacatccagaaatattactgaagctagataagtttccattaagagaaaatgtatctgttaagtcatcgtcctgcaagcttggcgttactatgtattttttcttcttggagtgaaaatccttagatagtaaaactgttatagattattgtttaaaatctgataatctggtatttatttataattatgcttgtcactttagttaaatctatttgttctctttagtgtttgtttttatataggtatttcttcataaaatgattaggaggtaataagcagtttctgctgctggtctgtcattgaatgccttgttttcactaa

SEQ ID NO: 171 - DNA, 32744 bp, Homo sapiens
  source 1..32744: mol_type = other DNA
actctcgcgagtcgaggtatcttctccccaaccactgctcttattttaattattgcagacggaagttgaagactattgacatagtaaatagctctgggtggcttgaaacgaaagtttaactttgcggacaaacaggacttattgtagggggtggtcaaaatagtcccggcggggcggggccatgacccctgacgtcgccggtccggcgcgcagttcagtttggcggttccggtaccgctctcacattggggcgggatgtgggagcggctgaactgcgcagcagaggacttttattctcgtctccttcagtgagtctagtctcttcttttggctggggtcctgggacagcacttctttccctgggtgtctggatccccgccctaagcctcttgccactctggggatcagcgctttgccagctttcctggggtccaggagttggggagaggccggttctcggctccggtgtggggttgaccgtgtgggagcttgcttgtctcaggagaaaacgtgtacgtcatcaaacgagatggaaggtggcaagtgttccaagaggcgatttattctttctgctgatggacacacttgccataagtagaggcaccacccgggatacggaaaactaggtgttggcatccttcccctgtttaaagccttgttgactcctaagaatgaaatgtggtgttagtctgttaatctctattattcgaggtagttgccacatcagctacaattgtaatgatagcagattggtgtgttgcattttgaaaacacctttattttttcactgtgctccaagacttcattttattcttatggtgaagtactactaccaaggggattccatcaagttctgcatcctatgtaaaaatctaatccatagttctcaaatttagcatgcatcagaatcaccgggggattgtcaaaacacagattgctgggccccacttccagggtttctgatttagtaggtctgagatggggccaattaatttgccctcctgataaatgctaggtgtaacggatacggctggttgggcatcacactttgagaaccgctgtgtaatctagcccatgatttcctaaatgttataatttttcattgtttatcttcattgctttttttcctgcttacaaaagtagtgacgcttgtaaacgttttgaatagaaagagcactagcttttaaaaaaaactggcatgtcttggacatctttcattgtgactccttatagatctatctcattgtttttagctgctatatagtatttcactctatggctgtttcatctttatttaagataaggccgggcgcgatggttcacgcctgtaatcccagcactttgggaggccgaggcgggcggatcacttgaggtcaggagttctagaccagcctggccaacatggcaagaccccgtctctactaaaaatacaaaaattagccgggcatggtggcgggcacctgtaatcccagctacttgggagaattgcttgaactcgggaggcagaggttgcagtgagccgagatcgtgccagtgcactccagcctgggcaacagagcaaggctctgtctctaaaataaataaataaataaaaataaaaatctcctattaactaggcatggtggtgcatacctgtaatcctagctactctggaggctgaggcaataggactgcttgagcccaggagttggaggccagcctgggcagcgtagtgagaacccgtctctaaaaataaataaataaataagtcctctattgatacaactttatttagacccttttttttttttttgagatggagtctcgctgtgttgccaggctggagtgcagtggtgcgattttggctcactgcaacctctgcctcccgggctcaagcgattctcctgcctcagcctcccgagtagctgggactacaggcgcatgccaccacgcctagctgatttttgtatttttatttttagtagagaagaggtttcaccatgttggccaggatggtctcaatctcttgacctcgtgatccacccactttggcctcctaaagtgctgggattacaggcgtgagccatcgtgcccggcccatttaaaccctttatacttcacatagaaagtataacactgttttttcccccactactgggaattttcacacgggacctcagatcaatacctgcaaagctgaattaatcttttcctccaactggacattctacttctgaattctgtctctgaagcgttctaattccaaaacccccacccctgccttatctagtcgatcctcttattcttcctccatccatgctcttttcattcaggccattatcagttctctgaagtgctacaagttattcacagctattttcctggactccaagttattaccctccacattactgtcagatctttcccatttaaagtcatttagtgagttcctcttggctttcaggttaaagtttaagccctatagctaaatttctactatagcttcctatacttgcctctctctgagcacttaccaccatggaactgtggtttacttgttggaatccagtcaggactgtgaaccagggactatgcttttgtttgatattctcagcatctagcaggagtgactggcctctattaaacatgctggagacattattgcaagactgattaagtgcatggtgaaaccccatctctactaaaaatacaaaaagaaaattaacccggcgtggtggcaggctcctgtagtcctagctactctggaggctgaggcaggagaatggcgtgaacccgggaggcagagcttgcagtgagcggagatcacgccactgtactccaactccagcctgggccacagagcgagactgcatctcaaaaaaaaaaaaaaaaagactgattaaataacatccctgagttatacgtaagacataaacatctgtaagaataaatcacgatctttcacaatatggcaaaagtgaatcagtcataggcctagctcttctgtttctatttcaggaagtcatatagtattagatcaaatatagatataaatggtttcttgaaacagttctgttgggttccttcaatgactaaagatttcttttcagtgtagatcaggctggtgtgtattttggtatgttaatggattacagtttaagtgctttagattcactattttaaaactttcttgaattaaaggataataattaaatgatatcctggagtttcatgcttacattttgaaaaggaaatggtcaacataatcaaatttactgactttgagtaacaagttataaaaatggaggacagatgcttccattttagccatagaaatctaaggcctaggacccttaagtaacttctctgtggttacccactgattcagtaacagatcagaatccaatcatttttactttgaaaggtcatgtggcaagttacattttaattttaactggtgatgtgtttgaaaagacacacagtagaagcaggcaacccaatttcctgctgcctctgagaatcagttgtacccaattgagggcaacagtctattaatctctgtcacagttttcttttttggttctcttttcttcttaacctaatgcttcttttctgctttttttctctctctgcaactacatcttagggctgctgtaagtacttgctttttgcctttcctataggtgtcctgcagagataaagtgatgactgactcctgagtgtgaataacgggagagataatgtagttctgtttttcacatgtggttctgcgtttcaggaaatttaatgaagaaaagaaaggaatccgtaaagacccatttctctatgaggtatgaacaatttggtttttaaacacaactctaatcctaaaattgtctgtttttatttttattttgagacggagtcatgctctgttacccaggctggagtgcagtggcgcgatctcggctcactgcaagctccggctcccgggttcacgccattctcctgcctcagcctcccgagtagctggaactacaggtgcctgccaccacgcctgactaatttatttgtatttttagtagagacagggtttcaccatgttagccaggatggtctcgatctcctgacctcatgatccgcccgcctcggcctcccaaagtgctgggattacaggcttgaaccaccgcgcccggccgaacttctgataaattatttagtcaccacctataatcaagatatagaatatttctatcctctccaaaaatgttcttatgtccctttacagtgagccctttgccctcccttagttcctggcaaacattaatctattttttgtctctgtagttttaccttttccagaatatcctataaataaaatcatacagccttttggttctggcttctttcaattagtataatgcatttaagattcatctatgttgttgtgagtatcaacaattcattctatttctgagtagtattccattgtatggatgtaccatagtttggttatccattcaccagttgaaggacattgggttttttccagtttttgatgattatgagagctgctataaacattcatatatttatttagtgtctaatatgtgctgacttgtttcataagtaaactctccatacttggggagataaaacctatgtccatgaaataattagcaaactaaaataaagtatacattaacagacaagctgggggtggggggaatactcatgaatgagaagctgtaatatctataattatgtgtgtgtgtggctacatatatatatatatatatatatatatatatatatatatatatatatatctcttaaaaatcaatgaggaagatggctgggcacgatggctcatgcctgtaatcgcagcactttgggaggctgaggtggatggatcacctgaggtcaggagttcgataccagcctggccaacatggtgaaaccccagctctactaaaaaatacaaaaattagctgggcatggtggcgtgtgcctgtagtcccagctactcaggaggctgaggcaggagaatcacttgaacctgggaggcagaggttgcagtgagccaaaattaagccattgtactccagcctgggcgacagagtgaaactccgtctctaataaaataaaataataaaataaaataaataaaataaaataaaatataaaataaaataaaatgccaggtgcagtagcttgtgcctatagtcccagctactagagaggctgaggcaggagaatcacttgaacctgggaggcagaggttgcagtgagcagagatcgcaccactgcactccagcctgggcgacagagcgagactatctcaaaaaaaaaaaaaaatatcaatgagaaagacaaaaaagtataaaagaagaataggcaaaggacacgagtaagtaatcaagaaagaaacatgcaaatagagttacctttcactgtctgaattctcactagccaaactcaagaatcagatatatctgggtaaactcatttatcccttcctgcctgaattcttgctgcttgatatctgtattagtttcctagagctgctatagcaaaatactgcaaattaggcagcttcaaacacaaaaatttattctctcccagttctggagactaaaattctgaaattaaggtgtcagcaagtgcatgctcttcctgaattctctaagaaagaatctttccttgcctctttctaccttctgatggtttccagcaatctttggtattgcttggcttgtaaacacatcactcaaatctctgcttctgtagacacgtggtattccccctgcgtgtctatgcctctctctttccttttaagtataccagtcattggatttagggcttgccctaatccaaattaatcctcatcttgattacatttgccaagattttatttccaagtaaagtcacatttataggaactggaggttagaccttcaagataccatttttggggatacacttcaacccacaacagtacctgaaactcctcaagaacctagtagattagaataacacagtatccttggctctctgtgcttggtttcttcatgctttaatatccaaactaagaaaccaaatggattcaaataataagaatatttatgattaataagcatattagaaactgctgtttaccttggccgagtgtggtggctcacacctgtaatcctagcacattgggaggctggggtgggaggattgcttgatctgaggagtttgaaaccagcctgagcaatatggtgagaccttgtctctacaaaaagcaaaaaaaaattagctgggtgtggtgtcacgcacctatagtcccagctactactactgggaggcctcagctggaggattgcttgagtctgggaggttaaggctacagtgagccaagattgtgccactgcactccagtctgggtgacagagcgagagcctgtcttccaaaaaaaaaaaaaaaagataaaaagaaactgttcaccatcattattgatcaaacaaatgacaaaacagtaagatcttatgtttcactgtgagatggtaaaaataaacaatgaaaatgctttttttctttcttttttttatttgagatggagtcactctgtcatccaggctggagtgcagtggcgcgatcctggttcactgtacctctgcctcccaggttcaagtgattcttctgcttcagcctcccaagtagctgggattataggcacccaccaccacgccctgttaattttgtatttttagtggagacggggtttcaccatcttagccaggctggtctcaaactcctgacctcaggtgatccgtctgcctcggcctcccaaagtgctgggattacattcgtgagccactgcacccagccgtgaaaatgcttaatatgttgatataagtgatggaagtataaatgtgtaggtgcaacattttgaaaggcagtctaatagtatcagtgtgattttaggtattaatcttaagaaaataattcaaaagtgttcatttgaattgatgtcatcaattgtttataatagcaaaaaactggaaactactaaaatatcatataatatggaattagttatgtgacaaaagagctgtggtactagactgccaaagaacattgaatgacacagacattcatgatataaaactattagaatcctgtttttattaggcaaaatcctattagatatctaaatagatacatttctatttttattatcattttttaaagagatggggtcttactctgttgcccaggctgaagttcagtagtatgatcaaagttcactgcggcctcaaactcctgggctcaagtgatcctcacacctcagcctcccaagtaactgggactaccagtgcaccaccatacctggctattttttttttttttaagagacatggtcttgctgtgttgtaactagtctcaaattcctggcctcaaaccatcctcccatctcagcctcccgattagccgggattacaggtgccaatgtgtccagcatatatttatatttaaacagagttatatgcttggaaaaggaacgtgtaccaaccaggctaataacggtaatgattatcctgtgcagaatctcactctgttgcccaggctggagtgcagtggcatgatatcggctcactgcaacctccatcttctggattcaggcaattctcctggcttagcctcccgagtagctggaattataggcacccagcaccatgcccagctaatttttgcatttttatttgtgtatttattttttactttttaagatggagtcttgctctgttgccctggctggagtgcagtggcacaatcttggcccactgcaagctccacctcccaggttcaagcaatttctgccccagcctcctgagtagctgggattacaggcccccgccaccatgcctgcctgatattttgtagtcttagtagagatgtggtttcaccagtttgagcagactggtcttgaactcctaacctcaagcagtccacccgcctcagcctcccaatgtgctgggattacaggcatgagccactgtgcccagcctaatttttgtatttttagtagagatagagtttccccatgttggccaggctggtttcaagctcctgacctcaagtgatgtatccgcctcggcctcccaaagtgctgggattacaggcgtgagctactgtacccagcctgttttcaaacttttaaataaacttccagttggaatgagaatgtatgaagttttggccaggacagtggctcatgcctgtattcccagcactttgggagacagaggtgggaggactgcttgaggccagaattttgagaccagcctgggcaatatagcgagaccccatctgtatgaaaaataaaataattagccaggtgcggtggcacacacctgaagttccagctactggggaggctgagatgggaggattgcttgagcccaggagtttgaggctgtaatgcactatgcatatgcctatgaatagccattgcactccagcctgggcaacatagtgagactctgtctctttttttttttttgaaacagagtctcactctgtcccccaggctggagtgcagtggcacgatctcggctcactgcaagccccgcctcccgggttcacaccattctcctgcctcagcctcctgagcagctgggactacaggcgcccgccaccacgcctggctaattttttgtatttttagtagagatggagtttcaccgtgttagccaggatggtctcaatctcctgacctcgtgatccacctgcctgggcctcccgaagtgctgggattacaggcgtgagccaccgtgcccggccgagactctgtctcttaaggaaattttccattgacttgcatagaactggtctttatgtgtttagatagtagaaatatataagtgtatgtataatgttgctcgatacctgttttaacaggctgatgtccaagtgcagttgatcagcaaaggccaaccaaaccctttgaaaaatattctaaatgaaaatgacatagtattcatagtggaaaaagtggtaagtactggtttgactttgtggttgtttaattctccataaccaaatttggtttcttgggaataatctaacgtacacgttttaaaatcagcatcggtgaaaatgagttctcattcttttaggagtaagtgtagtgctgtccagtacaaataaatatgaaccacatatgcaatttaacattttcttgtagcctcattaagaaataatcgataaaattcacttatttctttttttttttttgagatggagtctcgctccgtcactcaggctggagtgcagtggcacgatctcagctcactgcaaccttcacctcccaagttcaagcgattcccctgcctcagcctcccgagtagctgggattacaggcgcctgccaccacgcctggctaattttttgtgtgtatttttagtagagaaagggtttcaccatattagccaggatggtctcaatcttctgacatcgtgatccactcacctcggcctcccaaagtgctgggattacaggggtgagccaccacgccctgctgacttacttcttttgttgttcagttccatgaattttaacacgtatgtagattcttgcagtcaccaccacaatcaggatatataacagttttatctcactgaaaaactcccttgttgttattattggcaaggctgagctatttaactattttgtaaacacatggataatagtacccactaacaccaatcagaggttattgccctagagaaaaagactgtgggcctaaggttatagtccagaaagaaggtcttcctgttttgagagtgaaaaatccaagaacgtctgggtttccttggtattttacctttacctaatcattttgtgcaagttggagcacttccttttctgcttttaaggtagtcttgctcttttgcccaggctggagtgtggtggtactgtcatggctcactgcagcctccacctcccaagctcaagcaatccttccacctcagcctcctgattaactgggaccacaggtgcatgccaccaccctggctgattttttttttcttttctttttttggtagtcacaggtctccctgtgttgccttggtttgtctcgacctcttgggcttaagtgattctcctcctcagtctcccagaatgctgggattacaggcatgcgacaccatgtcctgccgagcacttccttttctaaaagcatcagttgcttcctttgctattagcaactaaggtcaatatctttttataggacagttgaaatgctcctgatggcaagattttttggtaccaagctagtttgtggctattcttgccaaaacccaatcatttgtgcttaagggtataaaaataagtacattatgttctacttgtcattattctgtagcatagtaaagagtcagctgctatcctatatgctcttttgtctggttaaataattaagaacatttttaaagcctttagaaaaggaagaaacaagtcatattgaagaacttcaatctgaagaaactgccatatctgatttctctactggcgaaaatgttggaccacttgctttaccagttgggaaggcaaggtaggttttctcttatgctgagtaggggtggcaactaggatttaaattgaaacattcttataaacgttgggaaaaataggcctctagcccttatatcttccttcatctcccccaccccctgataagtatacccaactaaggatagttctacttgaatatttgataggtatcccaaatgtgaccaagaatactgcacttatcttccctttctctacacctctataccaatttattgttgtttctcaattgttttccttatgtgtaatctggttcccctccagtctttcttcctcaaatgaaagcctgaccaagcttctttcctgcttaaaatcctttagaggttcttcattggcttcatgataaaacccaaattccttaagaatgacacacaggaactttcattgtctagccccactggtcctccaccaggggtggtaccatacccagagggaattggaaatataggggagtattttggtttgtcacagtgactgagaggagctactggcatttagtgcacctgcgccgtggatggtaaacatcctgcaatgcatgggactctcctgcacaatgagcagttatctcaccccaggtgccagtagtgcccctgttagaaacttgagagcctctggctacctctccagcttcacttcctgcctccccactgtgtagctatgtacagttccctctgtccagcctcctcctgcctccaaaaccaaaaagtccttgtcttcagggtgtcctggcgaatatagtcatgcaaatactaacagaatggtatgagaatgataactactgtaataacgttcacaaaattatatcttcatgctggtttttacttgctctatagaagttttttttttcttttttttttctttgatatggcattttgctcttgttgcccaagctggagtgcaatggtgcgatctcagttcactgcatcctctgcctcctgggttcaagtgattctcctgcctcagcctcccgagtagctgggattacagacacacaccaccatgtccggctaactttttgtatttttagtagaaacggggtttcaccatgttagccaggctggtcttgaactctcacctcaggtgatccacctgccttagcctcccaatgtgctgggattacaggcatgagccactgcgcccagcctagaagttttaaaagtttaatcagcctcttccttcataggtacttgattttagtcatatttggcctgttttctccctacgacttaaatgttaaatatttgtattattttctccagccagtgtttgtgtgggttgattcatgcgcttatttctttgctctccatttcttcttgcattttccttctggggttattttacctctttttggaagtaaaatcccctagaaatttttttcctggacatctgttggtaatcaatttagttttcatgtctttgaaaaataaaaacataagccacattttttggtgactttcaattttgatacactttcaaatttatgggaaagttacaagaatagtgcatgaacttctgtatatccttaatccagattcaccaattgcttagattttacagcatttgcttctttttcttctccttcttccccttttcctttttctctctcttgtgtctctttctagatagatatatgcaaagcagtgtattgctatgtatgtattcatatatagttatatatgtatattgttacaactatatatcataacaatatgtttataactattgttatacctatagattttgtgtttgtgtgtgcgtgtgtgtgtgtgtatatatatatatatatatatatatagtaatgtacacacatacaccattttaaaaatgaagtattgacaatgtagtgaagatctggcactcttttacccctaaatgctccactgtgtattctctatgaacatatacattctcttacataaccatggaacaatgatgagaatctggaaatctaacattattacaataccattacctaatcagagcccatattcaaattttgttaactgtctcactaatgacagcatcattttgtgtttattgggtcctacttctttcttttctttccttttttttttttttttttttttttttgagacagagtcactctgtcgcccaggctggagtgcaatggcgtgatctcggctcacagcaacctttgcctcctgggttcaagcgattctcctgcctcagcctcctgagtagctgggattacaagcacaagtcaccacacccggctaatttttgtatttttagtagagacggggtttcaccatgttggtcaggctggtctcgaactcctgacctcgtgatctgcccacctcggcctcccaaagtgctgggattacaagcttgagccaccgcgcccggcctggctcctacttatttctttagattaatctcacatcctacctcttcaacttctactgaacttccactcctgctgaacccccaatccttgccatattgaagctccctgctcatagtagctccaatcctgtcatactctgtcactttctggtgcgtgcattttgatctgcctggtgaatctattaatggataaagtatacatatacatacatgttgctatttaagttttaggttgttgtttctgtgagacctctcgtgtcttttttttttttttttttgagacagagtctcaccctgttgcccaagctagagtgcagtggtgcgatctgggctcactgcaagctctgcctcccgggttcacaccattctcatcctcccagtaactgggactacaggagcccgccactacaccaggctaattttttgtatttttagtagagatggggtttcaccgtgttagccaggatggaagacccctcatatctttttaaaagaaaattctggctggacgtggtggctcatgcctataatcccaacactttggaaggctaaggcagaagaattgcttgaggcaagtagtttgagaccagcctgagcaacactgcaagactctgtctctacaaaacataaaaataagcctgatgcagtggcttgtatctgtagtcccagctatttgggaggctgagacaggaggatcacttgagccaaggaggccaaggctgtagtgagctatgatcgcaccactgcattccagcctgggcaacagagtgagaccctgtctctcagaaattaaagaaattcttgaattggaaatctctatctataatttgtccttactcttgttttaaaggcagttaattggactttacaccatggctcacaatcctaatatgacccatttgaagattaatctgccagttactgcccttcctcccctttgggtaagatgtgacagttcagatcctgaaggtacttgttggctaggagctgagcttatcacaacaaacaacagcattacaggaattgtcttatatgtggtcagttgtaaaggtgagtgctctctctagagagtgtgtgtgtgtatttattcatttgtatagttattgtttcatgtttttttacgaaaattgatattgttatgatgaaagtgcacaaggtagaacttgcattaatcaccataaatctactctggtgtgtaacttgcagcatgtgggaggtattccagaaacaccagaaacagatctccaaaagtctggacaggaggtttacacttctttgatttgggtttcattttatttctatgtgtatattattgaaaaatttcattggaagatacaaactgacaatatgtttccaatcgtagacatttaattgtatttttggtagtagtattgaccttcattccactttattttttatttgtgtttatttacttatttattttgagacggagtcttgctctgtcgcccaggtgggagtgcagtggcgcgatctcggctcactgcaacctccgcctcctgggttcaagcagttctctgcctcagcttccggagtagctgggattacaggcacctgccaccacgcccggctaatttttttgtatttttaatagagacggggttacaccatattggtcaggctggtctttagtagagacgggggttcaccatattggtcaggctcctgatctcaagatccacccccctcggcctcccgaagtgctgggattacaggcatgagccaccgtgcccaacttccactttattttttatttacttatttttttagagacagagcctcactctgtagcccaggttagggtaccgtagtgcattcataggccactgcaacctcaaactcctgggctcaagtgatcctcccaccataacctcctgaatagctgggactacaggagagcacaaccatggccagctaattttatttttatttttaatttgtttttaagagacagggtcccactgtattgcccaggctggtctcaaactcagcctgaagcagtcctcccacctcagcctcctgagtagctggcattacaggcaagtgctgctgcgcctggctgttacacttaaattcttatttttagttttttgaggtaggatcttactctgtcacccaggctggagtgcagtggcgcaatcatggctcactgcagcctcgacctcctgggctcaggcaatcctctcaccgcagcctcccaaatagctgggactacaggcacatgccaccacacctggctgtttttttaattttctatagagacagggtcttgctatgttgcccaggctggtctcgaactcctgggttcaaacgatcctccctccttggcctcctaaagtgctgggattatatgtgtgagccaccatacccagcccactttcattctcttataaacatttcacttatctgtgatttaaaatttaattttaacagttattttgttgagttgtggtacattgagaatgtgagggattacagttttgtagctctgacaatgtaattttgagttgtgcctttacatttctttctttcatttcctatagctgataaaaattattctgtaaatcttgaaaacctaaaaaatttacacaagaaaagacatcacttgtctactgtaagtgttttgcttctactcatattattttcttcaaattgttgtcaacctgccttcctagtttacaggttttttttcactcctaagatgactagatatttttctgtagtatgaaaatgtttatgtttattttcatatcagctaatgaccaaaattaaaatgccttcatgccttttagccaatctttgtggtttcaaagaattgtcttacttttctatttgggatatatggaaagtatatatcccaaaaatatatggaaagtatatatcccaaaagtatggcgtgtgtgctcttttttcttttgggacaaggatcaaaataatttgggtaatggactcttggccatgtggaagcacagctaaatgatctgctgggtacactcttttcaggtaacatccaaaggctttgcccagtatgagctctttaagtcctctgccttggatgatacaatcacagcatcacaaactgcgatcgctttggatatttcctggagtcctgtggatgagattcttcaaatccctccactctcttcaactgcaactctggtaagagtgggccctatttccttttcgggttcatgagactcctaaatgttggcttacttggttgttgctggtgctccatgcctctagccttggcacttgctgagtgtgagcttggacaactctgaaaggcccaccttgccactaacgtctcaccagggcagccagtgaaggttttgtcaggtgatctgatctatcagttgccctcagccctataataatataacttaagaattttctagtgatgaataaagtttttgagtggtggctcaagtgaatccgtgtttttgtttgtttgtttgttttgttttgagacagagtcttactctgtcacccaggctggagtaaagtggcacgatcactgctcactgcagcctcgaactcctgtgctcaagcagtcctcccgcctcagcctcctgagtagctaggactacaggcaaacgccaccacacctaattttttaactttttttgtagggacagagtctccctatgtttcccaagctggtctcaaacccctgggctcaagtgatcctcccacctccacctcccaaagtggctcacgccgggattataggcgtgagccactgtgcctggccctcttattcttaaaagggtggagttattggtaacacatcaagaatcattataatattaagccctttcactctgtatttacatttctaggaatctgtcttaagaaatcagtcaaaattggctgggcgcagtggctcatgcctataatcccagcactttgggaggctgaggaggatggatcacggggtcaggagttcaagaccagcctgacgaatatggtgaaaccctgtctctactaaaaatacaaaaattagctgggtgtggtgttgtgtgcctgtagtcccaactactcgggaggctgaggcagaagaatcgcttgaacccgggaggcagaggttttagtgagccaagattgtgccactgcgctccagcctgggtgacagagtgagactctgtctcaaaaaaaaagaagtcaaaattgctaacaaaaattcatgtgtaagatattcagtgcagcgatataactgtgtttccaaaatactataaacaaaactggaatgttcagtagggaatagttgaaatagatttctttcttttttttttttttttttctggggcggagcctcgctctgtctgccaggctggagtgcagtggcgtcatctcggcttactgcagtctctgcctccctcccgggttcaagcagttctcctgcctcagcctcccaagtagctgggactacaggtgcatgccaccatgcccagctaatttgtttgtatttttagtagagacgggttttcaccatgttggccaggctggtctcgaaatcccaaagtgctgggattacaggcatgagccaccacacctggcctaaaatagatttcatgatgaaatattatatacagtctctaaaagcctgttttaaaatcttgaatattaataataggatgtgcttattaagcaaaaagaaaaaagaaaaagtataaattatttatgtagtgcgatctcaactatattgtttaaaaaatgtatatacagaagcctggatagtgttaatagtggttccttcagagtggcaagattatggataattatattctttttttgagacagagtcttactgtcacccaggctggagtgcagtggcataatctcagctgacggcaacctctgcctcccaggttcaagctattctcctgcctcagcctcctgaatagctgggattacaggggcatgccactaaacctggctaatttttgtaagtttagtagggacggggtttcgcccagttggccaggctggtcttgaacttctgacctcaactgattcactcacctcggcctcccagagtgctgggattacaggtgtgagctactgcgcccagacatggataattatattctttatacttttcctgtaatgggaatttacatacattggcatatacgtttttctttttttatgtttgcaatctaaggtttgtaagacattgacctctggctaggacagcacactgttagtttagttagaaggagtctaataaacagatttattgggagacttcattttggtttgtgataatgctaagttatcaccgaatcttgagatatatttatgtaaatttctcctaccttgtcctcctggaaattccttgggaaaaggcaggggagtgtgtgaggagggcagttgttccacataggtacaattgtttatgtcatagaaagaggataagtggttttaatttagattattgggtcaagatggcaaaatctctgagtaagatgttctaaatgatgtgttgacctcatttttcaattcattggtcctttatgaaatatattttttaatgtgtgaaagatagtttgaaatgcaagtataacacttatgtagagaaggtaggattagcactagaaaactgacagactttggaaactttttagaatattaaagtggaatcaggagagcccagaggtcctttgaatcatctctacagagaactgaaatttcttcttgtgagtatccttctagaattcctttccttaaatctatgtttttataaacatgtgtgctattgttgtttttacttaggtttgtgttactcaaaacttcttcagatgttatgtatccattagaagctctgacagtttgggcagttaaattttacttctgtggtagttgtccttacaattaacgggagcattaggtcgttaatagctagatttctctcaccctttgtgttgttttatttttttaattaatttatttatttttccattgtgtgtggatataccacattttgttcattcatcagtcgattgacatcttagttgtttctactttgtggctattatgaataatgcctccatgaacatttacatgcaagtttttgtgtagacatgttttcacatgtcttgggtggagttactagatcatatggtaactgtatatttaccttttgaggaactgccaaaatataactgttgtccaaagtagttatgttattttatatttctttcagtagtatatgagggttctgatttctttacatctttgtgaacacttgatattgtctgttttttaattatagctatcctagtggtagtgaagtggtatctctttgtagttttgatttcatgtgcttattggctcctgcttatttctttagcttaatctcacactttacttccattcccactgaacccccaaccctcatcataccaagctccttgcttgtagctcggatcctgtcatactctatcatcttctggtgtgtgcatcttgatctacctggtatgcacttctcccacctctttgctaggtgagctctctgtgatggttgcattgatctcacagaatggcttgtgttgctgtagaactccacacatacctcttgtcagtgtgtttataaaacacagtaatttgtttacttatctgtctcctctactagatttgagtgcctggttccctattgtgcccttaccatctagcatagtaccaactatttttgatacttttacttcctatgagtaagtattatttctctgtttgtataaaactgatagttttcctacctttctcacctttcttctttcttgaaagcccctcttttaggacccttactgcgggcctccatcatacttttgccctcacatctctgcccttctctctctgcacccctgcagagctgatctattcagtgatttgactgacacctttgtgagcaagctccaaaccctcatctttaagctgatagcacttcccatctttccaacttccaccaaattatttcccacttgggtagagtgctattgcttcaagagtcagtatgtcaaaatgaaactatcttctccagactacatcctctttgaaaaccccccatttctgtctgtggtcccatcgttccttcaatttcctacgctagaaatctcatatttcactttagtaagaactgttatttctatcaccactacgtactactatagctagaagctgccactctgctgtgtgccacccatggtgctggctggttcagttattttgcctgaaggtgacaacaaactggtaaatggaagagctggcacaagttcatttaaatgtgtgtttgtctaattcaagtctcccttaaaaagtcacagaatcttagatatacatgtggccatagtctgtctgtgttcaaccccctatattttataaatggataggattttttcttttattccacatataccttgctacccttccccccatacatatacaattcttttcctcctttgaagtctctttcactgtgctcatcttagttaaaatctttaccatcttcttctgggaccatgctaatgatgattcattgtttctcaacaggggcactattggcatttgggcaggaacattgtttgtgatttgggaccatggtacacacaccaagatgtttaacatccctggcccccaccaaactccatgccccaagttcgcctatgctcctaatcatttatgacaacaaaaattatattcacatttttctttttttttttttttttttttttgagacggagtctcactctgtcacccagcctggagtgcagtggtgtagtcttggctcactacagcctcctcctcctagattcaagtgatttacctgcctcagcctccccagtagctgggattacaggtgcccaccaccatgccctgctaatttttttgtgtttttagttcaagaggggtttcgccacgttggccaggctggtcttgaactcctgacctcaagtgatccacctgtctcggccacccaaagtgctgggattacaggcatgagccaccatgcccaaccatcttcacatttttctaaagacctccccccgggagtgggagatgatagcatttcaactgggaaatgttgtattttctctttcctaggaatccatccttgatacttctgatagagaaattcttaactagatcatgtcattttcctgccaaaaaaatcaacattggctgttttctgccatatgaagttaaaaaacttttgaagatcccttgatggtttagctactatttcttctaatcctatttcccgctgcttcatagtcgctttttctaccctggttgggatcacaccaccctcttcatcttatttcatgccgttttcctgccagcctatggttcccacatttgagttgcaactgaagttacaagttgtttcactggcttttgcggcctaacttgactgctttttctttcttttttttttgagtcttgctctgtcgcccaggctgcaatgcagtggcaccatcttggctcactgcaagctccacctcctgggttcacgccattctcctgcctcagcctcccgagtagctgggactaaaggcacccgccaccatgcccagctgatttttttgtatttttatagtagagacggggtttcaccgtgttagccaggatggtctcgatctcctgacctcatgatccacccatctcggcctcccaaagtgctgggattacaggtgtgagccacggcgcccggcacttgactgctttttcttaagtccattgagatattgtatgtatgtgcatacatatttatattattttaatataaacttccactttttacatttattcatccccagactacttcatttgtcttatccgtctatctttgccaaagttgcaagcatctccagggcaaacccagtatcctcagtcttaagtcctctgtagcacctatgcacgtggcatcattgttcagagtaccatctttgggatcagaccactgggtatatatcctgagactatcagttactaattgtgtgaccatgagcaagttactgaacctctcttagcctcaataagatgagaataatagtaatatctaccatagagttttgttaggattaaataacatgtactatacataaagcaccacagcagtacctgggatgtgataaacactcaagaaatgttactgcaattaatattattattacatacatccttattgattaaacagtgttttctgctaacaagtttttggggtttttaaatctcctgtaggttttggctgatggtttgaggactggtgtcactgaatggctcgagcccctggaagcaaaatctgctgttgaacttgttcaggaatttctgaatggtgtattacttgttttattaattgagaatttatacttgctatgtttaaatataagtttctctttaagcttgatactcttttttgattggaatatatacaaagctatgagatctgttatggtcagagggacagcttttgttctgaattgctaatggtagagatctaagtaatcctaagaattaataagatttaatttatatttgagattgaaggaaaaaagagatgaatcagtagcctttgaatacctaccatgtgcctgatgccatgtgtcaggggcttttctgttacctccgttcatcctcacacccccacctgatggatatctattataatctccaccagagttcagtgatttgctaaaatccttagttagacttctactgtccccatttaccatttgaaaataggattaggatggaaataatttggaaagcagaaaaatcaagagctaataaacttttgccactttctagacttaaataagctggatggatttggtgattctacaaaaaaagacactgaggttgaggtaagtgattattatcagttagaaatatacacagaaatagcttttaaaattcggttatgctgacatctttcatgttgtaccatcgcaaatggatttgggatatcaaggcagcatttaaggggaatttttgttgatctttattgtcagcactggttattgttttccttaagaaatgataaatatttttatttaattattattatttttttgagacaaggtcttgctctgtcacccaggctggaatgcagtggctccaccatggctcactgcagctttgacctccagggctcaagcgatcctcccacctcaggtccccgagtagctgggactactggtgtgcaccaccatgtctggctaatttttaaatattttgtagagatgggttctcactatattgcctaggctggtcttgaactcgtgggctcaagcaatccacctgcattggcctcccaaagtgctgggattacaggcatagccactgtgcttggtcagaactgataaatatttttgaagagaactggtatatatgtattattagttgctcaattgcagagaagtagaaatgaatatgttaatattactataaaatggctctactatcatatattaatatactctaagatggtactgttaaattaaactagatatattctcatctgacaaataggaaaacggagaccaaggtaatttaattttttttttacatggagggaaagctgaatgctcacttttaggcactataattttaaaacaatattaagggtcttgtttttcactgttgatttgtatctcctcattagtgaatgaagttgtagaaaattcgttcatatctttgtgtgtgttcatgaatccataatttctcagagcagcatttgaaggcttaaattatttcacttaaaaaaaaaactgagtattctctgaaggttgcttctttttcagaccttgaagcatgacactgctgcagtcgatcgttccgtcaagcgtcttttcaaagttcggagtgatcttgattttgctgagcaactgtggtgcaaaatgagcagtagtaggtgtccatcatgatttaaatttttcctcttatttcttaggtttatttttaagtcttttggaaataatacagtgtgtaccactagttttgtggggaagtctggttcttaactttatctaattcatttctaatgacacattggtgcattctgcttaagaattgtactaagacaaagtaatttgtagaattatccttttctcctgcctttttaaatataagacttaggtaattttcatgatctatttatatgaaccaaaacatataccttactgaaattataattattgaaaaaggaaaagatattctttagtattttactaagcatattattttttggcaatctgaatttggtttctttctttagaaattcattaaatcttttttttttttgccactttaatttctttccctttcccctgcttgcaaagtacaaattcttgctttctacttcatttgtgtatccttaagattaatgatatatttgatctgtagaaataccctgaaaataatgttacactgacttgttttccaaggtgtgatttcataccaagacttggtgaagtgtttcacattgatcatccagagtctacaacgtggtgatatacagccatgggtaggtttagtagtgtgtgtcagatcattttctcagcagcatagcatgatgtaaagacacaggctctgaagccaactgcctgagtctgaatttcagctctgctactttctagctgtgtaaagttcggcaggttcctttacttttcttgtgccccaacatcctcatctgtaaagtaaaggtaagaatagtatctacctcgtagtgttccaggattgattaatgttatccatgtaatgcacctagtgcctggctcatacttaagggcccagtgtgtgtaaactactaatattgtcattgttaagtgttgctgtgaatgagtattctcatatactactgatgagaatgcaagttgagatattctctaaaaagcaattttggtaatgtattgagatcctcacaatgtgtcatggcctttgaaccaataattcttttgttaagatgtaccctaagctcatacacataaatatgtatcaagactttatgtatcagaatagtcatctcagcctcatttatattggcataaaaatttaaaggacctaaatttctcttgctaatggaatggctaagtaaataatgatatagctacatatggcacatgtaatagttgctgaaaaaatgatgctgataaatgatatggagaaatgcttacaatatttgataaaaaggaatatacacaattgtatatgaagttaacttttggagagaaaaatctggaaacaaatatgctaaaaatcttaatagcagtcacctctggtggaagggttacaaatgactttttccagtcaggcgtggtgactcaggcctgtaattccaactctttgggaggctgaggctggcagatcacttgaggtcaggagctcgagaccagcctggccaatatggtaaaaccctgcctctactgaaaatcaaaaaaattagccaggcatggtggcaggcacctgtaatctgagatactcaggaggctgaggcaggagaattgcttgaacccaggaggcagaggtggcagtgagctgagattgcaccactccactccagcctgggcaacagagtaagactccgtctcataaaaaacaagtttttccaactgtgttatatttctactttatgaattttccacagtgaacttgtgccacttttatagtcaagaaaaagctaagtaaaaagttaaaaagatttttaataggaattattttaggtaatatgactaccaattcatcattataaaagttataaacttttatgggtgtgaacaaggtacattccagagtaaaggcatgcaagctctgcttaattgggcattagtgattctaggcattttagttttagccgttgaatttttctcttgagagtttctgtgttcatgagatgtttacaagtataaccttactaaccttaccatgtactattagtgcaaacaaagtgaaactatgtgtatattgtaaaaagaccttgcaaagattatgatgaaagttaaagtagagaaatagaaagtagtggggaaatgacattttatgagtacctaaaatgaatcatttaacatttggaacacaaattaaattgtaaactcacagctctttttaatttacaaattatcaagttcgtatgttggatattgtagccaatgaggagttccttatgaacatgcatggaccattgagggagcttgtttaactgcagcagcagatttttggtgtagaagaagatgttcaattgtggaaaagattctcctctcagctaggagaggagaattcctagttgtaaagtttcaaaggaacagctctggcttctctttggtggaatcgtatctggggatgataagtttaaacccttcttagttgctttggacttaaacacatgagataggaatggctttttaaattttattttattttattttatttttttgagtcagagtcttgctctattgcccaggctggagtgcagtgctgtgatctcggctcactgcagcctctgcctcccaggctcaagctgttctctttcctcagcctcccgagctgggactacaggcgcttgctaccacggccagtttattttgtatttttagtagagacggggtttcaccatgttgtccaggctggtctcaaactcctgacctcaagtgatctaccctcgtcagcctcccaagtgctggaattacaggtgtaaaccactgcacccagttccagaaatggcatttgaaaaactgacgttctggccgagtgccatggctcctgcctgtaatcccagcactttgggagtccgacgcgggcggatcacgagatcaggactttgagagcagcctggccaacatggtgaaaccccatctctactaaaaatataaaaattagccaggtgcagtggcatgctcctttagacccagctactcaggaggctaaggcaggagaattgcttgaacctgggaggtagaggttgctgtgagccgagatcgtgccactgcactccagcctgggtgacagagcaagactctgtctcaaaacaaaaaactgatgttaataacttggggggttttgttcaaacaatttatagtgttaggagactaggaatgcaagcttataatttttagtttgtagctactgtaatttgcttctcttttacttgttgggtttatttatatatttattcatggttttataaaattttcctgatttctagctccatagtggaagtaacagtttactaagtaagctcattcatcagtcttatcatggaaccatggacacagtttctctcagtgggactattccagttcaaatgcttttggaaattggtttggacaaactaaagaaagattatatcagttttttcataggtaagtatctttcctggctcaaaaaattaaaaaacacatcacagttatcagtcacagatattctcggattttctgtttctgcttgtccctcatcgtctgtagtccttcctggctttgtacctggttcactatgagatgagcatttcccttctctgggccttagtttccccccaataaagatatcaaatgcattatatccatagttcttgataatttatttgtttttagttcaaacatttgcggttctataaagttagtattttaaataaaaaaatccttttatgagatgctgttttaataccctacacttggttgtttttaatgagagagaagctgtgatcatttttagaataaatattagtatatatttatggtataatatgccaggaaacttggccttttgtgaggaactacttagcttgacaatctctttcatataggaactataaaaaatttatatagattccttaatatgtaatttaagaatttaagaatttaaatagaaatttaaattaatttctattaatatgtaatagaaaatacctgaagtgtttttgcatgtatgtgttttttcttaataggtcaggaacttgcatctttgaatcatttggtgagtttatttttttattctaaaattggtttttcttttattcagtcattctgtgtgcagttattaactgccaataatatgctagccactgtcttaggtcctgggaaatggataaataagacagtcagtgcccgtagttattactgcctagtaagatagacaaaaaagtagcccattcaatgtcatttctcactctctataaatttgtgatacttatatatagttatatcctactgaagccagtgtactatcacacatctcatctatccagaatgcttagggaatgcctttctttgataggttctgtaaagcaatgtttgttttattttctctttattcatttatattacacttgaaagtttattttccaaataatttataatctttaatgtatacttttgggtttcagggtcatcgttatgaactttgttgtattttcctagcccattcagaaacttcagaaagttgaatagtgtctgtactgatctttgacgttcattgaaagatccttttgaaaatgaatttatagtatcaatttgtttatcatttctctcttatgaaaatacaagatagaaaaactatatctgttgtgcaaaatagactcaactggattcttctgaggtttaatttttactattcaaattttaaacattttattaagggcatatatttttagtggacacatgttctagcaaaaactacacacacacacacgcgcacacacacacacacaaacatacatacacacagttggtcctctatgtctgtgggttctgcatccatggattcaaccaactgcagattgaaaatgtttaaaaaaaatacgctgggcacagtggctccctcctgtaatcccaacactttgggaggatcacttgagcccaggagtgtgagatcagcctgggcaacatagggagactccatctctacaaaaataaaaaaattagccaggcatggttgtctgtgcctgtggtcccagctacttgggaggctgaggtaggaagctcacttgagccggggaagttgaagctgcagtgagctgtgatcgtgggctacttttttgtctatctgcactccagccttggtgacagagcaagaccctgtttcaaaaaaaagggatgattatgtctgtactgaatatgtgtggatttcttcttgtcattattctcttttttttcttgtcattctctaaacagtaagtgtaacaactatttatgtagcatttacattgtattaggcattacaagtaatctagaggtgatttaaagcatacaggagggtgtgcataggttatatgcaaatactatactattttatataaaggacttgagcatccatggattttggtatacaaaggggatcatggtaccaatcctccatggataccaacggacaactgtatctgtatatacagtcatacttcacttaatgatggggatacattctgagaaatgtgtcattatttttttaaatgtgtgattaggtgatttccttattgttcaaatttcagggagtggcgtaaacaaacttagatggtataacctactgcacacctaggctataaacctttacagtatatttttgtactgaatactgtaggtaattgtaacataatggtatttgtgtatctaaacatagaaggggtacagtaaaaataacgtacaaaagataaaaacgtggatacctgtacagggcacttaccatgaatggagcttgcaggactggaagttgctctgggtgggtcagtgagtgagtggtgagtgaatgtgaaggtgtagaacattactgtacactattgtagactataaacactgtatacttaggctacaccaaatttatttaaaaatttgtttcttcaataaaaatttaaccataacttactataacttttttacattataaacttttaaatttttctaaactttttggtttttttgtaataacacttaaaatacaaacacattgtacagctatacaaaaatattttctctttgtattcttattctatgagcttttttctatttttaacttttttttttgtttgttttaaatttgtttgttaaaaactaagacgtagacacacacattcgcctaggttgggatcatcagtatcactgtcttccgcctccacatcttgtcgcactggaagctctccaggggcaagaacacacatggaactgttatcacctatgagataacataggtgccttctggaatacctcctgaaggtcctgcctgaggctctttttgaggaatagttttgttcataccaatatcacagctaacaagggaataatgcattgcactacattacagctacaaagtcactactggcgagagggatttttcagttctattgtgatcttataagaccactgtaggccgggcgcggtggtttacgcctgtaatcccagcacttggggaggctgaggcagacagatcacttgaggtcaggagtttgagaccagcctgggcaacgtggtgaattcctgtctctaataaaaatatgaaaattagctgggtgtggtggtgcatgcctgtaatcccagctactcaggaggctaaggcgggagaatcacttgaatccaggaggtggaggttgcagtgagccaagatcacgccacggcactccagcctgtgtggcagagtgagaccctgtctcaaaaaaaaaaaaaaagaccactgtaatatgtgtgatccattgttgactcaaacactgttgtatggtgcatgactataatttagtttgaataatagtattgaaaggtgagaaattctatctagcttcttctggtcttttttttttttaatgcctgttatcaagcatccaaatgtaggtgtagaaggcatacctatattctttacaaaggttacacaggtgctttaaatctctattttgcttatattttttcattccaggaatacttcattgctccatcagtagatatacaagaacaggtttatcgtgtccaaaaactccaccatattctagaaatattagtcagttgcatgcctttcattaaatctcaacatgaactcctcttttctttaacacagtaagtacatctgtattcttcacttatatagaaatgtatttcttttgaaatagttacagcctaaatatgtacagtttttattaccagttaggatagaacctcttcatcctgtctttacagtagcatgcatgagtctaagtcagtgccataggcaggaaaggctttggattcaaaaggaatcagatttgacattggctgcatcacttcctaacttccttaggaagtttccatcactgaatcctgtttcctcatctgtaaaaaggatctaataacctcatgtattcgtaaatactagttccttctcttctttatatccctgtcaatttgggtcaaaatagccttgccagccatctaaatgataacaatggaatcaaatagtactactagacctctgtcagtagcattgctgtaattgtagagactgctgtaatttgagattccaattagtttgactagaggttatttggaaaaattctcagacacggactgctggtatcttatgtgtatttgaggcctcaaactaggaagtgaactgtccagtggaaggactgggtttcttttccctctggaaggaaatgtaccattacattttccaaaattacaatttgcctcagttgtagaggggaaagtttgaaattgttattgtttatagaatctccaagttttgttttttttttccccattatagatcagtggaatgaatgagttaactgtaattccttggactctgaaaaccatggaagctgtacttttgtttctcttctgcctcttttttttgtattgtttctctctttctgtaacctctttctccccacgaagcctttctttggcctcaaatttattttatatttatgagaaatatgtctattaattttttaaaagtgaatgagatttgttttcaaagaaaaaaacataacctaagttttgtttgtagggttgttgtgtttgtttgtttacttttgtggctctaaaagtgttcgctgatgttttagttagtagtactcaataaaatgtttcccttacgagctttagactaccagaaaaacgttatgtcaaatggctcttttttccaaaagaggttccattttgttttttcaggatctgcataaagtattacaaacaaaatcctcttgatgagcaacacatttttcagctgccagtcagaccaactgctgtaaagaacttatatcaaaggtaagcaatttttgctaggcatggtggctcatgcctgtaatcctagcactatgggaggctgaggtgggaggataacttgagctcaggagttcgagaccagcctgggcaacataatgagaccctgtctctattaaaaaataataatagctgggcgtggtggctcacacctgtaatcctagcactttgggaggccgaggcgggtggatccccagaggtcaggagttcgagaccagcctggccaaaatggtgaaaccccatctctactaaaaatacaaaaattagctgggcatggtggcatgcacctataatcccagctactcgggaggctgaggcaggagaatcgcttaaacctgggaggcagaggttgcagtgagccgagatcatgccattgcactccagcctgggcaacaagagtgaaactccgtctcaaaaaataataataataatgataataaataagcattttaatttattatcttaagtccacccatgatcctaggcaatttcagtgttcatattcagtagggacctcatgacccagagcttcgtcacctctgaaacctt

SEQ ID NO: 172 - DNA, 32744 bp, Homo sapiens
  source 1..32744: mol_type = other DNA
tccgcggaggtcctgcctctccctgcggacgggcgctgattggcccgtttgaaatgcgccaggcgggagctcacctgggctcttagcgtcgccgccggcttcgcagagcaccgcgccttagccgcgaagttctagttcttgctgccggtcctaacgtcccgcagtcttcgccagccagccgtcccgcatgcgcgtttgggcggcgtggagcctgctgccatgaagtcagcgtgagtacgaggccgccgagcagggagagagggcggacgggggccgaggcctcggggctgggggcaggcgtctccactcaggccgcggccgtacgcgggcagcgcggacagcatcccgcccggtgctgctgcggccgcgaccccaaagtgggaacctccacgtgtggccgctccgcgggagcctgggcgcggagacccctgccgcgtcgccccccgccgccccgcctgggcctccaaggggccaggaagggtcggcccggagccggggttgttttacgccgcacccggttcccgggggcggggcagtcctcctcggggtcccgggacagcctttcccttctccctcgctggctgccgccgcctccagagtgcagttggccaacttagtgcgggtcggaggtggtctcgtgtgtggagcagagcgagtgtgctgggcattggttagatgggctccgtttctggagagccctggcaccggtgatcgccgctagcttttttttcagccgagcaccctgtccttgaggccgagcccatccgcttacacaggccagttacttctgctgtattttgtggccgcagagaacctccgcccacattcctaagctaatattttcggcgcagcatcattcctgggtaaagaaatatttgtcgtgcaaaggagaggattggctttattaccatttagggagtcgtttgcaaaagacaacttgtttattaagaggccgaagtcaaaatctttagatgaaaaaaattatatataagaaatatacgttgagtttaacttaagcccaccacaaagtattttgcactgaataacacgaatttgcttgtgtttcatctgagaatatgtttggaaaaatatttttaaactacagtcgaagccaataatcttacttaattttaatgtgttaaatgtatatctagcctatagataaatgtgaagggaaaaagatgagatgctagagaaatggtgaaatcaatcaaaataactttttgattgcccctacttaagaaaccaagaaattggcagtttgggaccagattttgtttggagacaaagagtaatgttttgagcattcaatgactggttgttccttgaaagtacaggcgtaacccttgacgaaagaatggtttcctccatgtgcatttttatagtgtattgaagttaatcgcttgtcagtctgtaaagtgtgggcagttataatttgtagtgcctctgttaaattgttgctcaagaaaatatgcaagccattttaagtatagaactaatcagagaataagtaggtagctttggtaccaaaaatgtattctaaagcaaattttaattacttttggattacgcatgccacaaacactctgctactatgattattaatgttatttgggatgcagtgttttgcaactgctaagggataatttacagataacctagaaagattgtataagttttaggtgaggcttttgtattcgtgttgaactgaaaaaaaagttattattattttttaatctatgaccaggagagctaagacaccccggaaacctaccgtgaaaaaagggtcccaaacgaaccttaaagacccagttggggtaaggtatccctgtaaatttatgtgtggtgtttaagaaacttatctcttcagtcctttctgtcttatgtgtatgcttggaagggaaagaagaagacatgtggaagtataatcaaagaacatttagttaaatggatgtactacattgtgtaaaactagtgctagctgtgaaattttctctataagattaattaaattagtccagtaaaatgaagtctttggttgtcaactgcataccttctgtaattataatttggagagttagataattaaaaatctccaactgggttcatattcatcccagagaatatgaactgagttcatgccatacagtaactgatggcatgaggagagttccaaacttcttgggaccaagtttaattcagttaaattatgaagaaaaaatgaagcaggcaaaaagaataagaattttaaaacaaaacaacaaatggcaaacaaaaagggttctttgctctgaggtattttaaatctatccctcgttgccactggagtgggtccctggctctgagttaagggaaccgggtgctttgcacacagctgaatgagttttcctcaagccccctcccctgctttcaaaaatgtctctgtaggctgggtgcggtggctcacatctgtaatcccagcactttgggaggctgaggcgggtggatcacctgaggtcaggagttcgagaccagcctggccaacatggcgaaaccctgtctctactaaaattacaaaaattagctgggtgtggtggtgggtgcctgtaatcccagctactcgggaggctgaggcaggagaattgcttgaacccaggaggttgcagtgagctgagatcatgccattgcactccagcctgggtgacaagagagaaactctgtctctaaataaataaataaataaaaatgtctttgtatattaaatgttgggttaagctgacaagtttttaaattgacatccatttccaagaaattctaacagttttaaaaatctcgtgtgacatgttgttgacttttagagatattagtagtagtataactattatttgtgtacaatataatagtgaatacactgcaatttgatttttattaaaatttattttaattttgtgtgtatttaaagtattctcatatctaatacatacttgtatttgtcaatctcaagtagcagattttaattttcttagcccttggagatacagagctcttaaattgagagactgaatgtttgttgaatgaatgaatgaatgagaagcttaagtgaaaaatcaggcaaaaggtcgaactttcttcttaaagcaccttcctatttcttcaggtatactgtagggtgcgcccactgggctttcctgatcaagagtgttgcatagaagtgatcaataatacaactgttcagcttcatactcctgagggctacagactcaaccgaaatggagactataaggaggtaattctgatttggaccaagttgtttttactcaatatgttgtttcctgaatgacttctagatttttagatgtaacaaagttcatttgtgagcccacattttcaaaagacttatttacttcattataaccactgtatctaaagtgtttttgacttctgggatgcacagacatacctttggtatgctggggttagaggattgcttttagcagataatttcttacactgagtattattgtttcttagagcatgtgttagggatgatttaatgtggaatgatacatgattgtgctaggcagttttatatatacaacttgatgtgtggaaatgaaaataacatttaataatagacattgtttacttgcatcaacctcctatgcagtgtttttatttttagtaaagttttgagtcagctcaaaaatattgtttagcaaatgtgctaagctaatagttggagggtggaaggagattaaaaaaaagagcatgacatactccttgcctttagaaagtttataacttaagatatatggtaaacaaataattctcatataaataagacagaaagttagatgtgctaaagatgaggggaccgtgggaatgcagtaggattaattcaggctaccatttctacttctagctgtcactcactcttttgtgcctactattcctgtgaaattgctcttcagaagactaccagtggcctctttgctgctaaatttgatgtatacctcttcatcctcattttaacctgtttgtcagcagcactctcctgtctccccctccagctctccttgtatctccagctgaaaccttttctctggctctcaacattcaaccacttacttgatatctctgcttggatgtcacatgtgcatctcaaattttacatgcccaaaaaggagttcttgatttttcttattccctctctaaatacttcctcccttgttttcttctcaaggaatggcactatcgtgtgtccagttgctcaagccagaaacctggtacctaccttttacttgcctctccttataactagttcattagtagctcctatcagttatattccaacatgtgtcttgaaactgtcctttcatttccatctccactgccaccaccctagtctgagccccattattaatcactgagaccagagctactgtaatgaaggagtagcttttttatttttaatgcgtcacagctgagacttttgtacaacttgtgctagatggaactgcccgtgtgagttagacaatagggaactagttcataatctcttcatagagatgagcctattgaatacatgctgaaatactgataattgagcagtgccagatggaggctcatgcctgcagtctcagcactttgggaggccaaggtgggtggatcacctgaggtcaggagttcaagaccagcctgaccaatatgatgaaaccctgtctctactaaaaatacaaaaattagccgggcatgatgacgtgtgcctgtaatcccagctactcagtagcctgagacaggagaatcacttgaacccaggaggcggaggttgcagtgagccgagatcgcgccattgcactccagcttgggcaacaagagtgaaactccatctcaaaaaacaaacaaacaaagaaacaaacaaacaaaaaacaactttctaaacatttaagtagtctggtaaccaatctcagactggcattggtttgctgagtgtgctttgggtatcattgacaagacttccaaagcccaactgcctccacttggaatcttctctaatccatttctacagagcagacagtgatcttttaaaacataaaatctcattttcctgttcaaaacctttcaaagaataaaatctttgaacagacaaaatcctgcttcatccgtctcccatctgtctctccaccttcattcatcttttagtattcatccaatcctttgagtttcttggataaggcagaatcctggctgttagctgttgccttaacctggacttctctttttctgggtcttagcatgggtcatcgttgggtttcagcttaaatatcacctcctcgggttgtatagactacccaatcagaaacagcaccccacaacccctctcccctggtctgtactctgtatgcctcctttacattacttaaccacaatctatttgtttacttgtttattgtctttcctctaccataatgtaaacttccagggaatatgtaccttatatgttctgttcatcaaatagtaaatatggcttcagcaagaatgaatggtctgggagggttttttggaggagcaggtctttaaggatataatatagttaaacactgatttactgagttttacttctttaagtaaatttcaagtatgtataaatataggtatcgagtaggtatcgagtaggtataaaaaggtttgatggggattaaaaatagtcactgctttctgacagaaggcaacattgtataatgaaaagagcattgctgccgggcatgatggtttacatgtgtaatcccagcactttgggaggccgaggcagagggattacttgagatcaggagttcgagactagcttggccaacatggcgaaaccccatcactactaaaaatacaaaaattacccagcgtggaggcatgcgcctgtaatcacagctactcgggaggctgaggcaggagtattgcttgaacccaggaggcagaggttgcagtgagccgagatcctaccactgcactccagcctgggtgacagagtgagactctgtttcaaaaaaaaaaagaagaaaacaaaaacattgcactgatgatggctttgatactaattaactccatgggctcagagaagtttcaccttcgggcctcagttttctttaccttgaaaggagggagtcattcatgaggactgtgaggtcatctatcttctcagtattagcctatgtgtatcctttcagttccaagattctttgttctttttgaactctaaagctgatttttacaggatattttattaattgtatttagagagccttgataattgaagtattcttgctttcttaaaggtcacaatttatttaaaatgtatttcatgtaagaactcagagatgagataatatttacagtttacttctggttttaaactatagtacatcaaaacgtggtattatgctgctatgccattttattttatatgtcttttttctttttcttttttgagacagggtctcacttgttgcccaggctggtgtgcaatggtgtgaccacagctcactgttttttggtgaggtttttttgttgtttttacttttaaaattttttattagatgagcttgcccaggctggtctcttaactcatggcctcaagtgatcctcctgcctcagccttccaaagtgggattataagtgtgagccactatgcccatgctttgctattttaaatgacacctttataaagaaaaactaggaaacagtaaagttgtgtatgacataatgcttgtagatttccacaaatctgtgactatgaatcgttacaataccttttgatctctgtcacttaattaaaacaaaatcagccttagattagaagcattagtagacttaagacttttctacatttttggccaggtgtggtggctcacgcctgtaatcccagcactttggaaggctgaggtgggtggatcacctaagatcaggagtttgacaccagcctaacatggtgaaacccgtctctactaaaaatataaaaattagccaggtgtggtggcacgtgcctgtaattccagctacttgggaggctgaggcaggggaatcgcttgaacccaggaggcagaggttgcagtgagccgagattgtgtcattgcactccagcctgggcaacaagagcaaaactctgtctcaaaaaaaaagagttttctacattttctttagtagttgtgactgaaaacgtttaccagtttataattggtatgatataggtatgtcatgactttttagtaactaaataactaagggttccaactgtaaaaagaccatttatattttttctttgcatgcttagatcttaaatgtcataaacaccttaagtttaaggagatgtatttttagcctagataatagtggaattctatttagtgcatttttttctctctccacagactcagtattcatttaaacaagtatttggcactcacaccacccagaaggaactctttgatgttgtggctaatcccttggtcaatgacctcattcatggcaaaaatggtatgatatgactcttggagttttgttagattttcctttttctcctcttctgataaaacttttttgatatttatatatttgatttatgtttggtgttgaatccatatttaatttgttagggtggtgctaaacttgccttttttgagctggctaattgttagtgttttctaatgcagtgaagaaatactctaagtggagaacttctaagatataactcattgtgacttgctacactgtaggtcttctttttacatatggtgtgacgggaagtggaaaaactcacacaatgactggttctccaggggaaggagggctgcttcctcgttgtttggacatgatctttaacagtatagggtcatttcaagctaaacgatatgtaagtatgattcttttgtgttgtgactatcttactggactaagacacctatggatacagtagtagtaaagaagaaccaaagcactggattcattttgaaaccttaactgttccttagtttttaaacatatttcttactatttaagttaaattctaaaaaacgtggtgtgatttttttttttttgcccccacttcaggttttcaaatctaatgataggaatagtatggatatacagtgtgaggttgatgccttattagaacgtcagaaaagagaagctatgcccaatccaaagacttcttctagcaagtaagtaattatatttgtctgcagcactggcctaggggcacaggattctttcctgtggtttgcccagacatgaggaatggtgaacattaaatagagaagttgacttttgtgagattaaagttaaggaatgttcttaagttctttgctcagatgttttctctttggctttgagcacattttgtttcaatcactgttttaagagggtgccactctggatggggagagggtataaaagccattgttgtgtgttcgggaggacgtgggaatactgttggcaaaccatgagtatgaataaagctgctttgtgcatttctgcttgtaattgcagatatttattttatctgttagtttccccttgggatcagttacttttttttttttttgagacagagtctcactttgctgcccagggtggagtgcagtggcatgatctcggctcactgcaacctctgccttccaggttcaaacgatcctcctgcctcagcccccctagtagctgggattagaggcacacgccaccatgcccggctaatttgtatttttagtagagacggggtttcaccatgttggccaggctggtcttgagttcctgatctcaggtgatccgcctgcctcggcctcccaaagtgctgggattatagctgtgagccaccatgcccggctgggatcatttacttttaaaatggacttataacgtatacaattgaacttttctttttttagacgacaagtagatccagagtttgcagatatgataactgtacaagaattctgcaaagcagaagaggttgatgaagatagtgtctatggtgtatttgtctcttatattgaaatatataataattacatatatgatctattggaagaggtgccgtttgatcccataaaacccaagtaagtaataaagagagccccttcttagctgttaatgttggggaagttactttgcctcaaggagttttagtttcttcagttatgaaagagaataatgcttgcatttgttttcagaatgaaatgatataatttgtatatcacgtggttttgtgtttgagtatgtttattattaactagatatgtacctgtattagggaactagtgggttaaagcatctaaggagaagagggacccaaatattcatcttggagattacttttgaaaactctgggccctgggctatgttttgagaaggatcttaattatataattaagaacgtttcaagaacctgagacagtaaaaggagttttgtaggctctttaaccacccgtgtcttggtgatttctacagactggagcctaaagctgttatctatacaagtaatacttacatatcttctatcattcattaatatggtatgatatctgcactgtaattccatcagagttgaaatactacttcctagatttccttgggtcttgcctttctgagacgtaagactggttaccacttggcatcacaaatgataaatctgcatttgtgccagagttgaccctgggatcttatgtttaatattagtatcttgttcctgagttgatggttttgtttttcagctaaaggcttgtctttaatgctgtctttattagggcctctcaggacataaataatacgaagacctgtggcttatatttaactttgtatatctaagggaacattattggagaaacagctggatttagaaaatcattagactgagaatacataccagtatatccacttttaattacatgaagaatttatggactctggttgaggccatacttgatacaagcatttctgtggttcttagtgagtcacattttgatacagttatcttcaccagagtccttgaattttcatcacgtttattgggaaaacaattacaatatggctaagtaagctaaatgtaaaaatattaacactcttaatactaagagtttatgccaaggaagactctttggctctgtttaacatttcttcaagtgagaactttacaaagggacttatttctggagtgacctatctatatttacccttggaatgttggtaatagtaaaaatacttgggttaggttgtggagcaatacatggaagagttaaaaccttgtgagacagttactttttatttatttttgagacagggtcttgctctgccatgtcagctcactgcagccaacctcctgggttcaggtgatcctcccgccttagcctcctaagtagctggaactacaagcacaagccaccatgcctggctaattttctaatttcttgtagagataggagtgataggggtctcactaggttgcccaggttggtctcgaactcctggcctcaagcagtcctcccaccttggtctcccaaagtgctgggattacaagtgtgagccaccatgcctggcctgaccatcactttttatatcaaactaattactttcccatttgttttaaagtgtcaactgtcttgactctaatcttgagtatacccattttcatgtatgctcgtgtgccaactttttgtttggtttgttctaaatgagattattttcaaaggatcatatcttggctttatttagttatacaaaagaagattgacaaaagtaccttgtgtgctttgtaacctttctgggtaactccttaaatgaacatacaagggtgcttgtttggccctgaattcagatttaatttgttaggttggtgttagacctgcttttttaagctagttaacttttagtacttttaatacaatgaaaaactattacaagtggagggtttttaagatatgactcattgtgattgtcacatagtctggactgaacatgttggtgtgagatggctgctgtagaaacagtaacttctaccttattcctttggtaggtggaacagttgcagcacacccatgaggaacacagattttgtgtatgtgatggtgttggctcttttcttaaggagaagggtgcagttatactatggttggcattctgtggcatgtttgcatgtaggttattttccattgtcactgggctggctgctgtctctaagccctccttgcttcctgaaaaatctgctattgactatcagtgatggtggctggtaaatgtctctaccctcaccattcacaagacttaagaccaaacaggtagctctcatacccaaccttcatcttgtcatacagactaaaacttcataagccactttgaaaggattgccactcctggtatataccaaactctttctgaatttgttttctgctgttgctgaggaggtcagaactggttctatctgctagtcttttcaaattaggaaaatactagattttgatgcttaacctgtgcatgtgatgttgctgtaatactactttggtctctaaattgtttagtgtattgtttcatgtgctttcttagagcaaattagagcaaagcttttaaaacaaaattggtttctgttatcttgttacttaactaatcttgactatttagctttacaatcttatctaagtttaatatttctctggagtattatacgttatatatatattataaaatatatataattttcattagaagaataacatgtcatgtcacttggcgttttagtcctagtcttaaatgaagataccagcatctcataatttaggagactaatcttttttttctttcccatagacctccacaatctaaattgcttcgtgaagataagaaccataacatgtatgttgcaggatgtacagaagttgaagtgaaatctactgaggaggcttttgaagttttctggagaggttagaaacacctagaactagaaaaatacagaatgatgaatatcacctagagttgctactaagtttgatggcaattttttttgacttattagaaagcatgtataatgaaatgactgagttcaggtttgaccaatgatttctctgttgtcctaggccagaaaaagagacgtattgctaatacccatttgaatcgtgagtccagccgttcccatagcgtgttcaacattaaattagttcaggctcccttggatgcagatggagacaatgtcttacaggtaaagttgtagtatgtggagtttttctggttctaactctatccttaatttttggaattagagtaatccagccaacatggcaaaaacctgtctcgagtaaaattggaaaaatcagccaggcatggtgatgcaccactcctgtaatcccagctacttgtgtacctgaggcaggaggatcgcttgaacctgggaggcagaggtacagtgaactgagatcgcgccactgtagtccagcctgggtgacagagtgagaccctgtcttgaaaaaaaaagttaaattagagaggttttattgcaatgaagattgctctagaataaatatacagttggttctctgtatctgtgagttctacatctatagattcaaccaactgtggattgaaaatattcgaaaataaaatgctgcatttgtgctgaccatgtacagactttttttggtcattattccttaaacaatacagtataacaacttgttacatagtgtttacattgtattagatattataagtactctaaatatgatttaaaatatacaggagggctgggtgcgtgcgtggctcatgcctgtaatcccagtgctttgggaggccaaggcaggaggatcacttgaggccaggagtttgagaccagcctggacaacaaaacaagactcttgtctttgcaaaaaaataaaataaggctaaaaaataaaaaaataaaaaaatagaactttaaaaagtgtatgggaggatgtgcataggtcatatgaaaatactacaccattttatacacaagatttgagcatccatggaatttggtatctgtgaaatttagtatccataggagatcctacaactaatccctcgaggacaccaagggatgactctgtatgtaggcgatgacattaaaacttttttttccccattattatagttttgggaagctggatatcgaatcttagagcctgaattttgctgtgaaaaaagtttgcaaatctttaaaaatccctttggtagaagtgataaaataagactgtgattttttctctctggcgactccttctgtaagtggaaattcagttagtggttttaaaatgtcagtaattcatttttcagggtaggtatagtttaggaagtggctagtgttataagttgttcatctcttggtcgataggccagtagggtcccccatatgcagatcactatttactgcctggcctgccacagtacaaggcttgtgtcaattagtaacagcatttgagtctgagtatacataatctaataactgtaatccattaaagtgtaattttattcaaactgtatcatgaaattgtggcattatgaagatttataagtggcaggagtggtattgaagacctccaggatttgaatgctcatttctatttatttaccgactagctataataaaacctccttataaggttgtgagaattaaaggaggtaatgcgtgtaaagttcttagtccagtgcttagcttatagtcagccctcaataaccgttagctagaaaatagttataagggccaggcgcagtgactcacgcctgtaatcccagcactttgggaggccaagacgggtggatcatgaggtcgggagattgagaccatcctggccaacatggcgaaaccccgtctctactaaaaatacaaaaattagcagggcatagtggcgcatgcctgtagtcccagctactcgggactgaggcaggagaattgtttgaaccagggaggtggaggttgtagtgagccaagattgcgccactgcactccagcctggcgacagagtgagactctgtctaaaaaaaaaaaatggttataagtcagccttccatatgcacctgatttccattgaatcacatctaatattacagcattagttcggtaccacttgactttcacttctttttataagaattatttgctgggcgtggtggctcacccctgtaatcccaagcactttgggaggctgaggcgggcggatcaactgaggtcaggagttcgagaccagcctggtccacatggtgaaaccctgtctctaccaaaaatacaaaaaaaatgagctgggcatggtggcacacgcctgtaatcccagttactcggaaggctgaggcaagagaaccgcttgaacccaggagggggaggttgtagtgagcagagatggcgccactgcaatccagccgggaggtagagcgagactctgtctcccaaaaaaaaaaaaaaaaaaaaaaaaacaaaagaattatttatagcattatgaaattataagattattaaatatctgattatagaagaatttaggataatcctgttctagactcttattcagcaaatatctgctgagttcctactcagtggtaggcactgtgcagcatgctggtgataaggtagtaaaagacagagtccctgctctcagggggcttactgtctgatgcagaaggaagaccagccaattgacaagtaatcattaatgtcatgagtatatttatcatactcttctagcaaactctcccctaaaataggtatcctttgcctgtcctgtgcattttgtactgtgcaaatgttcattaagacttagcttgttgatatgaatctatttaaagaacattataaaccagttataacccattttaagttattggctttgtgatctttttaggaaaaagaacaaatcactataagtcagttgtccttggtagatcttgctggaagtgaaagaactaaccggaccagagcagaagggaacagattacgtgaagctggtgagtaaagcatggtatttatttattgctacaactttcagaaacttgcaatgccagtttattatctacttatcaatgggtggttctttgttttttaatttttattttattgagacggtcttactctgttacccaggatggaatgcagtggtgtgatcatggctcattgcagcctcaaactcctgggctcaattgattctcccattgtaaccttctgagtagatgggactacaggtatgcaccaccatgcctgtctaatttttaaaaattttttgtagaggtggggtctccttatgttgcccaggctggtctcaaattcctgggctctagtaatctctcaccttggccgccccaaagtcttgggattacaggaatgagccactgtaaccggcctcgatgggtggtttaagcacaattgtcctccattagataatttagaggctaagtttatagttaggctggtttggtattaatctattacaatacactgatttctttaagaatgaggaaagttgtattcaattagtctgggtgcggtggctcacacctgtaatcctggcaatttgggaggccaaggcatgtggatcacttgagcccaggagttcaagaccagccttggcaacatgatgaaaccccatctctacaaaaaatacaaaaaattagctgggcgtggtgcgtctatagttccaaggtacttggaggctgaggtgggagaattgcttgagccctggaggtcaagactgcagcaatccctgatctcaccactgtactccagcctgggcaacagagaacctgtctcaaaaacaacaacaacaacaaaaaaggactctatttttagtgttgtaggtcagaattgggtccttgaaatgttatttcaatacttattagtggtaaaaattggcttctagagatgggaaaattctgaacacaagccaattgaaggctttaaatatatatatagccaatctgtatatgtgttttttaaaattcatgcatgttatgtcctgttacctttttgtagttttttaaaaattaatatatcatagttgtacgtactttttgggtatatgttatattttgatagatgtatgcagtgtgatcaatcagtgtaattgggttttctgtcaccttgcatgttgtgttttatgttaataaacatgtattgagtacctactatgtgccaggaattaaacacaaattaattcccattaattctctctgctggagcgagcccatcctaatagaggagatcagtagataaactagattgtttgagtagagtatgatgggagtgcagggtagggctgcctaaaccaatctgggagtgggaaggtgaaaaattgagtaggagtgagctgtatgaagcaggataggattaaaggcaacgttcctgtcccaggaggcagttgcttggtcctgagatactatggcagagtcaaagtagctgaagtagaggatgtaagttggtgaactatgagaactgaggcaggagagcaaggcaaggtcatgaagacccctgtctgtcatatcaagaagtttgaattttatcttgaaggaataatgttagctgccaactattaagggtctagtgtgtatgatagtatccacacactagataggtaggattgtatcacacccatttttcagatgaggaaataggtttgggaaggttaattttctcaaggctggagccagattggttggactctcatagcttgtgtctttatactatgtcatacagcctccccttaaagaaggattagtcttttagaaagatcattttgccagtgtagagaaataatttaccaggagcgagcctaaatacatgaaagagcagttaggagccttttgccccaattcaggtaagcaattgtgtgacctggaggcaaaggtcagacaacactgagagctagttaggatgtggagaataaggaggtgtttgattgaggagaagcagttttaggagcaggtataggcaggtaatgagttgtatttgaaatgttcaatttatgcaagtgaaagtgccttgtaattggatgcagaggtacatggatttggaaggagagagattttgacttgaggtttataggtttaggctttgccaatagagaaatgattggctggatgcagtggctcacgcctgtaatcccagcactttgggaggccaaggcaggcggatcacgaggtcaggggatcgagaccatcctggctaacagggtgaaaccccatctctactaaaaatacaaaaaaattagctgggcgtggtggtgggcgcctgtagtcccagctactcgggagcctgaggcaggagaatggcgtgaacccgtgaagcagagcttgcagtgagccgagatcgcgccattgcactccagcctgggcgacagagcgagactccgtctcaaaaaaaaaaaaaagaaatgattgaagcaattgggtgagataagataattcatagcgaatggagaggaacaagctgagagcagaagcttgaggaacagcaagcccttgattattagcttgggatggacagagaagggtgatagctaaaagggatttgagggattatgaaatgatgaaaaaatacacacacacattatatatgtacattagaagatagtaaagacttgagtttattcatatgctgaagagatgatgtttaagtccagtggtgagaaatggggcctttagagctgcctctaccctggcccaaaggactcttgcaatttgtctgaatcatttgaatttcatgagagtggactgtgtgtgtgctgtctgtcaatgtctacccagtgcagcttacctactaggtgttcataataaagtggtgattattggcggagcaagatcctggaagaggcaggaaaatctgaatctagatccaagaggaaggattaactttgatgggacaagagctggtttgggaagaaagtaaaaacttgaagttttggatgctttggggaaaagctagaaaggactgttagtgttaatatagagttagggagtgagagagaaaaggagattgtagttggggcatatggcagaggctccaggtttttagaagtggtacacttctgagggatagggtttgggctgtcagctgtaatggaatagagataaagatttactggagctgggacattgggaccctgtgactacagcatatgagaatgattgttgttctcatggacaccgaaataaaccagggactggcatgtaggaggaatatttcaaggcaataaggaggaactaggaaaatgttgctagcctctccctctgtttaccatacttgtagaatgtcagcctttagaaaacaagtagcttttttttttttactccaaaaggctacagggctgcagcaagagataaatggttaggttgcagggctgtgtgccatggatgtagggtgaagcctatggacccttcctggtatagtatttctgaaggtataacacagagaggattacagaggaaaccaattgcattgaaatgtgttttaaaagtattcttaagtttgtcatacagtaattatgtgcttctttattaataccttaaagacacagcagcaggtctgattaaataaatgcagtgtaatgatgaacataaatatcttgatgagcaacaaactgtaacatgctataaaaatatctgtgatttgtattgataccaattacaggtactactaatgctgtggtttttggcctgcattcataattgaaggaactagtgaattccagttggtttggtaaaaagtaaataatgtaatttattttccatctaagtatgcagacaccccatcatgttcccccggacaatatagacctcaggttaagaacccctgaccactagggaaagctatcaatggattattttgtgagagatttgaagatgcagggaaatctgttaataacatgagttcctgagagcacagtggaagaagaaagaacattaggagtttgggtcaaggaacgtaaatcatgaatcatggaatattacagaggtacagatgagttctgtattttgggaggtgtatccaagatcctccaaggaggccaagggtgaaagcataatcgagttagctgacctcaatcaaggtttcaaaatgaactcattcttatggggtctaatcagatgagagctgcattcttgaaagcttgattagactgttagacttgccttggctcagaaatccaaataagagtggtcagaagtaacaagtatgccacctaagaaatccttgctgagatgtagaggggacagagttagctgattctgaagacacttgactgttagaaacaacaggagagcccctctagatgcagcaagagcttcagactcttgcatgcttcttatgagaatctaatgcctgattatctgagctggaatgatttcatcccaaaccacacccctcaagcctcaacccatctgtgtaaaaattgtcttccatgaaactggtccctgatgccagaaagtttggggatctgctgccttagagaatatattttatttatttattttttattttattttattatttttattttttagccacataaaaggtagcagcacacttatttggaaaacaataatttcaaaatcatctcctgaactcagaatcgatgggtcagggtagacaccctaagtaaacaggtgaaatcttcattaattgttcacttattaagtaaaaatttaaattaattgattatgtacagcagtgtttttccacatttccctgataagaatcatttggagtactctgtaaacacagcttcactggagattaatcccatcaaattgatttagtggctctgggatgggccacagtagtttggaaatttttatttttacaaatgcttcctgatgatgaccaaatccaaggaaatttgggaaacactgatctggaacataactttcagttttccctgcagtttttaagtcttgaacgactgatcatcctagagataacccactgaaaagtcttctccaatccagttttatgaaagaaaactctagaacatttggtttgataaaatttttccgaagcaccagaagtactttactttggctttttaaatttctggtccatcccttctagttcatgttttcttgaagaatccatcttctttgagttgagccacagcaatctaatcttttttttaaataattggtttcttattaaaggattgcgacatttaatagccgttgcttgcttttgtctttctcccttctccctgaaacttgttaagagatgcctcaatattctggcctttccaccttcaatctcatactgaccacgccgtgtatgccagcctggatctcatagttttctttaactggttcaactccctttgttgtcctggtcaagataacatctccttcttccaaggtcatgatcttagaaacatagttgatgatgtaggggatggaaaaagtcatggaggatgtctcaccctcctgtcttgagttcgccgttgaccttgagccagagcctcagattgggaggatcagggatcttctccttgggcacgaacgcgctgactgggcaggaggccataaagctcttggccagagtccaaggcagccccttcttcttgcactcatcctgcacgtccctggcagtaatgtccaggcacagggcatagctgctcacgtagtccatagctgcgcggccatgcttgcccatcaccatgcccagctccagctcgtggtgcaggttgcagctgtacgcgggcatgaggatgggcgagccctcaggtgtgtaggccgtggacagcttcagaaacagcacggactcgctcaacaccgcgttggcatctccctggtgtggtccccatagttcctccccacacagacgatattcttcccccacccccagaagcgggacggtggcctgggggtcgccatgattcctgtcaattgcctagagaatatattttaatatgaggatattaaacatctctatataagatattccttcagagaatttaggatttggaagaaaccttatagtcattaactgtaatgttgcattttgtggaaaatcctgttggtagaatccctgaaggatggctgtttaaccttcccagaaatactgctattgaaagagagcctggaccatgcatagacagctctttatattgagccacaaaaatttgttatttataatttctatctagtagttgtttgaagttgagattttataggcaaacagaacacactttagctactatactgttgttctgaaatggcgtctatgtatttttttctgtcaggtaatattaatcagtcactaatgacgctaagaacatgtatggatgtcctaagagagaaccaaatgtatggaactaacaaggtaagcagcagccttctctgttcttttgtatagtttcatttgtgtgcattttttttgcgtaacacatttggatatgaatgtctttgtagatggttccatatcgagattcaaagttaacccatctgttcaagaactactttgatggggaaggaaaagtgcggatgatcgtgtgtgtgaaccccaaggctgaagattatgaagaaaacttggtaattttaatgtatttgtcctataaagtcttgagtttttgtcgggaaaacagttacttggatgagcagaatgacattttgaatattttaaaaatggatagagaaccattgattgtagaagtaaactaggcttggtgtggtggcttatgcttataatcccaacatgttgggaagctgaggtgggacgatcaattgggcccacctgggaggtcgaagctgcagtgagtcgtgttcatgccactgcactccagcctggtgacagactgtctcaaataaataaaaataagcaatctttgcttcatttagtaatttctgggacttggatatccttatttttttttaaactccatttgttttgtgttttagcaagtcatgagatttgcggaagtgactcaagaagttgaagtagcaagacctgtagacaaggcaatatgtggtttaacgcctgggaggagatacagaaaccagcctcgaggtccagttggaaatggtatgatttggtgttgtatcatttgtccactcattggtctgtctgtttctctcttttttaaaaaaaattatttcatttaagagaaatgtttacataccttctgaagaaccaagcacataataatttgaacaaaatttaaatgagcttattttgcatactatgattcttaggtaagtaaacttatgtcagctcaagaaattgcaatggttagttgcactggggctgtatgcagtgttaaacttgtttaaataagctctttctctcctatgtaactttttgtaattttctataattcaatacagaaccattggttactgacgtggttttgcagagttttccacctttgccatcatgcgaaattttggatatcaacgatgagcagacacttccaaggctgattgaagccttagagaaacgacataacttacgacaaatgatgattgatgagtttaacaaacaatgtaagggcaaaactatttgaaataattttatttaattattttttttttttgagacatagtttcactctgtaccccagggtggagtgcagtggcacaatctcggttcactgcaacctccgcctcctgggttcaagcgattctcctgccttagtctcccgagtagctgggactacaggcacatgccaccacgcctggctaatttttgtactgttagtagagacggggtttcgccatgtaggccaggctggtctcaaactcctgacctcaagtgatccgcctgcctcggcctcctaaagtgctgggattacaggcatgagccaccactcccagccaatttgcaataattgtaacttctgaaattgaaagtattttcaatgaatctgagttatatggtagattgcatatttaaggaagttaaagaaaattgtgtctttagaactttgaagcactcaaggcattgtttgattagtatgacaaggcatttttccacagctcttttttgtattctaaggaagtcaaaaagaaaaaagtgagcgtgtgttctttcttttgttttttacagtgatggagacacaaagaaatattttttagtttcccctgtctacatagtggggattgtaattgtttctacctcaggatatgttgtgaagataaataagataaagtatgaaaatcctgtagaacagtaaattctggtacatagtgaatgtatctcagtgaatgaatgtatctacttttttttttttttttttttttgagactgagtctcgctctgttgcccaagttggagtgcaatggcgcaatctcggctcactgcaacctccgcctcctgggttcaagcgattttcctgcctcagcctcctgagtagctgggattataggtgcacaccaccacgccctgctaatttttgtatttttagtagagacggggtttcaccatgttggtcaggctggtctcaaactcctgacatcgtgatccacccaccttggcctcccaacatgctgggattacagacgtgagccaccatgcctggctctactatttttattatcattattcatttgaatctttaccaaaaagttgtgagataaagtggtatttaaatttccatactgaaatgaaatttgcccagaaatattaattaactcgcctaagtcataactagtaagtgatgttccaaggatttcagctcaggtttaattaatcccaaatagtagtgttgtttctatttttgcgtttgttgttgtgaagcaaagtacctgtaaggattgggaagagaatgctatagtgcacagtgaaagacttgagtattttttcagcatttaacagaaagcttctgtgaatatcttgtcaactggagaatgaagctcctgatttccctctaaacttgttttctcattatagactgattctcacagagatttgctgaataactacattttatctagtgtctgctagcaaaagttgatatcattgtttgttttagaactggtgtaaaacttgacctgtatgtttttgtttcagctaatgcttttaaagctttgttacaagaatttgacaatgctgttttaagtaaagaaaaccacatgcaagggaaactaaatgaaaaggagaagatgatctcaggacagaaattggaaatagaacgactggaaaagaaaaacaaaactttagaatataaggtttgttttgacattattatgatagatgtatgtgctggtgttttagcactgttctctgagggagatattgtgctccaacggcctgtaaatgctgcttattaagagttctcggttgagtgcggtggctcatgcaggtaattccaacactttgggaggctgaggtggccagatcatctgaggtcaggagttcaagaacgagcctggccaacatggcaaaagcccatctctactaaaaaagtacaaaagttagctgggcgtggtggcgagtgcctgtaatcccagctactcaggaggctgaggcaggagaatcgcttgaactggggaggtggaggttgcagtgagccgagattgagccactgcactccagcctgggcgacaagagcaagactctgtctcaaaaaaaaaaagagttctcaggctgagtgcgggggctcatgcctgtagtctcagcacattgggaggccaaggcagggagatcacttgagcccaggagttccagaccagaccgggcaacgtggcgaaaccccatatctacaaaaaaaattagccaggcatggtggtacatgtctgtagtcccagctactcggaaggctgagatgggagaacagcttgagcctgggaggttgaggctgcagtgagctgggattgcacgactgcactccagcctaggtgacagagcgagagcctgtctcaaaaaaaaaaaaaaagttctcaattggttgtttactaatcctcatcccatgctaaggaggaaatgtgagtgaaatgaagaatcatatgttctttaattttatgagagttttaacagttgaaaaggatgttctctgacccaaacaagggagctttctagagcttagctttggttgtagcttgcttttgaatttattagaaatatttccttagtatgctttttttttttaatgagataaatgattaaatgaaatggtataaaagtgccagcatcgggccttggacgtaacagatactcagtaaagcttaattggatctgtatttggtttacaaatcgattgtaaaagtataaactcaggattaatctcttacaatggggtagaaggaaataccgttttgttgggaagcattgcagcactgtgtaatgtatgtctgttctctcatttacagagggtcatttagaggtttggtgggggtacacattcataagagaagttagtctcaaccaatatagtttttttaaattctgaaaatagcctaaaaactaaattttagcccttaattttaggagaaagtaattttcacatgaagttagttgtaaatgtctttgggtgaggagcttgtttaacatgttttcatttctgagaatgggggtgggaattcagatgaaatgttagagaaaaaagtgctttctccatgatgtttctttccacaaatatgcttgcataagcaaattaaggaagactattttatagcgacatgaaatgtttatataccaaatattgaacatagtggtctaccttcctagattgagattttagagaaaacaactactatctatgaggaagataaacgcaatttgcaacaggaacttgaaactcagaaccagaaacttcagcgacagttttctgacaaacgcagattagaagccaggttgcaaggcatggtgacagaaacgacaatgaagtgggagaaagaatgtgtgagtatcgtttgggtagtgcttgtctcagagtcggatgatttattttacattgtagttaggttcgatattttgaattattgtatttgcggtagggttttggtggtggttgttaactctcaggaagaattggagaactgtcatttttaggaaataaagagattgggtaatctggtgtactcgtttgctgtgatggaatgataatatacattgccactgataatctgtaggagcgtagagtggcagccaaacagctggagatgcagaataaactctgggttaaagatgaaaagctgaaacaactgaaggctattgttaccgaacctaaaactgagaagccagagagaccctctcgggagcgagatcgagaaaaagttactcaaagatctgtttctccatcacctgtgcctgtaagttatttgtaattgtgtagtaactttgtactagagaaattttgttcagattagatgactatttctatgaggatttttacattttataatacttacatttctgaaatttctctaaaaatattttaaaatttagaataaacacaaatttagcacaaaaaaatagaacaaataattatttgtaatgttaagtcttcatgtgctaacattatagaaaagtaatgaattgtttctctcagtttttcagtcttgctcattaatttttctccaatttttctagctttctagtaactatattgctcagatttccaacggccagcaactcatgagccagccacagctacataggcgctctaactcttgcagcagcatttctgtagcttcctgtatttcggaatgggagcagaaaattcctacgtacaacacacctctcaaagtcacatctattgcaaggcgtaggcagcaggagccaggacaaagcaaaacttgtatcgtgtcagacagaaggcgagggatgtactggactgaaggcagggaggtggttcctacattcagaaatgagatagaaatagaagaggatcattgcggcagggttagtgccagtattattttaacgcattgtagcaatagattttatcttctttgttttttgtaacttgtgtctgaaagttcattggaaaaatggttgggctatagtataaagaaggtctaatttctcagttaatttgaaagattgacttacggaaattgaggcctggctcctcatctgaaaaagcctaaacacatctggcagcggaagtgtgttcagtgaacacaggtcagtttggtgcatcccagagtagtctgagcttttcagctgcatacgctaataagctttgcacagaattggtgaatgtgtcttaaagcatactttccatatttttcttttggttccccttccccaaattagattttttatacctcctttcatgccctagttttaaaaattgttttcccaaatttttattttgaaaaatttcagacccaaagcaaagtagaaagaatagtatggtaatgtctttccctccttgcctaagtttaccaattgttacttgatatagatatgtaaacctttttcccctaagccttgtgaaaggaaatcacagacttagagacacttaatctctaagaataaggacattgtactacctagccacaatctttatcacatccaagaaaatcaacattaattaattatcctctattgagacattgtgcagttgtcccaaaattggattggcttttctttttttttttttaaagacagagtctcactctgtcacccaggatggagtgcagtggcatgattatggctcactgcagcctcagtcttcctgagctgaagtgatcctctcacctcagcctcccaagtagctgagattacgggcaggccaccatgctaattttttattttcagtagagacaaggtctcaccatgttgcccaggctggtattgaactcttgaactccagcaatcctcctgccttggcctccaaaggtgctgagattacaggcaagccactgcaccagccagcttttttttcaatccatgatactatgaaagtgtatgcattgcatatcatgattatgtctttcatctcttttaatataaaatagtctcaccctgtccccctactttttttatttttatgacattgactattttcattgaagagtttaggccagttattttaaaattactgatttccatgcccaataaattgcttttaatcttgaggcatttatctcaatttacatttgcctcattcaagggtatttaaataaattcactttcatatttttcttcttaaagattaaggtaaagtttcttttgaatctgaataaatggaccaagttaatgtttgcgaattttatatttagtaaaatcttcacaaagctctcttagaatatttcttctaaatcttacagtaaacatttactttagattttcttatataagtcagggtatagatgaatgttcatttatgtggcctgaattcctgattattaagggatggtgatgaatcccaagttatttaccagggaaacagatgattctaaagtctcttaagttctttactttgcagatttttccttaaacatttttagacagcaaattaggtaaatggtcattctgaccaactctagtcagtcattttatgaaagtttataggctgaaaactattcaaggcttgcgtatgccttgcaaaccgtaatgagatatctaatttggctatgagatatttaagggaatttactagagattcttacgtgaaatcaaaatctctttagaagtgcagcagaaaagttactgtaaggttagtatctgtgcatctaagtttgttggtcaaaaattatgtcaggtggactgaatttatacttcagtgaggaaaaaatttaaatatttgtttcataaatgctagtagattgtatggattatcatctttctgaagtgtgtttcatcatatgcttattgttaaatgtttgaagaaaacctttgtttttgctaaatggtagatgataaggaccagactttctttcgtgttcaacattaaataaatcattgtaggaatggaaagttcctgtttgtcttgaggctcagcatctttagtggcaaactgtattgcccatgtcttagagctgtcactagtgctgcatttgtttcttgttaactatatagcgaaaatgattcagttcctcagatgtgcattttgaaattgaggtcttcatacttgactagctttgacagatttggcctgtgatagactttttccatttgctttcagttttgttttttgggttttttttttttttttttttttttttttttgagatgaggtcttgatctgttgcccaggctggagtgcagtggtgtcatctaggctcactgcagccttgaccttccaggctcaagtgatcgttctacctcagcctcctgagtagctgggaccacaggcatgtgctatcgcacctggctaatttttaaattttttgtaaagatggggtcttcttacattgcctaagctggtctcgggtgatccttctcccacctcagcctcacaaatgttgggataacaggtatgagccactgcacccagccctgctttcagttttacaaacaggagatgttcataaaattctaaagataattcattgcttcaaactataactatggcatatatgtgacatattattttcttaggctgaatgtgcttaatttagcattcccaggtttacatgacatttgactggaagcaacttgtttgtttttgaggcagggtctcattctattgcccaggctggagtgcagtggtgcgatcttggctcactgcaatttccacctcctgggctcaagcaatcctcccacctcaacctcctgagtagctgggactacaggcacgtgtcaccaagcccagctaatatatatatatatatttttgtttgttttgttttgttttgtttttgttgagtctgggtttcaccatgttgcctaggctgaacttgaacttctgagttcaagtgattcctccacctcggccttccaaagtgctgattacaggcatgtaccaccatgcctggcctagcaactagtcttttattgtgtgatagagactgatttgacactgtattatttatttgtttcttggaacctgtatgaaatgtttgggggaaaaattagttggtatattgtagccattactgtatttgaacttttcatgaagttctattatgagattttaaaatcttaactgaaagcactcagaagtatttcacatttctttaatcattttattcatatggttcttattatacctatgttcttaggattgttttctgttttgtttagaagcctagaaaatgtgtagggctttcattgatcttattgaagattttaacagagttgtggacataatagattacctctcaatagcagggataaatattggtttttgatcaagaatatgaaatgagttgtttgtcctgaaccacccccaagcaggaaagacttgcagcattaccagaattttttcttttatcctttattgaaagggaaactcccagatagaatgtgtaacatacaagttggtgttaaagatgtttgttggttttgtgtttaaatgcaaagatcatgtttaaattacttgaataaaatatttagctttggaaaggtttgctatgatactgtcatcaactaatgtagccaaacctgctgcacttctaataatacccttaaattaattctgggttatgcttgtttctcagttactctttcaacctgatcagaacgcaccaccaattcgtctccgacacagacgatcacgctctgcaggagacagatgggtagatcataagcccgcctctaacatgcaaactgaaacagtcatgcagccacatgtccctcatgccatcacagtatctgttgcaaatgaaaaggcactagctaagtgtgagaagtacatgctgacccaccaggaactagcctccgatggggagattgaaactaaactaattaaggtaaaaaactaattttcacaggagaaaaaaatatatttaaaaattcaacaaaagtccatttgtcctgctactcctttggtgacacacaggtagtgtcaactggaacatcagtaggtatttgatataacctttttgttagcagaaaattagtcactgcttaggttttaagtctgccaaactgggactaagtatgctttaaataggtatagattcttcggtttcttagaattctagatccatgatgtactttaattttttaatgactgtatatttagttttaaccactacttaaagtaatctaagcaaagaattcctattgctctccatcagttcaagataaaaaaacaaaaacaaaacaaaacgaaacctatgttaaaatttgacccgtcaaaattactcagtattgagctgcctaaagccgttttccagaaagagacttgcctgactatagaagaattcccctttgatcatagggtcagtgaataatcaggaaagtaaaagataagaccaaaaaaaaaaaaagctttttatttcaatttcaatttagagtttttgttcttattataattagctacaaataagactatactgtcatttgaatatgggcaacagggggcactcagagaagaaagtaccatgccttagagcgtgtagaaacttccagcaaatttcttgatccttagtgcagtttagtttttaaattacagatggagcaaaaggaatatttttttctgcaattatgaatgttactgattacattgaattggacttcttttatttgtgagagatatgtactcaaatttctaaattattttgatagtacgtactcagcaagtaccaagtaccatctgattttgtggatgggaatttctataaaatagaatcatgagaacagtttgaaatatatatgtgtgtttttcgtttgggtgtatcaatgtgtaacagtgaccttttcttttggctttagggtgatatttataaaacaaggggtggtggacaatctgttcagtttactgatattgagactttaaagcaagaatcaccaaatgggtaagtaaccatcaaaaatctctgtataaaagttggtcattttcttagctgctcattttggaggaacagaatagcctgtgaaatgtatcattaattctccaaagggatgtagatagtattcccctacttctaatatttttcctcttcttagatggaaaaataattgttgcatcatgtttcccctttttcagtagtcgaaaacgaagatcttccacagtagcacctgcccaaccagatggtgcagagtctgaatggaccgatgtagaaacaagggtaggggaaaaattaaatatttgtctgcctactaaaattaggtttgtcatgttttaaaccccacagctctagatttttatgctctttgaaaatgctgaggtataatctcacattgccagtgcaccatgtaggcctattcctagaataacaagaatccacttcatcaggaactcccttgcaagtgttattcctgaggagaatctcttggaaagaacatgggaaggtaggggtcaggaggctaagctatggccttagccaccaactctctttgcaaacttatctaaaatgagataagttacctggatgacctaaagacctttctggctcacaacatttgtggcctgtgccagaaataaattacgagtgactggtgttttaacgtaagagtctttgctgaactagaaagcaatattgcatttcacctaggtgtggagcctgctaaataactgtgttttatagactattgagaggagctgatctttttcctcttgtcattttcctctcagtgttctgtggctgtggagatgagagcaggatcccagctgggacctggatatcagcatcacgcacaacccaagtgagtactgactgtaattggggtcttgctgtgtgcttttttcctcctc

SEQ ID NO: 173 - DNA, 29978 bp, Homo sapiens
  source 1..29978: mol_type = other DNA
agcctgcagcaggaggaaggacgtgaacattttatcagcttctggtatggccttgagctggtagttataatcttggccctggtggcccagggctacagtcatcctagcagtccccgctgaagtggagcaggtacagtcacagctgtggggacagcatgctggccaagggtcttcccccacgctcagtcctggtcaaaggctgccagacctttctgagtgcccccagggaggggctggggcgtctcagggtgcccactggcgagggagctggcatctccacccgcagtcctcgccccttcaatgagatcccctctcctggtgacaatggctggctaaacctgtaccatttctggagggagacgggcacacacaaagtccaccttcaccatgtccagaatttccagaagtatggcccgatttacaggtaagcctggcagagggtgggagccgaagggacagggaggaggaggggcctgggtagccctgctgtagtccccactcccccaacaggctgttctctggttccaaactcctgtctaacttcttttttttttttttttttggtaatacaatacagaaatatatcagggatatttcaaaattcaacatttgaatctgtgaatgtcttaagtactctaaaccagacatctacttttgaaacaattggtggcaagaccgccagccatctgtaaggaagctctttaatgggtccaaaccccaggtctggccaggcatggtggctcacacccataatcccagcactttgggaggccgaggtgggcggatcacttgagatcaagagttcgagaccatcctggccaacatgatgaaaccccgtctctactaaaaatacaaaaattagctgggtgtggtggcaggcgcctgtaatcccagctactcgggaggctgaagcaggagaatggcttgaaccggagaggcagaggttgcagtgagccgagatcgcaccattgcaatccagcctgggcgacagagtgagattctgtctcaaacaaaacaaaacaacctcctcggtctgaggaggggagactggtgaggctaagttttgaattcctggccctgtagctgtcagcccagccagcgagttttaaaaattgggagaaggccgggtgcggtggctcacgcttgtaatcccagcactttgggaggctgaggcaggcggatcacttgaggacaggagttcgagatcaacccggccaacatggtgaaaccctgtctctactacaaaaataaataaataaataaataaataaataaataaaataaaaaaaattagccgggcatggtggcgggggtctataatcccagctactcgggaggctgaggcaggacactcgcccgaacccaggaggtggaggttgcagtgagccgagatcatgtcactgcactcccgccctgggcaacaaaagcgaaactctgtctcaaaaaaaaaaaaaaaaaaaaaatcgggggagggagatttgaaggtcagagcacagagtgaaaaggtcgcagcgtggtcaagtttggcgctagcgacagacccagcattcctcccagcgcacgccgccgcccgggccgcgctattccgaaattgggtccgccctagcgtggcccccggcctgctcctgcgctcttcgcgggtcgctcacctccgcctcccctcgacacagcccgagcccatccgccccccgggtcgacccgcgtttacctcagggcgaggtccaggcgctcggccccgcggaggcggcggcggccccaccgcaggtcctaggtcccagtcactctgccgccaagttccccaacacggactccgtgcgctttgaggtgttacgggggcgctggagcactggcttcgctggccctgccaggaggcggcggcgaagcagggagcgacccggtatgcgtttctctgcccggcctgcggccctgcagcatccactcctcgcctctgctggcctctgccctcgctcgctgcgttcacccgagctcacccgagcccaccggagccgacagtggcgcgctaaggtgacgtccgcgcggccggacctctcctgtccaacttctgatcttcttccaggcctgggatggtggtgggtaaaagggaaagtattcctagttcccaggcctgaggcctcaaccttccccagatcccactccctttgaaactctcggagagaggtggttagagaacaagccctactaaatgcctccctacatccgttaccctccgcacaccttgcaagcgaagtttgttgtccccatggtcagaggaggagactgaggctcagagaggtcacccagctagattcctgtcctgctggggtgctggatctcaccccttggccctgaggctctgagtctgtcccttccctttcccaagaatcgggcttgcttcctgctaggaggaaaggccttttttttttttttttgtctttgggcctctgtgcctccagggcttgtggctttttcctgggaaaactgctaaagctgttcccacggtgggcagcctttcagccacacctgggttctttgctaagagtccggttgagagggaacggaggtggcgcaggggtggttgggggctgggaggggagaccaggagggacagtacgttttcctttaagtgaaaggtctttacaactcagagcattccaatgggtcagtcacgaagagggaagggtaagatgtgttggccggcttgatgactgggctgggggtgggtgagaaggcaggctagtttgtgttggggcttcagctgctccctccctctctcacaactcctttaaagtccaaactgccccttttgatagctggttggtggcagggagctccccccaccccgcaccccaccctattcaaggttgagtgctgggcttgggaggttgcgccccgctgggtctctccttcctccccctctctcctaggcctattagtgcttctgtcccgtgctcacttcacatagatctctagttatccttgcttcctcctctcttcccttttcaccacttcctagaccctcagtagcaactccttattttattaagcccctttgttaccggtggagggtgtccaggttcttggcgtcttgaacaaagaattggacaaaatgcacagacaaagtaaggaaggaatgaagggatttattgaaaatgaacatacacaccacagtgtgggagcaggcggagcgtaggggctcaaaggtcccgttacagaattgtggggcatttacccccagaggattccattggttacttcagatacaccttatgtaaatggagaggatgaagtattcaagttacatagtcatacaccctatggagaggatatttcctgttatagctgaagtgtgaatcgatcttcacacttcagaccctattttcctgcctcatctgccccttcaagagatgtgatccccataaatctttatgggaggcagagggaccgatggtcttttttctgtaactgcttcatgctggcttggggcatagtccctacctattggggatcatggaactctcaccctgctctatctagtggaggaagggtagcttcttgatgtccaggggtggtgtcttcacttggaactggctggaacctttgttacatgatcatctgaagcttgatggtctctaggtgagaggaaatgaatttggttaaaagatttaatggaaactttagggggtggatacctatactgtcagaaatgtttgttgtagtgatttgcagaagaaaaaacaaaacctagtcttttctagaatctatgtgtttccttaaagtcttggcatgagtggccccattttggttttgtttggtttgttggggcctagtgcatgagatcagtccaaaacaacggcctcccagaattttgttgaaaaaaattccctttttgatcaggttttcacttaggtgagagtgtgaccaaaacctagggcctcagtgccactctcagttaccatcattttgggtttctggtctcagcatgtcatttataggttatggtgtcctcatggttgcatatttctttgagctcctgttattccagttgaagagagaccatatgacattctagagatggctcatgcaagcatttaaaacctttgagagcatacagctcgtcagggagaccattattatggctattaggaggataataccaagaatttgggagtatactccttacccaaggtccccataaaccaaacctcctaaaatcaaatggatctaagaatgagctagatacagtttactcacggctgggtgaggtggctcacttgaggtcaggagttcaagatgagcctggccaacgtggtgaaaccccatctctactaaaatacaaaaattggctgggtgtggtcacgtgcacctgtaatcccagctacttgggaggccaaggcaggaggattgcttgaacctgggagtcggaggttgcagtgagccaagatcacgccactgcacttcagcctgggcaacagagagagacttgactaatcaatttctttgtcagtctcctaccactgaatttctatagtcttcatttgatgtatttctgtataggccacaagtgccagcagctgcacagatacttcgctgtttagccaattctattataactttcacaagagaatttagagtctgtagcctttagagtagaatttgctatggaacctatcatgagggatacatttctaatcattgcttcttttactttaaaccatggaaaaaggacctaacaaatgatgccctttcagaagagtgaaggacttctggcaatgttctctttaacccacgatgtgggttatgtggagtgaatcaattttttgtttttgattgattatgagctaacacatctaccattaaagtttcttacatacattgggcctttatccatgtataaggctggctgcaaactccttcacaaataaaaatgttccccataagtgcacataacagaccccttttccacttctattgttcgtagaaggcataagcaagaaaaaatattcaaaaataagagtttcatgatagtagaagtcttaatctgtgaacttgggaaaagctgttcacatcaatgatgtcatcttcttcttgggagaaatttccctagttagttttaccttaagcattccagtgggtgcacagctccaagagcatggaggggcccttctcagttgtgagattatgaacccaaagttcaaggtcctgaagttttgttatagtgtagatggcaaggacagtctttctctgatgtttccagcagattcaaaccataaaaagcttttttttttaatctggtgaaaatacactgtagcataataatctactgttataacatcagccctcttgcatgggaaagcttttctacaaccagaaaacatgcatggaaaataacaatggaatgaaatccctttataaaatgtttaaatggctgaccagaagaccaaatatacctgaagctttaattgttttcctaggaatatgggatcaagcattggttataaacaattttttgttgttatttagtttttatttcataatcataaactttaactcaactctgcagtccagctaggcatggaagggaactgcagcgagagcacaaagattctaggatactgcgagcaaatggggtggagggtgctgtcctgagctacagaaggaatggtctggtggttaagataaaacacaagtcaaacttattagagttgtccacagtcagcaatggtgatcttcttcctggtcttgccattcctggacccaaagcgctccgtggcctccacaatattcatgccttctttcaccttgccaaagaccacatgcttgccatccaccactcagtcttgtcagtgcagatgaaaaactgggaaccgtttgtattggatccagcatttgccatggacaagatgccaggacgtgtatgccttaggatgaagttctcatcatcaaatttctccccatagatggacttgccaccagtgccattatggcatatgaagtcaccaccctgacacataaatcctggaataattatgtgaaagcaggaacccttataaccaaatccttcctctccagtgctcagagcatgaaagttttctgctgtttttggaatcttgtctgcaaacagctcaaaggagacgtgacccaagggctcgccgtgactgcgatgtcaaagaacacggtggggttgaccatggctgatagtacagggctcctggtggcagtgacggcatctgcaaagcgacaggttataaactattttaaacaatttcagtattagctggtttaacatgaaagtcttttcttgatatgtaattaattttttgttgttgttgttttacgtgggttagtagctttatacaagaaaatttggtcatttttgtggtttacaataacttaacataattataattgtgattggtaacatatacttagacattagaatttgagaaatcccatacaattttggaatatattattcacaaaaatataacctaaagaagatttaacatcattttgtcaatcccatgtacctaaacatgtcaaataatcctgtttacctcttttctggatgttttcaggggccctctgattcatctagaaagccaggcattaggaaagacaattttgaaactgaagtttgattttggaattccagattaccgtaaactatttattttgccaaaatgatgactcagaaattttaaagaagcaaaaaccttttgtaaccttccacacacacaaaaaaacccccaacactttctactgttcttatacaccttgcatgtaaaactgtttctagtagtcttaattgcatgttataatggcaaatttgttttttttgagacagagtttcactcttgttgcccaggctggagtgcaatggcatgatctcggctcacttcaacctctgcctcctgagttcaaatgattctcctgcctcagcctccccagtagctgggattacaggcaggcaccaccttgcccagctaattttgtatttttactagagatgggggtttcaccatgttggtcaggctggtcttgaactcctgaccttaggtgatccacctgcctcggcctccccaaatgctgggattacaggtgcgaggcactgtgactggcctataatggcgaattttaacataaaacctggtaagttaggccaggcgcggtggctcactcctgtaatcccagcactttgggaggccgaggcgggtggatcatgaggtcaggagttcaagaccagcctagccaagatggtaaaaccccatctctactaaaaataataataaaaaattagccaggtgtggtggcgggcgtctgtaattccagctactcaggaggctagggcagagaattgcttgaatctgggagatggagattgtgggtgagccgagattgcgccactgcactccagcctgggggacagagtgagactctgtcaaaacaaaaacaaaaacaaaaaaaactggtaagttctgataaagtttctgataaggtttgactacttccagcacagctaggggcatggctaactccacgtgtccccaggccttacctagctggaaagcaggcaagttaaacaattttcaaaagccaaaggagtagcttatgatgttaaaggatttagcaaacctagtatttgaacataatgtacaccacatgtttacattttgaagacaactgtatttttccaataatcttgaaaactgtctttatttcccaactattgctaaagtcacatgaactaaaaggcattacactttctacttttctgacaaaatatttgacttaagcttttattattattaaaccaattaatttaaaatcttacagaggagatatacgtgacttctactttatatttaaccagtttgcatagagggaaagagcccagagactgactcataagaaattcttatcctttcaccggcatgccagatttcagggttctctctttcacgcgtgtccctgtgaagagaccactgaacaggctttgtgtgagcaataaagctttttaatcacctgggtgcaggtgggctaagtccgtaaagagagtcagcgaagggagataggggtggggccgttttataggatttgggtaggtcatggaaaattacagtcaaaggggttgttctttggcaggcacgggcaggggacacaaggtgctcagtgggggagcttttgagccaggatgagccaggagaaggaatttcacaaggtaatgtcatcagttaaggcaggaacaggccgttttcacttcttttgtgatccttcagttacttcaggccatctgggtgcatacgtgcaggtcacaggggacatgatggcttagcttgggctcagaggcctgatattcctgtcttcttatattagtaagaaaaataacataaaatagtgttgaagtgttggggcagcaaaaattttgggggtggtatggagagataatgggcaatgtttctcagggctgcttcaagcaggattaagggcagtgtgggaacctagagtgggagagattaagccaaaggaagattttgtggtaaggggtgatattgtggggttgttaaaaggagcatttgtcatgtagaatgattggtgatggcctggatgcaattttgtatgaactgaaaaactaaatggaagacacaaggtctgaataagagaaggagaaaaacaggtattaaaggactaagaattgggaggacccaggacatccgattagagagtgcccaaggggattcagtgtaattacttgtttggttggtgagtttttgggctctattcttgacagagtcctttttttaagttggaggctgagtttggtgaggtgtgtttttaaaagaccattagtccgttttacctttcctgaagattgaagacggtaaggggtatgaaggtttcactgaataccaagagcctgagaaactgcttgagtgatttgactaataaaggctggtctgttatcagactgtatagaggtaggaaggccaaaccgaggaattatgtctgacagaagggaagaaatgatcgtggtggccttttcagaccctacgggaaaggtctctacccaaccggtgaacgtgtctacctagaccaagaggtattttagtttcctgacttggggcatgtgagtaaagtcaatttgccagtcctgggcagaggcaaatccctgagcttgatgtgtagggaagggagggtcctgaggagtagtagactagcagatggaaccctgagaagtgatttccttgtggatagatttccatgatggaaaggaaatgagaggttctaagaggtgggctagtggcttgtaacctacatggaagaggttatgaaatgacgacagaatagaatgggcctgtgaggctggaaggagatattttccttggtctaagaaccatttgccttgtgtgggaagagattgataggtggaagttttagtaggggagtaggtgggagtgaccgatgagaaggagaaaaactggctgtgagggatagaagttggaatgctagctgctttttagctaccttatcagcataagcattgcccagagcaatgggatctgatgccttttgatggcccttgcagtgaatgactccagcttcctttggaagtaaagcggccttgagaagagtttttattaaagaggcattaagatggaggacccttgtgtagtgaggagacctctttcagcccatacaacagcatggtggtgcaggatatggaaggcatctttagagtcagtataaatattgacgtgtaattcatttgcaagggttagggctccagttaaggcaatgagttcagcttgctgagaggtagtggagcggggcagaaagtatatgcatcaggtgtgaggaagaaaatagattttggaagttatgagaactggagagagtgagttgagcacagtttgtgattttgagggcctctaaaagtattaaagcagcgacagctgccgtacacagacatgagggctaggctaaaacagtaaggtcaagttgtttggatagaaaggctgccgggcgcggtcctggctcttgtgtaagaattctgaccgcacagccctgcacttcagctgtgtgtaatgaaaaagggttggatgagttagagagagctagtgtgggagcagcttctagggctgtttttaaggaacagaaagaggagtggcgaaagaatttaggatctatgggatcagctaagtttgcatttttaagtttatataatggtttagtcaggatggtaaaactaggtatccaaaggtggagtatctaaccatgcctaggaaggaaaggcattgttgctttgtagaaggggttagggtttgtgagattagctggacgtgatcagcagggagagcatgtgtgttttcatgaagaattatgttgagataggtaatggatgaggaagaaattggggttcactgaagtaatggggcctgtccgtgaagacttgcagcagtacagcccaggtaatttgctgagcctgatgggtgtcagggtcagtccaagtgaaagtgaagagaggctgggatgaagggtgcaaaggaatagtagagaaagcatgtttgagatccagaacagaataatgggttgtggagggaggtatggaggataggagcatatatgagtttggcaccatggggtggataggcaaaacaatttggttgataaggcacagatcctgcactaacctgtaagacctgtctggtttttgaacaggtaaaatgggggaattataaggagagattataggctttaaaaggccatgctgtaacaggcaagtgataacaggctttaatctttttaaagcatgctgtgggataggatattagcattgaacagggtaagggtgattaggttttaatgggatggtaaggggtgcatgatcagtcaccaaggagggagtagacatgtcccatatgtgtggattaaggtggggagatacaaggggaggatgtgaaggaggctttaaactggggaaaagggtggcaataaggtgtggctgtagcccaggaatagtcagggaagcagataatttagttaaaatgtcttgacctaataagggaactgggcaggtggggataactaaaaaggagtgcataaaagaatattgtccaagttggcaccagagttgggaagttttaagaggtttagaagcctggctgtcaatacccacaatagttgtggaggcaaaggaaataggcccttgaaaagaaggtaatgtggagttggtagcctccatattgattaagaaggggacggacttaccctccactgtaagagttacctaaagcatctgtgatgatccaggaagcttctgaggcgattgggcagcatcagtcttcagccgctaagcggagaagatctgggaaggagtcagtcagatagccttgggccagagttccaggggctctgggagtggctgctgggtgagttggacagtccagtttccagtggggtcctgcacagatgggacatggcttaggaggaatcccaggctgcaggcaatacttggcccagtggccagatttccagcacttgaagcaagatcctggggcaggtggtcctggaggaatgcctggccgctgcagttcaggcgttttgaagttcttgtatgctggagatgcggctgggttttgtctcacagcagaggcaagtaattgtaactcagaaatgtgttgctgtctggctgcctcctttctattattgtacaccttgaaggcaaggttgattaattcccattgcgaggtttgagggccggattctaatttttgaagcttttttctaatgtcaggggctgactgggtgataaaatgcatattgagaataagacagccttctgacccttcagggtctagggctgtaaagcgtctcagggttgctgccaaatgagccatgaactgggctgggtttttatatttgaggaaaaagagcctaaacactaactgatttgggagagttcggataaagaaaaaggagcattaaccttgactatgcctttagctccagccacctttttaagaggaaattactgggcagatgggggagggctagttgcagaacgaaactgtaagctggactgggtttggggagagggggtgatagaaggattatagggtggaggagcagaaactgaggaagaattggagcctgattcagcctggctggggagtgacctgaggagcagtctggggatgaggggagaggtcagatgggtcggtagaaaaggaagattggaaagactcaacaacacttggggttgggactgaagggacaggtgggagggaaaagaagatttgggaccaattgcattggaaatagactagggagggaacaaagaatgcctgggtgtcaggtacctcagaccatttgcccattttatgacaagaattatctagatcttgtaggatggagaaatcgaaagtgccgttttctggctatttggaaccattgttgagtttgtattggggttaagtggcattgcagaagaaaataagatgtttaggttttaggtcacgtgtgagttgaagaggttttaaattcttgagaacacaggctaagggagaagagggaggaatggaggggtggaagtttgcccatagtgaaggaggtaagcccagagaaaagagaggatagagacatggagagaaggtgtgggggatgcctgccccccaggaaagtggagagaaaagggagggtagagacacggagagaagggaggtgcttgccccccaaattagtggtgcttgccactaagggtgaaggatcaaggcaggtgtccccgtggtgatcaaacacctctgaaatgtgggtgaataatcaagcaggcatccccgcagtgattaaacaccaagggaagactgtcttcccgagtctgtgaccagcgctggagttttgggttcacggataaaacacgtctcctctgtctctgccagaaaaggaaaggaactgaaattaagggaagggagagattgaaagatggcgccaagattgaaaggagaaagaggttgagagatagtgagagaggttggagaagagagtaaaaagaggctgcttaccgggtttaaaattggtgggatgttccttgggctggttggtctgaggacctgaggtcataggtggatctttctcactgagcaaagagcaggaggacaggggattgatctcccaagggaggtcccctgatccgagtcatggcaccaaatttcatgcgtgtccctgtgaagagaccaccaaacaggctttgtgtgagcaataaagctttttaatcacctgggtgcaggcaggctgaatccgaaaagagtcagcaaaaggagataggggtggggctgttttataggatttgggtaggtaatggaaaattacagtcaaagggggttgttttttggctggcaggggtgggggtcacaaggtgctcagtgggggagcttttgagccagaagagccaggagaaggaatttcacaaggtaatgttatcagttaaggcaggaacaggccattttcacttctttgtgattcttcagttatttcaggccatctggatgtatacgtgcaggtcacaggggatatgacggcttagcttgggctcagaggcctgacattctctccctgagtggccccagggaccctgcttgactgtatgcaaacaaacacattgcaatgaattaagaatattcataaatagtttacaaattttggagaaactaggcagagtgagagaaatatgactaaaattctatttgtgagagtatactcaacacacttaaagtatcaggaagcctaaaatccaaaaagttagtttaaggataaaaaagctagtatgctccattaattcctgcaggcccaacaaaggtagcttgggaattccagaaaaatggaatgaatgatgacttgctagaaatgcacaggaacacagaactaaatgaaaaccttccactaggaactaagaaaaatcatggtttttatatacatgcatacacaagcaaagtcagaggagaacaaatggcaaacaaatgaaaactagaagcaaaaacaaataagcaggaaaccaaccctaaattttcttattcaatttaccctggaggctacagtgttacatagggcccccaaaaacccacataatgaatattttattcctgatacacaattcagtatccttaagttcactaatattatcatacatcctgtgcaattaacaaattcactttaggcgtatgaccaataagtactccagcactatccatgcaaaacagtaaacatagtatgaagcaatgtaagcatgtatgtggaatttggttccacactaaatccagcttcatgcttaactatattaaaaaaaagagttgccaaactgccaatgcatttttacaatacttcttactttaatcaagactaagagctttaactataaaaatgttaattagccaaatgtttccaattctttatcaggttttaaagaatattttattatttaaactgtacctcatctttctcccctacttaatggttccttactacattgtttcataaataaccttttcaaaactgtaacttgaactaacttttagataacttctgaattagacaaaattattctttcctttttttagtaataaccctttcaggcactttttgtatacagaattacgtgttaactagaaaccttatcctttgtaatgtaaaattttagtgaaaccctaaaaagcaagaaatcctgaaatatcagatatgggcatttatagataagaacaattccacaattttagaaacatatttccccatatcacaaccctttcttacttggaaatgacccagatattaaatgagtgccaaaaataactttaaggttttaatttacacaaaaagtttacctaaagcatttatcccatttgctgtactcaatttttacttttaacaagggagacatgagacactaattaacatatgtaaaatgaacattggtttggtcctgaaaggtgggacaactcaaggcaaggagtgggcttggaggctttcagatcacaggtgggagacagatgtttacattcttttgagtttctgattagcctttccaaaggaaccaatcagatatgcatttatctcagtgagactttgaatagaaggggaggcaggctcgccccaagcagctcccaggttgaattcactgacatttaagaatatctagtggtggctcatgcctgtaatcccagtgctttgggaggctgaggcaggcagatcacaaggtcaagagttcaagaccagcctggccaatatggtgaaaccttgtctctattaaaaaatttaaaaattagctgggcgtggtggcgtgtgcctgtggtcccagcttcttaggaggctgaggcaggagaattgtttgaacccagaaggcggaggttgcagtgagccgagatcacaccactgcactctagcctgggtgacagagtgagactctgtctcaaaaaaaaaaaaaaaaaaaaaaagatagcaaagacaaacataaaattcaaacaaaatgtatactgataatactgaaggcatttctatttttattccaccaataattttaaagctagcttgtttagtaaagttatactttaagtcacgtgaacttgaaaattgcttagacttatttacttaatttatgagtgctcttttacttataaggcaatttggtagacacaacatataacaatgtgtacatacaaataaacacatctagacatgtatacacacacataaacgaagattcaatagcttggaaccttagccatgagatagcaatacaagcttgccagtttttgccccaacagataatccaatgaaggctgtgaaccaaaattttggctaaagcagtctccatggcagtttgatttttaaaggccaaacctcccacgacttcaaagcagggtgtcacatgttaaccaggccccctgcttagagctgcagcacaaaagcctggatacatgcaactctattccactttccaattcaacagtaaacttcagattccaaacaatgttggggccaaacagcattgcaactgcggagagaaaattctaaggagggctagacctcagaacctctgccaagagcatcctctttggagtggctggggtccgcaggacccacagagcatcctcctgtggggtccaatcttagggtcccagacgtctctggctttaggtgggcatcacatgcaggctttcccctctggagcatactatgaactttataagagtagccatgaactgtaatgtgaactggatgctgcgtgggctttttttgtccttagctagttgagcactataagggaagaatttagcataagaaagtaaggtttaagcccccagaaacatttatgagtttgctccgagcagcaccgcatgtagggatcaggaaccataggcaaaaaagatttttaaaaaaagtccctcccgctttggggcagcgcaattattccctttcattcgtagaccttcaggcagtactggtgaccccagcctcaatttccaaggagctactaggaaacagccgctgaaagactgaaatagaaagagacaaaaaaagagaaaaaaaacataaaaaagacccaggtcccttaagcgaaccgggcggtggcagtcaggctgcttctccacgtggaaaccccttagtttcactggccacggccagaaacctgcagttgtctccgtgtttaggtggggcccagcaagggtcccaagttggaacagaaaagagaaagagagagctcctgtatggagcagaaaggaaagggagaaaaacgaatcccaaactttgggcttacctcttcctcctggctggctggccaaaatacatgttaccggtggagggtgtccaggttcttggtgtcttgaacaaagaatttgacaaaacgcacaaacaaagcacggaagggatgaagggatgtattgaacatgaaaatgcacaccacggtgtgggaggggcctgagtgtaggagctcaggggccccgttaacagaatttttgggagtttaaataccccttagagcattccattggttaattccatatgccttatgtaaatggagaggatgaagtaaagttacaaagtcatttacagcatacgccctatggagaggatatttcctgtcacagctcaagtgtgaattggccttatgttccctgcctccagaccctaattatctttctgttttctgagtcacttccatctgaatcttgcaacatatccctgtagttggtgttattatttccccactttacagatggggaaactgaggcccagtgagaagaagggtcttgtcaatgtcacacaactcatgagagcaaagccagggcaggaactggaattgtctgacttccagctctgtgtgtcattatacttgaacttatagctaataaacaataaacttctgaataaatgtgaggaatttaaaatacaacttttgtgggtttttttcctaacacaaaggctgttcttgttttatacagagcaatttagaaaatacagagaaacacaaatgaaaaattgaagtcagatacaatcaattccaattgatttaacatttaagtatcatgaggtatgtgaatatactacatatgctgcttatgttgtctcacaacaatatatcaaggaattctttccttttttctctctctaatataaaattattttatattttaagagaaagtgatgttcagtggtcctcagacttttctggggaaagatctcgtttcgtttatttatatcttcttcctttttcttgatctatcttattaatatttactttttttgaaacagggtcttgctctgtctcccagggtggagtgcagtggtgccatcataggctcactgtagccttgaattcctgggcgcaagtgatcctccctctccctcctcagcctcccaaagtactgggattacaggtgtgagccactgtgcctggcctctaatataattttaaaaggcagcatagtagttcacagtatggattttttttttcgcgggttctttaaagtgaacatacaacctactcttgacttttttgctgttagacatgaggctgcaatggacatccttatccatcaagcattgttgctgatgtcagatcattgccttgggctagattcccagaagtggaattgatcatgataatagcagttcaagggcttggctgaacttggttaggggtatggagctagttagtgcaaagacacatggtagctggaaaaacactgaggggattttctgggaggccacagaacaagtgaaggcctgaaactcatcaaggtaggcccaggctttctggctcagtggttaaagcagcactatgagaggagagagagagagaacatgcacacacatgagcacacttggcttgtatctccatgtttttatgctattttgcctaaaagtgtatcttaattttcttcgataaaaggcagaggctagcaagaagtggaattttctgttgttttttagtagttgtatttttatttcttattttttgcttaaacaacagaattaattttctggcagttctggaaactagaagtcagagatcaaggttttggctgagttgcttgctttcttctgaggcctctctccttggagttagatgctatcttttccccgtgtgttgacatggtccttcctctttgtgtatccgtgtcctcatctcttcatgtaagaacaccagtcatatgtaacagttgtatgtgggtaggcacattggctcaaacctgccatcccagcactttgggaggctgaggtgggaggatctcttgagcccagaagtttgagaccagcctgggcaacatggcaaaacctcatctctacaaaaaacacaaaaattaagcatggtggtgcctgtagtcccaggtacttggccgggctgaggtgagagggtcgcttgagcctgggaggtcagggctgcagtgagccgtgatcacaccactgcactccagcctgggtaacagagaccctgtctcaaaacaacaataacaacaaaaacccagttgtatttaatacagattgtctgcaaagtgatttgcaagcctgtctcccctgcctgtatgttggggcttgatgttttactgaagttttattttaatagagacaaagcgtgttgttgggtggcctctgactcttagggtcagggtggccactctcagaatttcagttgtagagtctgacagggatttggcctggaatatggcctaccttgcaagctatagtgagtcactctagcagtgacatgaaagtgtgccatggttctgagctctgtggacaggtgagaagctggggctgctgtaggtgtggacacaggaagaatgcgcaaggagtggaggacttgctggtccatggaaggctcgggggtggctttgggctggccctggggatgtgctgtgggacagcagcaacagtgatcataaagctctcacttgtagaatgtttaacaaaggtcacatccatatacttcctattgtcttgtccttcagcagcgctgcgagacaggtactgtatttgtctccattttacagaagaggaaactgagactcagaggggttaagggcctcgactcaggtcccacagtcagcaagttgtggaactgtgaggcagctgtgctgagcctgtatccatagctctcctcggatccttccatcagcccctctcccccacccctccagggagaagctcggcaacgtggagtcggtttatgtcatcgaccctgaagatgtggcccttctctttaagtccgagggccccaacccagaacgattcctcatcccgccctgggtcgcctatcaccagtattaccagagacccataggagtcctgttgaagtgagtcctgggccatctcccagggactggagggaggtggtggggagctgtggagagggcagaggctgggggtgaggggctgaggccaggcttgccctgtgcctcctagcagggcctctaggtgaatccccgtcattttcctgcctccctaaaacaaatgatggtgatgatgatgatgatgatgatgaattgctctgccagccttcagggaaatggccatgctgaagatcctaatgaataattaaagatctggcaaagttctcactgactggtttgctcactgagtcccaccttactgagcatccttgatgaatcaggacttgtgccaggaactggagatacagtgacaaatagagcagggacctgccaccgtgagtcccatacaggctaaaggggcagtgagacatttgtcctacatggggacagatcagtgtatttaagtgtagtggatactgttttctacgaaattgttcataaatttttttttattttgagatgggatctcattgtgtcatccaggctggagtgcagtggtttgatcatggctcacagcagcctctgccccccggcacaggtgatcctcccacctcagcctcccaagtagctgggattacaggtgcgtgtcaccacacccagccaatttttacatttttagtatagatgagattttgccatgttgcccaggctggtctcaaacccctgggctcaagcaatcttcccgcttcagccttccaaagtgctaggattataggcatgagccaccatacccaccccatcaaaaatgtaaaatgagggtcagggcgcattggctcatgcctgtaatcccagcactttgggaggccaaggcggacagattgcttgagctcaggagttcaagaccaccctgggcaacacagtgagaccccatctctacaaaaaataaaaaataaaaaattagccgatgtggtggcacatgcctgtgttctcagctacttggcaggctgaggccagagaactacttgagcctaggaagcagaggttgctgtgacgagagatggcaccactgcactccaggctgggtgacagagctggatcctgtctcaaaaaaaaaaaaaaaaaagaaaagaaaaggtaaaacgtaaccatatcaagtgtgggtaaggctacagagcaactggggctctcatctgttactggtgggagtgtaaactggagccactactttggaaaatggttggacattttctcctaaaatggaatatttgcatacctgtgacatagcagtttgatttcaggtatatactccaaagagtatccctgctttgggggatgtgtagtagaaggtttgcagtggtaccgttcatgatattaaaaaccagaaagctactgaaatgcccaataggattataagtgagtgaattgtggtacacaccagtcaaaatgaagggactcagtctcccacagcaatacagatgatacttggaacggtgcaactaagtgaaaaaagcaagtctggcaaagcatgacagcttttctttctttctttctttttttttttttttttttttgaggcagagtcttgctctgtcacccaggctggagtgcaatggcacgatcttggctcactccaacctccgcctcccgggttcaagtgattctattgcctcaagctccggcgtagctgggattatagatgcccgccaccatgcccagctaatttttgtattttcagtagagacggggtttcaccatgttggccaggctggtctcgaactcctgacctcaggtgatccacctgcctcggtctcccaaaatgctgggattacaggcgtgagccactgtgtctgaccgacagctttttaaaagaagttaaacactagtatatattttgtaatagtaccttttgggaataaatggagatcagataaaattagacacaaatgagagcaagggattctagtgggtggtctccttagaagggaacaaaggatgtggaaggaccaggagggcaagtgtaagttactgtcaagttcctagtttctatggtgggtggtaagtttgtgataatattcttatcaacaaaaacacccccaagtcacgaagaggactttgcatggattgatgaatttcaagagtgtgcatgaattaaggtttattatgaccaacccagttcggggcacctgaggtcccccgacagaagtgagtaatgggacgtgttgggggtgcagaggaggagaggctggtcaattttgtttgtgcaagagtcagaaaatgttatatagaggggccctggagtgtcaaaggtgagcatcggccaggaggaagtgggagtggcatggaaggcatgcctgcagctgaggcaaagactggagagactgaaagttacacaaagggttctaagaatatcagttcctggccctcagcagagggagtggaggggagttggagttttgttccccttcactctcttttttcctttctcttctcccagccaggcagagcagggaggaggtgagaggcagagggtgctcggagaggtgagggcagaggccctggtgggagtgctggatgctgtgagctgtgactcagcttcctgggaaaactgagtcagccccctctgtgttcaccaggcctggggtctgtgaccatgagggcttgtgggcccatgttttctcaggaagtcggcagcctggaagaaagaccgggtggccctgaaccaggaggtgatggctccagaggccaccaagaactttttgcccctgttggatgcagtgtctcgggacttcgtcagtgtcctgcacaggcgcatcaagaaggcgggctccggaaattactcgggggacatcagtgatgacctgttccgctttgcctttgagtgtaagggggcttgcacctggctggcagtgggcatgggggtgggaggactcagtgttcactctcttaccttgaggttcagtacagaccctgcagaggcattgagactgacttctgggatgagccgctgatcatgtcctccactgcctgctactcagaggcaatttaagaccaccctgggcaacagagtgagaccccttgctctggggttctctcatctggcattctctctcatctggcatttgtgctgtaggagcaagggtccccaaagtacaggtccctattgccaccatccgccaaagccagagcttggcttggaccttcattctgcaagtctccacctcctgggccatagacctttggagtctggtagggtagaggagagttcagtggttaatctgaggtaggcattgaggaatctgtaggagttatctagatggggtaaggaagtcaggcagtataggtagagggaaccacacatacaaaggccctgtggcttgatgaagattgtgtggtcacagcaagagatttggggtgcccagagctttgtatgaaatcagtattcaaattactcacctggtaggtggggaaaacttgaggctgttgtaacttcttaggtccagcaagactaggtcctggatggttaattatccagggatttatgaccctcagtctcctttctgacctgtttcaggaagtatttagccaattcagccaattacagatgaggaatctctcttggtggaagcctgggcagagcagttgcatcctgggctaggccctctctcagctctgctggagaccctgcttcccacctttcaggtcctccacatgcccctctgcaggacctgtgtggttgccagaggtcagctttctcagccttgcatcttagccctttgggactcaggcctcaatttatttactgaaggaggctgagggtaggggcaagagatcctttgtgctgagggaggtgagggtggaggagtccctgggagttgtggctctcagatggccccgtcagaaatggctcctcagcctcttcctctccctgcagccatcactaacgtcatttttggggagcgccaggggatgctggaggaagtagtgaaccccgaggcccagcgattcattgatgccatctaccagatgttccacaccagcgtccccatgctcaaccttcccccagacctgttccgtctgttcaggaccaagacctggaaggaccatgtggctgcatgggacgtgattttcagtaaaggtgagggcttctctggctgtgctctcctcctcggagccccaggcctcagccggctcctttgtcccacgctatgtcaatgggcgctgacttgacctgtaggaaacccacactgtggcgggcaggcgtgggtgtcaggaaggccctgggacccctggaaatggcggatggaaggctggctgttggggattattagatttttctggaaaaagaggagcaaagacatctgtgatcttcttcaaaggagctcatgctccccagagggcaaaggaccagtgtctgagccacggctgtgctggatgacagggacttgggtgggagagatggggaaggttgggtggagaaggctcgtcagggtatggcagagtcaaatcccacctctgccccttacagccatgtgaccttgggcaagtgactatgtctctgcacctctgttatctgtaaaatggggatgatgtcacataccccaagaattcgatgaaaaaacagatatgaagggcttagtacagagtacgtgctcagtaaaacggcagcctaagaagcacagggctccggaatccccaggcccttggtgccacctttcaccacagactgccctccttcccacccgcctgcagggaacctcactcttttttctttcctccttccccacagctgacatatacacccagaacttctactgggaattgagacagaaaggaagtgttcaccacgattaccgtggcatcctctacagactcctgggagacagcaagatgtccttcgaggacatcaaggccaacgtcacagagatgctggcaggaggggtggacacggtgaggtggctgtaggggcggcaccttgttgccccctgtgcccacgtgccccttccccaccaggcccctcgttgtctgaaaccctgttgttcaaggcgttcctactcatgtaggatatgtcttcctccttgcctccatttccaaagcgctaatctcctaagatggtggggtcaaagtcaagtcacccagggcatgatttgaggatgatcagctatttttctttgcctgtgagagaggagtggccgggcatggtggtgaggtccaggttccacgtagagtctccacaggaggaggtcccctctggaggcttgctctatcagagccctgctgatggaggacaatgcccccagctcctggtggagaacacactcactcaaatccagggaagcaggcaggagcccggaaacattgggaggccgaggcatttgctgtgggctctgccgtccatggtctttttgttgtccttcctcctcccctttccagacctcagtaccctacggtgcccccaacgcccagaggcatccccagtgctctttccatagcagcatggcaccctagaaacttctttctttggatattaagaataatcagtcctggccgggcgcagtggctcatgcctgtaatcccagcactttgggaggcagaggtgggcggatcatgaggtcagaagttcgagaccagcctggccaacatagtgaaaccccatctctactaaaaatacaaaaaattagctgggcctggtggtgggcacctacaatcccagctactcaggaggctgaggcaggagaatcgcttgaacccgtgaggcagagattgtggtgagccgagatcgcaccactgcactccagctcaggtggtagtgtgagactccatctcaaaaggaatacagtagacctcaaatgtcctcacgtggctcagaggggaggggtgtactggtttgctagggccgctgtaacaaaatggcattgactgggcgatttaaacaacaaacattgattttctcacagttccggaggctggaagttcaaggtcaaggtgttggcagggttggtgcattctaaaggcctctttccttggcttgtagatggccgtcttctccctctgtctcacatgggcttccctctgtgtctgtgtcagaattgtctctcctcatgaggacactaatcagaactggattaggatcctcctcaaggacttcattttactttaaaatctttaaaggttctatctccaaatatagtcacatttgaggttctgagggttaggacttcagcagatgaattttgggagggggtatacagctcagcctataacagggaggcagcagtgtgaacggaggaatagcacactgcagtgacagaggcaagcacctgccactgacaaagctgagaggtggggagtggctaatgtggccatgaaggacacggagaaggctccacagaggagctaaaattcaacgtgcgtgtcttgcaggctgttgccaggaggagagagaaggaatagcatttcaggactagggagaagcacatgtcaagccccctgggtgaatcactttcattcccaggtattatatctgtgttacactctgatgaaggagtttccatccctgagacagactgcaaatggagcctttgagcataccttaaacatagttcattgtctattacgtagaagagatcttcaaaaatcactcaccggcaccaaagaaacgattactgtgaggtcacatttattaagcacatactatatggcaggcagggtcctaagctgtttacatatgttacctcatttaatactcacaaacaaccctctaaggtatgttaccatcatccccctttttcagatgaggaaagtagagcacagagaggttaaataacttggtcgaggtcacacagctagtaacatagttaaccaccttattaaatcccaagtacatctctatggcaggccttggcagtactgagatgaatacacacatttgattagagtcttgcagagggagcacatccttccttcttaggcggggaagggaattccaggaagaggacctagcgtggggaagacttctgggcttcaggggctgtgtgccactccatgtagctggaacattaggtgtgtgttggagagaggtggggagtggggtattggggagcagcaggcaggtgttgaggggccctgtggctcaggcctgagcctctgtatttcatctggaggctctggggagccaggcaaggattttaagctgagaaggagctgtgtgttgtttcagtttccgcatctgaaaaagggggatgatggtaacataccttagaggtttgtttgtgagtattaaacgaggtaacatatgtaaacagcttaggaccctgcctgccatataatatatgcttaataaatggtacctcacagcttgtcattgttgcccctgccaggaggagggaggtgggtgtctaagtctgttggacaaaaatatgatccttggtaagataatgtgtcaacaacccatgtcctagtccccaggagggagggctgctccaggctggagtcccaaacgggcctggtttgtcatcattgaggaatctgggactgtggggtttgatgagggtcactcagatctctggcgaagggctagtggtcacagcctctggcttacgttgagattagctgattaatttcaacacacaccacaccctaattgcaacactgataggaaacatccggctggtctggtttcagcttctttgagccttacttgaagccatgttgctataggtgaagcctaaggttttaggaagttctactggaaagaggggtggttgtttaacaaggcatttcaaaaggaatggcagtcattctggagtgcaatcattacagaaggatttggcctctaagggcctctggaattctttggaagaaggcattggctgtgtagctgacactctactcactgtggacatgggtgggtttttggtgacatgagggacgagggcagggacaagtgctgccctgaatgttcctgcctggccggcaagaaaggcttcttggacatttgccttttagacaatggaatgtgttttgctcttgcagaggatggtcttggagactgggatggggttcggggagaaagaggttcttggaaatgaaaatttaccatggggtcaaggacctcaaggggccccggagtgacaggccctcctggtcttctgtataccctactccccaccagacgtccatgaccctgcagtggcacttgtatgagatggcacgcaacctgaaggtgcaggatatgctgcgggcagaggtcttggctgcgcggcaccaggcccagggagacatggccacgatgctacagctggtccccctcctcaaagccagcatcaaggagacactaaggcaagcccacaaccacccatgccgcccccaactccaatccctgggcagggccagggaagtgcccggggaaagggttacgaggatgggctggtggaggaggttggaagcaggaagtgaaaagtctggaggagaaagaaatagagccagggccctacccccaggtccccccaggctgctgcagctagggctgagatgccacacagggtgtggggctccggcggctgtgtccagcctttggggccatcagcttctgagtgccctcctcccgcagacttcaccccatctccgtgaccctgcagagatatcttgtaaatgacttggttcttcgagattacatgattcctgccaaggtaggtgcagccagcaggctgcaggctctgccagtcagagagggctggggcaggctggaattgcagacagagggtggcactggggccctggtggggcccttgatggcagcagtctaagtctgaatgaagggcagaggtggtgggcatggtgggcggtgacctctaggatgttattggaacccagggttaggagggagacttcatgatttgcctgggtctgaggaaagggtgggacaatcatcctggccttgggtcttcagccatccccatttggtgggtaaggattacagaggggcggggccttgttcaaggctgcacagtgggcagaatgtcctgccctggagagctgggcagccatgctggggagtgggagtggtggtgagagggcaggggactagggaagggggttttgtgctcagggctgtggggaagtggggcttactcaggcctctgatcaccttgccccagacactggtgcaagtggccatctatgctctgggccgagagcccaccttcttcttcgacccggaaaattttgacccaacccgatggctgagcaaagacaagaacatcacctacttccggaacttgggctttggctggggtgtgcggcagtgtctgggacggcggatcgctgagctagagatgaccatcttcctcatcaatgtgagtcaagctggggacatctaggcaccctgggctggccctggccctaatgaaggcaccaatcttcctcctcctatctctgtccagagcccaaggatgtcagtgctggggcgcatctacctccagttacttgctctcgctctctcccacagttctctgctgccccctctttcgggctcaaccactcatcacccactgatgcccctggccatccattccccatggtggtgatgggatgggataggactgaggtttgtagacaagttaaggtctaggcctaaatcaaggaaatgcagcactaagggtgcattatcaggcactgtgcagggttacaccaggagctggtggtgaactccttggaactcctcaaatcacactccacaggcactgcctatgggtgaattggcctggctagggagacagatcctcccctgccctcccctaaacctaccatctgcctttctcagatgctggagaacttcagagttgaaatccaacacctcagcgatgtgggcaccacattcaacctcattctgatgcctgaaaagcccatctccttcaccttctggccctttaaccaggaagcaacccagcagtgatcagagaggatggcctgcagccacatgggaggaaggcccaggggtggggcccatggggtctctgcatcttcagtcgtctgtcccaagtcctgctcctttctgcccagcctgctcagcaggttgaatgggttctcagtggtcaccttcctcagctcagctgggccactcctcttcacccaccccatggagacaataaacagctgaaccat

SEQ ID NO: 174 - DNA, 17878 bp, Homo sapiens
  source 1..17878: mol_type = other DNA
gcccacgcgccagagtcgcagtgggcgggcctacgtgctccgcccgctgtgagcctgtccggcccccgcccgctccggagcaacccgcgagcttacaccggcttctctctgtcctcagcccgcgcgccgccatcgccgtcatgctgggcgccgctctccgccgctgcgctgtggccgcaaccacccgggccgaccctcgaggcctcctgcactccgcccggacccccggccccgccgtgggtaaggcccctgcttgccactgcccgcgccctcgtgtccttgcggtgacctgggtccccgctgccactccggggcgggctctccccggcctagcccttgccctaccctggttactgaacccggtgaccgcgggccgccctgcccgccgcctcgagtagtggaggacctgaaagcgcgcccccggggcctccccccgcgcaacttcctggctgtgccaccgcggacaggtcagatgtggacctgctgtgggcgccgaggaggggacgcagcgctccccttcggttcccgggccatgaccctgccccagcgccgaccctgcggccacctgaccgagagtggccgccgccggcctgcagcgcctcggcgaaggtgacattgagcctccgggcacgccgcttggggtccgaggacacaatatacttccgtatgggacacacgattatacttttcaatcaggcatttctcggttagcgattagtgtgtcaccttcacagccttttccatcatttttagggtctgctgtgccacgttctaattcttccacgtttaaaatagatggaagtgtgtggttgtttcctgatctccggaagatagccagagttttgatagggcttatgataaaaatatcactcttttgaaaactgaatgtcacagacacaggaatactgggttttacaagcataggaacgcttcgtgttttttcccctttgtaatagaagcctgattgctggagtatgagacgtgcttctgatttttgtctattttccttccctttatatgtgtgctgggaggttttgagtccaccaccatagaataattacagtaattgcacttcgatcttggtccgtgaaatttagcttctatgcatgcatattatattttatttttgaacctgcatcactggcaactatgcatgcgtatttaaacataagaactcagaaactcgtttcagggtatgctgaagttaaaaattaaaaaaagaactcagccgggcgcggtggctcatgcctgtaatcccagcactttggtaggccgaggcgggcggatcacctgaggtcaggagttcaagaccagcctggccaacatggtgaaaccctgtctgtactaaaaatacaaaaaatttagctgggtgtggtggtgggcgcctgtaatcccagctactcgggaggctgaagcacaagaatcgcttgaacctgagaggcggaggttgcagtgagccgaaatcgcgccattgcactccagcctggccgacagagcgagactccgtctcaaaaaaaaaaaaaaaaaaaaaagaatatgttttgcttcattcattttagacttttatcatttgtcgtagaaccataaggctggagggtactttatttttgtttatttatttatttttaaattagagacggagtgtccctatgttgcccaggctgggcttgaactcctgggctcaggtgatcctcccacctcagcctcccaaagtttgggattataggcatgagccactgcagccaacctagagtgtactttagagatcgtggaagccattttattttatagaaaaggaaaccaaagtccatcttgggaaactgactccttgtttttttttgtttgtttgtttgtttttgttttgttttgttttgttttgttttttcttgagacagagtttcgttcttgttgcccaggctggagtgcaatagcacggtcttggctcaagcgattctcctgcctcagcctccggagtagctggggttacaggcacctgccaccatgcccggctactttttgtgtttttagtagagatggggtttcaccatgttggccatgctggtttcgagctcgtgaggtcaggtgatccgtctgcctcagcctcccaaagtgctgggattacaggcgtgagacaccacacctggccgaaactgactcctttttaatggtggaaccatttttgtttcttatagttatgtttgggccatcctgatgtttgtttagattttgtgttttgctaaagtaacagtacaatttacatttttcagccggacacggtggctcacgcctgtaatcccagcactttgggaggttgtggcgggtagattacctgagatcagaagttccagaccagcctgaacatggcgaaacccagtatctactaaaaatacaaaaattagccgggtgtggtggcacgcacacgtggtcccagcttcttgggaggctgaggcattagaattgcttgaacccgggaggcagaggtttgcagtgagccgaaatcatgccatctcaaaaaaaaaattttttatttatttatttatttattttttttttttggtgatagtctcactgtgttgcctaggctggagtgcagtggcaccatcacagctcactgcagccttgacctcctgggactcaactgatcctcctgcctccaccttccaagtagctgggaccacaagggtgcgccaccagttttattttccgtagaaacaggctggtctggggactcctgggctcaggagtgcctccctcctcccaccttccaaagtgctgggattacaggtgtgagccaccatgcccagccaaatttttctttttcttcttctgttgttgtggttttgttttgtttttgtttttgtttttgagacagggtctcgctctgtcatgcaggctgcagtgcagttggcacagctcactgcagccttaacctcctgggctcaagccatccttccacctcagcctcccaaagtgctgggattacaagcgagagccactgcacccagcctcagtaactcgttaatgtgccctcattcctacagttaccaccaccaaagtgttcattctttgggcctgtcagggttgattatttattaaatggaaaactatccgatttaactaaatttaaacccaaaggatcaatgagcccttttatttttctatatatgttagccttttttgtttttaaatggagtgcttaactgaatgccaaaaagcagtgttagaaatagctttttaggatgaagccctaaaaatgtcctcatttttcacagctgcttcttttttcttactttgggactttcaggttacgtaaaagctctgagtaattgttttccaaaataatttgcctttcaagcttcaatactaggtggagatcctgttcttaagtggggtggggtgtgtggggcagagaatgctagtagagtttacctaaaaaaagttaagcatgtgggggatgtgtccatagctaatagaatagatcctgctttacccattattggatttaacaatataatttaaatcatggccgggcatggtggctcacgcctgtaatcccagcactttggtaggctgaggcgggcggatcacaatgtcaggagatcgagaccatcctggctaacgcggtgaaaccccgtctctactaaaaatacaaaaaaattagccgggcgtggtggcgagtgcctgtagtcccagctgctgggaaggctgagataggagaatggcgtgaacctgggaggcggagcttgcagtgagctgagattgcgccactgcactcccgcctgggcgacagagtgagactccatctcaaaaaaaaaaaaaaaatttaaatcacgtggggagagtctgttttagcccttcagaaagggatgtatgggtttttaaatttttatttattttaatttgtttgatatagagtgttgctctatcacctaggctagagtgcagtggcgcagtcatagctcactgcagccttgttgccctgggctcaagggatcctcccgcctcagcctcctgagtagctgggaccaccaaaccccgctaattttttaagttttttgtggagaatggaggtctgtctttgttgcccaagctggtctctcagtcctggcatcaagcgatcctgccttggcctctcaaagttctagttctgttttataaaagactttttggaatacaaccagtttgtaatttggcttccagaagacatatgatcaaatccttgaaggtggtgatctccttgacttggatttgctgttggtggtcatcttattcacagttaggaaacaaagcctagcactcatgtagtcaaatccatgcccagcagtgaacaaaacgaattgcttatcatgaagcactgttgtggatgggacaggtaattacctctggggaaggagtacatagacctttcattgggtaaatacttaggagtggaattactgtgttatatggtaggtttgtgtttaacttgataagaaactgcttaaaccgtcttccaaagtgattgtatcattttatacttgcactttcagtattcagttaaggctagctttagtttttgaagaggtggcttataattttttcttttttgagacagggtctcactctgtctccgaggctagtgccactgcatctggccctaagttcttgataatagtgcattagatggttgttctaatctatgtttttacatagatagatagatagatagatagatagatagatagatagatagatatttttttttttgagacggagtcttgctctgtcgcccaggctggaatgcagtggcacgatcttggctcactgcaacctccctgggttcaagctattctcctccttcagcattccaagtagctgggactacaggggtgtgccaccacgcctggctaattttttgtattttagtagagacagggtttcaccatgttggccaggctggtcttgaactcctggcctcaagtgatctgcctgcctcagcctcccaaagtgctgggattacaggtgtgagccaccgcacctggccttgttttctgatatattaaatttgaatattagtcttgtaagacttattaaatatccacgtagttttgattaaatgttcatacttaccagacatatttaggtgtagagatccatttttttcttgttgtagaaattaaggctgggcaccgtggctcatgcctgttatcccagcactttgggaggccgaggcaggcagatcatgaggtcaagagttcgagaccagcctgactaacatggtgaaactttgtgtctactaaagatacaaaaaattagcctgacatggtggcgcatgcctgtaatcccagctacttgggaggctaaggcaggagaatcacttgaacccgggaggtggaggttgcagtgagccgaaatcgtgccattgcactccagcctgggcgacagggtgagactctgtctcaaaaaaaaaaaaaaagaaattaaaacgtgttcacttctagtccatttatgtacatgttccacttcattctgggcttggattatgtaggtaatttaggtctctgggaagatcttttctgcttcgtttttttgctactcttcctcctgccagttactgcattaaagatatataggatattactaatgtttaaatttcagtgttcttagaacaacaatgttgagaggtttctgggtgaagtttttaaaaatatatatatatgtatgttaaggctgggcatggtggctcacacctgtaattctagtattttgggagtggtaggattgcttgaggctaggagtttaagaccaccctgggcaacatatcaagacccccatctctaaaagtaaataaataaaaatatgttaagccttaaacaactggaagttacaccacacttatctaatacaggtagtaggaaatgtgatttgagataggtttcatttctttaagttatgatttctataaatagacaactaagacgtttttagataagggttagtttatagctaccatttgtttaatacttaccagtgcatagtgttaacctacctgttttcacatttaatcttcataatctgctaaggggggtagcgtccccattttacagataaggaaaataaacttaagttaattttccagggtcaaacagagagagcgaagagcctagaggtatctgagtgctaggttgtgctgcattcaatacccaaagataaaattttctgcctccgcctatccccctacctgttccagaggctgttcagaaggaattcagatttccaaactcaattcagtgtccatttgacaagaagaaagaaaaaatggggctgggtgcagtggctcgcgtctgtaatcccagcactttgggaggctgaggtgggcagatcactggaggtcaggagttcgagaccagcctgggcaatgtggtgaaatcccgtctctactcaaaatacaaaacttagccaagcttagtggcgctcgcctgtagtctcagctactcagaaggctgaggcaggagaatcacttgaatccaggaggcagaggttgcagtgagctgagattgttccactgcatttcagcctgggtgacagagtgagactcgatctcaaaaaaaaaaaaaaaaaatggaaatgcttttcatacagtactctatgtaaacatcatttctttttttctttgagacagagtcttgctgtgtcgcccaggctggagtacaatggcatcatctcacctcacctcaacctccgcctcctgggttcgagtgattctcctgcctcagtctctcgcgtagctgagattacaggcgcccgtcatcacgcccagctaatttttgtatttttagtagagacggagtttcacaatgttgatcaggctggtcacaaactcctgaactcaggtgatccaccagtctcagcctcccaaagtgctggcattacaggtgtgagccactgcgcccagcccaaaatattcctagtaaaacagtattattttgcattaggtgtagattagagtgtacgttcccttaggggatttatcagaatattttgggaaggggctgtagtttgataaagcaatttgtatgtgtaatttgtcaggatgtgtaatttattttggaatataataacatgagaattttttttttttttttttttttttttttttgagacagagtctcgctctgttgcccaggctggagtgcagtggcgtgatctctgctcactgcaagctccgcctcctgggttcacgccattctcctgcctcagcctcccaactaggtgggaccacaggcgcccgccaccacacctggctaattttttgtatttttagtagagacggggtttcaccgtgttagccaggatggtttcgatatcctgacctggtgatctgcccatctcggcctcccaaagtgctgggattacaggcgtgagccaccaagcccggcccgagatttttttttttttaatgtgtgaatgaagtatataagtttatttaagaacttgaatggtgccagggctggtggctcacacctgtaatcccagcactttgggagccaagggaggaaggaatgcttgagcccaaagaatttgaggctgcagtgagctgtgattgcgccactacactccagcctaggcaacaacagagcgagagcctgtctcaaaaaaaagaacttgaatggacattagtattgctcttagttttttttttttgttgcttttttggttttttttgttgttgttgtttattgtctttttttttttttttgaggcggagtctcgctctgtcgccaggctggagtgcagtggcacaatcttggctcactgcaacctccgcctcctgggttcaagcaattcccctgcttcatcctcccgagttgctgggactacaggcacgcgccaccacacccagctaatttttatacttttagtagagatggggtttcaccatgttggccaggatggccttgatctcttgacctcttgatccacccgcctcagcctcccaaagtgctgggattacaggcgtgagccactgcgcccggcctagtcttagttttttagtttttgtttttgtttttgtttttgtttgtttgtttgttttttgagttggagtcttgctctgtcgcccaggctggagtgcagtggtgtgatctcagctcactgcaacctccgccgtccaggttcacgccattctcctgcctcagcctcccgagtagctgggactacagccgcccgccaccacacctggctaattttttgtatttttagtagagacggggtttcaccgtgttagccaggatggtcttgatctcctgacctcgtgatccgcctgcctcggcctcccaaagtgctgggattacaggcgtgagccactgcgcctggcctattcttagtttttagaagtggggtgtcgctgtgttgcccaggctggaatgcaatggctatcttatcaggttctgtcatattgttagcaccctacgaccttgaactcctgggctcgggtaatcttcctgcctcagcctctgagtagctggcactacaggtgtgtgccccactatgcccacctgggacatttttacttaggaattaatactctggttatgtgtaaaaattcaaacaatatggaagtatataaagtagtttttacgtcccatgataatcactgttaatttaaaatcagagggaaccactgttaataatttcaagcgagtattatacattagggagaaaagtataaacatgcctatgtaatactttttgttctacttgattttatttgcttaatttaaaatatatctttctgtatcaatgtatacgatgtatttcatttgacctgttcaatatttttgctgccacaacatatatagtcaactcaaaatttaatgcattgaacaaaatatatcaagtactatttgtgtacattgaagttatggttctttcacattatagctatccagtcagttcgctgctattcccatgggtcacaggagacagatgaggagtttgatgctcgctgggtaacatacttcaacaagccagatatagatgcctgggaattgcgtaaaggtaattggaacataaacatatttgtctattttggtgtgtaaatatgaactgcttctgctcctttattgagagcaactgtttcgaaaacatgcgttgtttaaactggttacttcatgcaacttgcagttaggaaagtttatggctacctataaagcaggattttaaggcaggcactattgacattttgggccagataattctttgttgtaggggactgtcctttacactgtagggtgtttagcatcacctttggcctctacctgctaggagccagtatgcacacattcgtatcatgacaaccaaaaatgtttctaggcattacccagtgtctcctgagggatgaagtcacccttaattgaaaaccactgctatagcaataaggctagatgagcaaaaggtaacagttttgtacatttcaaacaatttacatagcacgggcgcggtggctcacgcctgtaatcccagcactttaggaggccagggtgggcggatcacgaggtcaggagatcaagaccattctggctaacatggtgaaaccccgtctctactaaaaatacaaaaaaattagccggacgtggtggcgggcgcctgtagtcacagctactcgggaggctgaggcaggagaatggcgtgaacccgggaggcagagcttgcagtgagccgagatcgcgccactgcactccagcctgggcaacagagtgagactctgtctcagaaaaaaaaaaaagaatttacacaaagcagtcatttggttcccttcccctttgggtgatggtttgggttttttgttatttttgcattgttttgccatgaataagtatctaagtaagttagaacttgtctttcctaaatttgcagatgcacacttaacatgaaaaaatagaattaggtgtagggtaatttatctcataccaaaaattcaatctcaatgactatcgtattcactggtatcctttgtttaaatattttaaagtaataaaagcaagaaacctaagtgctttaaacttctctgcagaaatgtaatgattcccttttgctacaaccaatagaattcttactgaacaatctggagtagaagtaataaaaagaacaattatgtattcccattaagagaatcttaaattttattatgtgtcattttgtgcagatctgaaagtaatcatgcccaatcattttctggttgaatgtttatgagtctgtgtactaatgtttctctataatatctccttaatgtcctcatttaggcttcattaactctacgcatttctctggctgtttttaggctgttttccagttgaatctcttttattttggtttttttgtttgtttgttttgttttgtttgagatggagtttctctcttattgcccaggctagagtgcaatggcgcgatctcagctcactgcaacctccaccacctgggttcaagtgattctcctgcctcagcctcgagagtagctggaattacaggcatgtgccaccacgcccggccaattttgtatctttaatagagacagggtttctccatgttgaccaggctggtcttgaacccctgacctcaggtgatccacctgagcccagccttgaatctcttttaaagcatccaaaatgtgttcattgtactaagagttaaagataggagggccggatgtggtggctcatgcctgtaatcccagcactttgggaggccgaggcaggtggatcacgaggtcaggagttcaaggccagccaggccaagatgctgaaaccccgtctctactaaaaatactaaaattagctgggcttggtggcacccgcctgtaatcccagctacttggtaggctgaggcaggagaatcacttgaacccaggtggcagcggttgcagtaagctgaggtggcaccactgtactccagcctgggtgacagagcaagactccatctccaaaaaaaaagttaggagttgaaaatgaccctcttgttctcaaaggggaaaaaaaaaactcaggattttttccttcaatctgcgtgctgttgcatagttctttctttccactgattcactaagggagatccactgtgatcttattatctagaatttgttaaaggtaggtttctctcattttataggtaagagaatggagacccagacagataagatcatacatcagtgattcagtaaaaatataaataactcatagtttaagtgaggctcttcgaggttgacatggcccttctttttaattttgcagggataaacacacttgttacctatgatatggttccagagcccaaaatcattgatgctgctttgcgggcatgcagacggttaaatgattttgctagtacagttcgtatcctagaggttgttaaggtcagtgaaataataatgctaaaattgttctgtaaatgagtgggctattgctgaggtatcagaatattctgtatttttgaatttgttaaaatgcctaaaatgagtccttatataactagaaggaatgtacattgcagttaaaatctttctagaggctactttggcagcatttattcaaggccttacaaattgtacatgatacacttttgttcagcaattccatttaagaatttatcttttttcttttttctctcttttttttttttctttcttttttaagaatttatcttggccgtgtgtgatggctcatgcctgtaatcccagcactttaggaggctaaggcgggtggatcatgcaatgtcaggagtttgagaccagcctggccaacatggtgaaaccctgtctctactaaaaatataaaaattaggccaggcgcggtggctcacgcctgtaatcccagctctttgggaggccgaggcgggcggatcacgaggtcaggagatcgaaaccatcctggctaacacggtgaaaccctgtctctactaaaaatacaaaaaaattagccgggtgtggtggcaggcgcctgtagtcccagctactcaggaggctgaggcgggagaatggcgtgaacccgggaggcaaagcttgcagtgagccaagacagcgccactgcactccagcctgggtgacagagcaagactctgtctcaaaaaaaaaaaaaaaaaaaaaaaaattagctgggcatggtggcacatgcctgtaatcccagctacttgggaggcccaggcaggagaattgcttgaacccgggaggcggaggtagcagtgagctgagatcgcaccattgcactccagcctgggcaacaagagagaaactccgtctctaaaaaaaaaaagaaaggaatttatcaaggaaataataaaggatatataaagatttaactacaaagtgtattcatcttcttgctatttgtcatacgaaatgttaggaattcttaagagggagcttcccagaactggttatactacacaactgttgatactgtagaaatgtgtttgactttaaacatatttgtgtcggctgggcacggtggctcacgcctgtaatcccagcactttgggagactgaggcaggtggatcacctgaggtcaagagttcgagaccagcctgaccaagatggagaaaccccatctctactgaaaataaaaaattagccgggcgtgggggtgcatgcctgtaatcccagctagtcgggaggctgaggcaggggaattgcttgaacccgggaggcagaggttacagtgagccaagatggcaccattgcactccagcctgggcaacaagagagagaaactccatctcaaaaaatatatatatacattatatgaaaacataggaggatatatactaattttcctccttcttatttggtcataatttctgagtttatttattttttcgagacagagtctcactctgtcgcccaagctggagtgcaatcattgcgtgatctcagctcactgcaacctccgaggtctcctgggttcaagcaattcttctgcctcagcctcccgagtagctgggattacaggctaattttgtattttaagagacggggtttctccatgttggtcaggctgatctcaaactcctgacctcagttgatccgcccgcctcagcctcccaaagtgctgggattacaggcgtgagccaccacgcccggccggcactttcttagttcttttgacttcttattcgttcctaaggaaccttgtgacagcacaggtgtaactatatattacagtgaaaagtctccagccctggacatatgtattctcaaagtacagctctccatgaaaagatactgtggtctgtaagaaagaaacttaaggtccgttaacagcaaaagtgtgacattactttatctataatgggtaagataattaagggttctgtaggctatcaatccattcagcactggtagttaattcagttaaggtctcaaattggaggcaaatgaaaaaacttttcccgttaacttaattattcgtgttgcctgctgggcatgtctaattgccttcacaaaattctgtcatcactaccttcttttccagtaattctagactttaagatgttctggatttagtccaattgcagttattctcaaggtatttcaaaagcctaccttgaacagtacatatataagttgccctctttatttttatttaattattattatttttttgagacagagtctcgctctgtcccctaggctggagtgtagtgtcatgatctcagctcactgcaacctccgcctccctagttcaagcattcccgagtagctgggattacaggggcgtgccaccacacccagcaaatttttgtatttttagtagagacggggtttcaccatgttggtcaggatggtctcgaactcctgaccttgtgatccacccgccttggcctcccaaagtgctggaattacaggcatgagccacggcacccagcaagttgccctacttaccgaacaaatgtgttaacttaaaagtagatgacctgttttgttttgttttgtttcgttttttgagatagaatcttgttctgtcacccaggctggagtgcagtggcgtgatcttggctcactgcaacctccgcttcccgggttcaagccgattctcctgcctcagcctcccgagtagctgagattacaggcatgtgccactacacctggctgatttttgtatttttagtagagacgggatttcaccatgttgtccaggctggtctcgaactcctgacctcaagtgatccgcccgcctcagcctcccaaagtgctgggattacaggtgtgagccaccatgcccagctgatcacctgtattattctgtcctacctgcctctgcataagtaattaaaggcatttttaagttcatttcatgaattaatagacatggcttttgagagagttaaatgtgaatattctctttgccatcaggacaaagcaggacctcataaggaaatctacccctatgtcatccaggaacttagaccaactttaaatgaactgggaatctccactccggaggaactgggccttgacaaagtgtaaaccgcatgggtaagcgacaaaccactgaagaaggcaggaaaacaatccagagaggtgtgggtggatgacatttcagtgtgctatagtaagacctttcagtgttcttgttagaggtaatggccgtgagcatgaagagattttgagaataccagtaatggtaaatttaaagaactgaaatgatttctagttgttgtcattattttctttctttccttcttttctttctttcgtctttttttttttgagatggagtcttattctgttgcccaggctggagtgcagtggtgcaatctaggctcgctgcagcctccgcatcctggattcaagcctcagcctcccaagtagctgggactacaggccacatgccaccacaactggctaatttttgtatttttagtaaagacgggatttcatcctgtcggccaggctggtctcaaacccctgacctcatgatccacctgccttggcctcccaaagtgctgggattacaggcttgagccaccgcgcccggcatcattattttcttactggtagaaagacaaataaaagccaccttaattaaagaaaaatcttcatacaatattctaggcataaacagtagcatagatgataatatagtgagtctgtgtacacatatccagattttcagatacttttattgttgccacatttgctttggtgtgtttaaagtatttctatttgggctgggcacagtggctcacgcctgtaatcccaggactttgggaggccgaggcgggtggatcacaaggtcaggagttcgagaccagcatggtgaaaccttgtctctactaaaaatacaaaaattagctgggtgtggtggcatgtgcctgtagtcccagctactcgggaggctgaggcgggagaatcacttgaacccaggaggcagaggttgcagtgagccgagactgtgtcactgtactccagcctgggtgacagagtgagactctgtctcaaaaaaaaaaaaaaaaaaagactcaacttggctggcagcaatggctcatgcctgtaagctcagcactttgggaggctaaggtggaaggattgcttgagttcaggagtatcaggagtttgagactggcttgagcaacatagtgagaccctgtctcctttagttaattaaatacatacatacatagaaagaaaaatattcagaattcaaggaatttttatattcagtcttcctgttgagaaactgaacagaaaatgctgaaaactttgtaatctacttttaagatttttttttttttttttgagacggagtctcactctgtcacctaggctggagtgcaatggcatgatctcggctcactgaacttccgcctcccgggttcaagccgattcttgtacctcagcctcctaagtagctgagattacaggcatgcaccaccatgcccggctaatttttgtatttttagtagagacggtttcaccatgttggccaggctggtcttgaactcctgatttcaggtgatccacccgcctcagcctcccaaagtgctgggattacaggcatgagccaccacgcccaggtgggatctcgttttaaagcttgctttaacggagtggtctttttgtttgtttttgtttaatttatttatttttaattttgttatagagacagagtctcactatgttgcccaggctgttcttgaactcctgggctcaagtgatccttccaccttggccttccaaattatttgggtttcaggtgtgagccaaaagcaatggtcttttcattttatctttgtccaccccctcaccagcacaacctccctgaagtagctcatctttataatatatgcaatggttttgacttctgtgagtacttaaagaaaactagttgttcagaatggaaattttcctagttatacttttgaagctcttgtttgttttttgttgttgttttgagacggagtctcactctgtcgcccaggctggagtacagtggcacgacctctgctcactgtaacctctgcctgttgggttcaaacaattctcatgcctcagcctccctagtagctgggattacaagtgcccaccaccatgcccggttcatttttgtatttttagtagagaccgggtttcgccatgttggccaggctggtcttgaactcctgacctcaggtgatccacccgcctcagcctcccaaagtgctgggcttacaggtgtgagccaccgcgtctggccctgtgattgatattctttttctttttttttttttttttttgagacggagtctggctctgtcacccaggctggagtgcagtggcatgatctcggctcactgcaagctccgttttccaggttcacgccattcttctgcctcagcctcccgagtagctgggactacaggcacccgccaccatgcccggctaattttttgtatttttagtagagacggggtttcaccgtgttagccaggatggtctcaaatctcctgacttcgcgatctgcctgcctcggcctcccaaagtgctgggattacaggcgtgagccaccgcgcccagccctgtggttcatattctataatgaactcctaaaagatggttttagttttcattttatcaagtattattccaaggggtccagaagatcttttttatgtaggatatattctagctatactaactttttttctttttttcttttttttgttgggagacagagtcttgctctgtcatccatgctgaagtgcaatgaagcgatctcggcccactccaacctccgcctcccggttgaagagattctcgtgccttagcctcccgagtagctgggactgcaggcatgggccaccacaccaggctaattttttgtattttagtggagacggggtttcaccgtgttgcccagggtggtcttgaacttctatgctcaggcaatccattcgcctcggctttccaaagggctagcgttacaggcatgagtcaccgtgtccggcccaaaaaaaatttcttttgttaaatggcagctactggacacttttctgattgggaaggaagtaccagtgtataaacaacaaaaaagccacaaagctagtcgcttgtgggttgacagtaggcaggattaagtaagagcagtaaagggtacagagagacagtgatttccctggttgtagcactaagggttatttttaaaagatttctactttttctttattctttcctggctaattctttgtgttttctcttacagatgggcttccccaaggatttattgacattgctacttgagtgtgaacagttacctggaaatactgatgataacatattaccttatttgaacaagttttcctttattgagtaccaagccatgtaatggtaacttggactttaataaaagggaaatgagtttgaactga

SEQ ID NO: 175 - DNA, 18639 bp, Homo sapiens
  source 1..18639: mol_type = other DNA
taggcctcctcctggcgcgcctccgcaccgcattggtggaccggcccccagcccgtccatgggcgttgtggccgccaccgcaggttccgcctcccgttccctccgccctcaacgtacgtcgcaccgcctctctgtagccgcccgcggagcatcgcagccggcccgggcccccgccagcctccctcctcgcgtccctcggtgtcctccgcgggccggcgcgatgcggctgggcccgaggaccgcggcgttggggctgctgctgctgtgcgccgccgcggccggcgccggcaaggccgaggagctgcactacccgctgggcgagcgccgcagcgactacgaccgcgaggcgctgctgggcgtccaggtgaggcggccaggccggtgctgggagggccgggcctcgcaccgcggctgccgcgggctttgtcccgggacaaaggggggcggccgggcgaggcctggcaggggcggcctgacaatgggggccgggcggcgcggcactcgctctctgggggtcctggggcctggaaagcctgaggagatagcacggcccaagagctggatcccttctacccctcagatcatggagggtgtgtagggggtaggggccttgaagtgcaggtgcgggtcaccccgaaaccctttggcaagggggtcttctagtagccctgtttttctccaccattttgccccactgatagtaatgcttggccctcctgtgtgtcgcttccccctaaaggaagatgtggatgaatatgttaaactcggccacgaagagcagcaaaaaagactgcaggcgatcataaagaaaatcgacttggactcagatggctttctcactgaaagtaaggactgccctacacgactaacaatggagacaaacacaaatatgttaagcagcggtgtctgctgaatgtatagattgctagtgtcccaagttggaagtcctgtgagaaggagaaaaggacatggagaataggctttatacttacaaatctttagacactgagaaccaagtaaaactcggtgctttctccagttatatataaacatcattgaccctgtactctatgtggaagtcacaccttgagacaccctctttctcacgtgacttttgttagtgtcaacaatatgatttattttagagaaatatgccccaaaactttaaggcagtaaatgatttatcgctcttttgatatatgcttcatttaaattttaggaatttgcttctttttttaagcaagtagaaaaagacctgttgcctgtgaattacgtttattataacattataccaaaatgttagagctggtaggggccttgggatcatcttgtccacatcactttgtagagatgaagaaatgaagcacagggataagtgccttctacaaataagtggcaaagctggactagaatccaggtatcctgctcttaattcaggttttaatatccttcagttaaaaaaaaaaatctgatgctctcaggtaaattctctagtcagaaatgaaatgcacagactattaaaagaatgttctaaataaattgctgtgcagttgtctctccccattgttcaattcaaatgatgttccctgtcagcgttccaagtgggtcctcagaaaaattcaggttgttattgtgactcttaagttagctgtttttctgtaactctcatttaaatgctgttcaccatcaaggaattaagttgctggagacaattaaaaactggtaaatttaagatgtgctgtcaatgacatattcacattggaaccctctggaagattaagggcttttttcttccacttagttagacaataataacaagacctttggtctctgattatccaatctaagaataagtcaatctttggttatactagagtaatcaaagaacacaacacgttgatttggaagactgcgtggtacctatctgtcaagacctagatatgttcaaatatttaatagtaaggttttaagaagtttaaacttagaaaagttttagtccaaatattcattatacagatgagaagaaaagcttgagatggtaaactaccccctgatggcaaagctgaagtgtgaacccacatttctgatccctgttccattctgttttcttctatgccatggtgatctctttaaataaactagaagaaagattcatggtgcttacgaaagccttcattctacttgaggacccttaagataattttggcaatttgctctttgagggccaggtctggaatcagatgttaagaggtagcaaaactcagtaggagttggctttgaagccagacaggtttgaatctggactctgctatttactagttgtgaaggcttggacttttctgaacctcagtttcctcacctgtataatagtgatgattataattgcattgttttgaagattagaggcaacatgtacagaggaacctgataaatggtatactcatgctgtcctcacaaatattcgtgttcgtccctccctttgtttcctttaacgtagtttagtaaatatttttatgaatagttttttgtttttttttttgaggcagagtctcgctcttgtcacccatgttggcgtgcagtagtgtgatcttggctcactacagcctctgccacccaggttcaagtgattcttctgtctcagcctcccaagtagctgggattacaggcactggccaccatgcccggctaatttttgtatttttagtagagacggggttttacccgagaccaggctggtctcgaaatcctgaccttaggtgatccgcctgcctcagcctcccaaagtgctgggattacaggcgtgagccactgagcccagccaaatagattttttaaaagttgattgaaaagtgaacatttgaattttagaaactttcccatgccttcaggtaccaagttaagacagatagctgttgcaggaagggcataaattgctacccataacttcgttaaaatttactccagatgttttaacaacatatttaaaggtaatatactgaagcagtattctcagtcacttgaataccttttcagaatttaggccatatctacttaaccatctattattttcttactatagttttaattcaactcacataaaatttattttaaaggaagactttatgtcaccttcataaataaaaaacactgttttttctcatacatactaaaataaatagctatcaaaatatttatgcttcctgagagatctgtggtagttagcaaaggttttctgcaagattttggataacattttttttaaaagtaaagtgctattttggccagttggtaattcattcaacaaatacttacagagccaggaactttccaggcatttgatgtacatcagtgaacagaacatacccaaacttttatggagcttacattatatttagatcatatgttatagtatggaagctccggccaggcatggtggctcacgcctgtaatcccagcagtttgggaggccgaggcaggtggatcacgaggtcaggagttagagaccagcctggccaacatggtgaaaccccgtctctactaaaaatacaaaaaattagccgggtgtggtggcacatgcctgtagttccaactactcaggaggctgaggcaggagaatcgtttgaaccgggaggcagaggttgcagtgagctgagatcgcaccactgcacactccagcatgggtgaaagagcgagactccatctcaaaaaaaaataattaaaagcttcatgagctcttctaaacagcctttcccacttcctaccccatttctattaatacaactaggccaattctcagtatttgcaaacatcaaagattttgccttttcagagaaggtttggaaatccttactcttaagtatcagaattaacgtcacatgcgttgtgttctgggaaattctcataggtgaactcagttcatggattcagatgtcttttaagcattatgctatgcaagaagcaaaacaacagtttgttgaatatgataaaaacagtgatgatactgtgacttgggatgaatataacattcagatgtatgatcgtgtgattgactttgatgagaacactgctctggatgatgcagaagaggagtcctttaggaaggtgagttcatgtgcacaagctgtttcttttgatcatgtcagttcactttaccttcctgcatgaatgagcacattgagggcctgaggtcataagctggattgtcttgttctctaggaaatcacctgttccacttcagcagtcattttgatggtttcctttctggccagatttaggactcttattctaaattacctacatgatccttctatctgtttttctcggctgcatcatttaattgtcctcatttccagagttgctttttaaatgtgttttgaatgagtatctcaatattttaatatcattgaataatcagttttatctttattaagaaggccattatggcccattcccatttttaaacacatagttttatatactcacttaaaaaaactgcggtttccacatctgtggattcaaacaactgagaatcgtaagtatccaaaaaagtaagtattaaaaaaaaaaaaactgtgtctctattcaacatatacagaacttttttctcttgattattccttaatatagtataacaatgatttatttctcatttaagttgtaatttatattataagtaatctagagatgatttaaagcagaggtccccaacctttttggcaccagggaccagtttcatggaagacaatttttccacgggacagtgtgtggcgggggggtggggaatggttttaggatgaaattgttccacctcagatcagcaggcattaggttctcctaaggagtgcgcaacgaagatccctcacatgtacagttcacagtagggtttgcactcctatgaaaatctaatgccacccctgatctgataggaggcagagcagagctcagacggtaatgcctgccactcacctcttgctatgtggcccagttcctaacaggccatgaaccaatacccgtccgcgacctagggattgagggtccgtgatttaaagtattcaggaagatgtgtgtaggctatgtgcaaatactgcaccattttatatcagggacttaagcattctcagattttgatagggaggtcttggaaccaatttcccaggaatgtgtgagggaggactgtgtaacaaattgaccattgtaaccattttaaagtgtacagttgagtaatattaagtacattcatggtgttgtgcaaccaatctccccgactcttttcatcttacagagtggagactctctacccattaaacaataactccccattccctcctcccactagctcctggcaaccactgttctactttctgtctctgaatttggctactctaggtacctcatctaagtagaatcatacgccgtatttgtctttgtaactggcttatttttacttagaatcctcaagattcttccattttgtagcatgcatcagaatttccttcctttttaaggcaaagtaatattctgttgtatgtacaggttgagtatccctaattccaaaatcaaaatgctcttaaatatgaaacttttggagcactgacacgacactcaaaagaaatgctcattgaagcatcttggatttgggatttgcaaatctctgtgggatcctgctttccattggtttgggtatatacctggaagtgatactgctagatcatacggtaattctatttttaattttttgagaaaccacagtaccatttttcatagtgagtacaccctttaaaattactccttttttttttttatttttattttttgagacagtatctcactctgttgcccaggctgaagtgcagtggtataatctcggctcactgcctcctgggctcaagcagtcctcccagcacagcccccgaagtagctgggatttcaggctcaagccaccacgcccatctaatttttgtattttttgtagagatggggttttaccatcttgcccaggctagtctcaaactcctgaggtcaagtgatctacccacctcagcctcccaaagtgctaggattacaggtgtaagccacgacacctggccccaaattactcattttttgaaaatttagtatctgtgtgagttctaatgtgtctcatggtttaatttgttgaaatatatgcttcttaagcagagctgagaaagactaattttatttaggaattaggaactttttaacacttctaggaagtctattaaactaaaagtatatcaacagaaatgactgtgagcttgagaaattgatatatcaaatacttttgtatttcaaagctaattttaaagaattaaaatcttttttataggtacatgatagttgtattatacatacttacagagtacatgtgatattttgatatcacacaaacgtatattataatgatcaaatcagggtaattagaggatcaccaagaatttttttaagatagtttttatgtgtagaaaaacataaaaataaaatcaaacatgctgttgcaaactgtcccaaaatattagtcaagggtgcttggaaaatattcaaggctcttctgtttcttaacttatcctgttttggtatataccttttaatttttgttgtggccataatttattgtattaaacaatatagtgtaacaatgatttactcctcatttaaattgtaatttgtcttataagtaatctagaaatgatttaaaatatttgggaagatatgtgtaggttatatgcaaatgctatgccactttatatcagggaattgagtatccttgggttttggtatctgtgggaggttctggaaccaatttctcacaaatatggagggaggagtgcataacaaatttactattgtaaccattttaaagtgtaccattcagtagtgttaagtacattcacagtgttgtgcagctaatccccagaactcttttcatcttggaaagctgaaactctgtacctgttaaacaacaccccattccctccttggtaaatgctttctaagtgtgctatttatttagaatcatattggccgcttgaactctgtaagccaccactaactctaagttggttaattctctgctaataactacagcatcaatgtggaggtttggggctccatcctcagagccagtctgcttagcttcacatttagctccagcacttcacggttgtgtaactttgggcaagttattaaactttcatgtgcctcagtttcctcatctccaaaaatgaggataataattcccattcaggccaggtgtggtggctcacacctgtaatctcagcactttgggaagccaaggtgggagaatcacttgagcccagagttcgagaacaactgggcaatgtggcaagaccccgtccctatggatacattttcctcttaaaaattaaatcctaactaatctaaagctgtctagttaacaaatgcccaaacaaaatttaaaaattagatgggcatgatggtccgtcctgtgatcccagctatttgggaggctgaggcaggaagattgctcgagcccaggcagtcaaggctgcggtgagccatatttatgccactacactgcagcctgggcaacagagagacctcatttctaaaaataaataaataaataaataaataaataaataaataaataaataaaaatttcctctttaggattataatagtgtggataaatattaataaatggtagcagttggaggggcaagcagttctgttttgatttaaaagaatattgaagaaagcatttacagttcacataaatttatatttaatcaactttttaaaactttatgcatttgttaactatcagctttagattagttaggattttattttttaaggggaaaatgtatcttttgttttctttttatttgggtcttcattctacagtggactaaagtgagtaaaaatcagtctttttactgcttgtaaatactaaaggaaaaacaagtagtgataatgagatttgggatcatctgtctattaagtatccccatttactataggaattaacttatcttaaaccaatgtaacttatctaaaaccaaagcatggtgtggtgtggtttcccttcctaggaacaacagagaagttaaatacagtattttaaaatcttgctggaattagattctaattatgttttctatttttattttttgttactcaaaagacttaattactatcccattaaaaaataagaagtgcatgttcctgtattcttagaagggggtgatgtaatagatggtgctgagaagaaaatcttcactttgaagagatacatgactcataaattgtttatgaacagttcttttaaaaggtgtctggttctaattctgtgttctccaccagctacttagaatgtgttgattataacactctgcttttaaaggatgaattagatgaatcttaacagcctaaaggaatagattgatcccgaaaatgaacacttcaatgggagtccttttggttatttttttttttgacagcctaggaatatgtctctatcttcatgaagttctaatcatatgtttttagaatttgctataagtaacttcctgtgtgtatgtgtagtcccagctgctcaggaggctgaagtaggaggattgcttgagcccaggaatttgaggccagtctggacaacatagtgaaaccttgtccctttaaaaaaaaaaaataacgtcctaaaaattgatgtggagtgtaaagatgaacccagaaaccatatgcattatttttctaaataaaaaataacggatgaggaatgaatcaatctcaaagttatagactaaacactataccataaataaaataatcataaaaagtaattggatatgtgaataaaataaagttttctataagaaagtctgttataactgacgaaagtcagcttaatatctgaacttcaccttttttttttttttttttttgagagggagtgtcgctctgtcacccaggctggagtgcagtggtgcaatctcggctcactgcagtcttagcctcccagattcaagcaattctcctgcctcagcctcctgagtagctgggactataggcacgtgccaccatacctggctgatttttgtttttgtttttgttttttttagtagagactgagtttcaccacgttggtcaggctggtctcaaactcctgacctcaagtgatccacctgccttggcctcccaaagtgctgagattacatgcgtgaaccaccatgcccagtctgaattttatcttatatttaataagttttcatatagggaataaagataaccctttcaggctgtgaaatgcctgaagaagcatttctttataatataaagaacagttatggtcaacacaggataattaaagtttggggatctatctggcaaaagttcaagtgttctttgtttttgtttttgtttttgttttgagacggagtcttgctctgtcacccacgctggagtgcagtggggcaatcttggctcactgcaacctcttcctcccaggttcaagcaatcgtcctgcctcagcctcccaagtagctgggactacaggcgtgtgccactatgcccagctaattttttagtagagatggggtttcaccatgttggccaggctggtcacgaactcctgacctcaggtgatctgcccacctcggcctcccaaagtgctgggattacaggcgtgactgctgaatgtgcatgtataagcagtatttatttatgtaagatataaccttgcatgtggctaatcagaatttttaatgcctagtcatttgttctagtatcacacattatatatttcctcatgtagaatcattagtctaccaaaagatggcagttttgttcctcacaagtttctgttgtaatctaaaaataaatgattatggtagcttttttattactgtacctaacactttttaccctctactagaatacaaagtttttatatacaagaaaaaaaaagagtgttgaagttttatgaaactgaccatcttttttgttatttttttaggaatttgccatttgtaaaaaacagtctttctgtttttggcttcttcgatttaatgtgagctattcttattttgtgttcttcaaatggccgtgaaatgtgaaccagaaaaagctacccccttcactttttttttttttaaagaaatctcagcttgttgaaagagatcctttctttccataggcaaatttggccaaatttagctcttctcctgaaacatggacctttttgctccaaagtgaagggttctttcataaggaaatcaaagcacttggtattttgaataatggtttattcaaaaagaacttgattgactcagcaaagtacctcaaattcttgtttgtctgcttttaccatgttaaacctgaacataaaatgcaaattatttggtctagttatttaaaattttgaaacattaagttaaaagctatttggaaacaagttattattttttcttttctgtcatgattgggtgaatataactggcttgtagagtctgatgttaataaaacaaattctttggggaaagaggtgagcctctccgctgtaaatcagtaattgtaaaagaactagtgtttaggtaaatgactgctacctgacctctattattctagaagactgaagagggtatttttattcagtagtgaaacacttaaaagcttctaaaatatttgaaattgtgctttaaaaaaatgcacagtttaatacatatcagtttataggaaggaaagctattcccagaaattctcaaaacagaaattatgcaggattagcagtatagcattattggctcccaaggctcttggttacagaattaccattgaaaattttatcaaaagcagccttgtccctgatagctgccgaatcatttttaaaaaggggggtggatgggaagatgggagagaaagtagaaaaggatatgtgtttattaaaccttaacatgggatccatttaaacttttgatgttatttatatctgaatatacagaattaacactataaagagcctgctaagactagacttccaggctgagcacggtgactcatgcctgtagtcccagcattttgggaggctgaggcaggtggatagcctgagctcaggagtttgagaccagcctgggcaacatagtgaaaccccatctctatcaaaaatacaaaaaattagctgggtgtggtggcacatgcctgtggtccccactacttgggaggctggggtgggaggatcacttgaacctgggcggtggaggtttcagtaagccgagattgcaccactgtactccaacctggatgacggagtgagacctcatctccccaccccccaaaaaagaaaagatttccaaatattaggtacatatactaatattatgagattctcaacataagaagactgtttttctgaaacaataatgtatttttgaaaagtcacttagaggaccagaaacattttttaaaagccctaccaagatttaatacatggtataaagttattgatttttgggcattcaaaaaagtattgagattaattattaaagtagacagtatagtactgtagaaagaatagggaggatccaagttcagtagttttgtttgttttttgagtcagggtcttgctatggtgtgaaggctggccttgaacttctgggctcatgcagtcttcccaagttgctggaactacaggcgtgcgccactatgccatgctcagtattttttagctgtatttctgacttttatcaaatcattcaatctgcttttctatcaataatagtatataacactaaatacttaaggtttattaatggtgtggtagggattctcatcccaattgcttattagagatttttatcccagtttgatagatgaggaaaccagagaggttaagcagtttgcgctgacaccacagctagtaagtggcattgctggaattcaggtctgggtctatatgactctagagcttgtgagtctatcctgcccctaatacatgtatttgtgtagcttaccttcaaagggacgatgtgaagataaatgagataacggatgggaatgtactttaaatttcacatagtttgtatttttcaaagtatttaaaatgatgtggtatactaatgagaaattttaattttcaaagcttcacttaaaggacaagaagcgatttgaaaaagctaaccaggattcaggtcccggtttgagtcttgaagaatttattgcttttgagcatcctgaagaagttgattatatgacggtaagaaagaaacatttttaagagaattattgagtgaccaaaactttaaaaaaatatatttaaaatttttgtgggtacatagtaggtatatatgtttatgggatacatgagacttttttttttttttttttttttttttgagacggagtatcgctctgtcgcccaggctggagtgcagtggggcgatctcggcttactgcaagctccgcctcccgtgttcacgccattctcctgcctcagcctctctgagtagctggaactacaggcgcccgccactacacctggctaattttttgtattttcagtagagacggggtttcaccgtggtctcaatctcctgacctcgtgatccgcccgcctcggcttgccaaagtgctgggattataagcgtgagccaccgcgcccggccgagatgttttgatacaggcatgcaatgtgaaataatcagatcatagacaatgaggtatccatcccctcgaacttttatcctttgtgttactaacaatcccgtgaacactcttttagttattttaaaatgtataattagttactactgactatagtcaaccctgttatgctgtcaaataatagatcttattcattcttactgttttttttgtactcattaactgttctcagcgccccctcccccaacacttcccagtctctggtaaccatcttctaccgtctatgtccatgagttcaattgttttgatttttagatcccacaaatgagtgagaacatgggatgtttgtctttctgtgcctgacttatttcacttaatatgatctccagttcatccatgctgttgtgtggatcaacatgttgttgcaggatctctttcttttttatgactgaatagtactccattgtgtatatgtacattttctttatccattcatctgttgatgtacgcttgggttgcttccaaatcttggcttttgtgaacagtgctacaacaaacatgggagtgcagatatttctttgacatagtggtttcctttcttttgggtatatacccagcagtgggattgctggatcatatggtagctctatttttagttttttgaggaacctccaaactgttctccatagtggttgtatgaatttacatttccaagtaaccaaaactttaaaacctgttcattaagttgttaaaatgaattgtataaccagaattttaagagatacacagatttaaaatgatgctcattctccccacttaaaattaggcttggtaaggaggctttcttgtggtgacgaagttgcttattgggagggagaaggtgaaagactgaatttttaaatctctgtactatgtatgaacagcaggcttcctcaggctattttctctcataactgtgttaccttcagtgccttccttatccttttgtagctttcagattttttttggtttttcaatgttagtaatattaggatttctgtttaatttacaacatcacttatgaaagcttttggtctggaaaaacatcatgtttggattcttcatagggttggtaggggtgcagctgctagttaactagtaatgtttttgcaattttaagtataatgagtcctctcatccctttaatatttaaaataagtaccagtttttcaaaacttttgttgaattgtaagtttaactcaacaaacataaattgagtccctattatgacttggccaagcttgaaagcataaaccatcacactgggaaataaagactaatgtaacaaatagctttttaaaaaagagactaaacatttatattgaagtctgttgcatgacatcagcctccagctacgtggcttggttccctggatatttcaaagaaggaagatatatctttttgtttaatgtgtcatggtagaccctgctgccttgcataacaaggctgcagatacatttttctccatagctcagtggtaagacactgtcattaataccacttctcttgccattgtgaagcttctaatttctcattggcacagaatacatgacccagtttaagaacagtgctgggtgtaatttaagtaccaaaattaagttgggaaaagctaattgagcccaagaatgacaggcaaaggatgctagatcttgattctctggagaataaggaacaattgaagactaaagaggggaattaccagtaaaagcaatgaaataatttaggcataatgtgatacggcccagagttctatctggcaattgaatgaaatagatttgagcaacattttgaagaaagcatatgcaggaatgttgacttactaaataagtgttaagggaaggcaagagtcagagatgggccaggcatggtggctcacacctgtaatcccagcactttgggaggccaaggcaggaggacagcttgaggctaggagttcaagaccagcctggacaacatagcagaccttgtctctacaaaaaagttagccaggtgtggtggcatgcacctgtggtcctagctacttgggagactgaggtgagaggatcacttgagtccagtagttggagcctatgatgccactattattgtgccactgctctctagcctgggtgacagaatgagatcctatgttaaaaaaaaaaagaagggggagggctaggcggagtggcttacgcctgtaatcccagcactttgggaggctgaggctggcagatcatccgaggttaggagtttgagatcagccttgccaacatggcaaaacactgtctctactaaaaatataaaagttagctgggtgtggtggcatacgcctgtagtcccagctgctttggaggctgaggcaggagatttgcttgaacccgggaagcagaggttgtagtgtgctgagatcataccattgtactctagcctgggctacagagcaagaccccatctgaaaaaaaaaaggagataggaagatattgaggaaagtactgaaacagctggccattgaacaggtcatctttagggaaaaggattggttgtttgataagaagctttgataagagggaggaacagatttgggggcagtttgggatggatagggctaggtttgctgaaggggaagcaaggagattgaggtataatggcgggctggtacattttagatctggaggcagaacagcagttctaaggtaagggctcttttagggttgttcatggattggagggcaaatgaagttaaagacaaaggtagtataagatgcttttcttgagagggagagatgtgcggaaaatagcatgagagtaacgctgaggttgtttatgagagtgaaagtggagttcttcacaatatcagaagcttaaggatgttgaatttaaagctacatagtacttcaggttttattcttgcttctaaattccagtgtttagaaggattgtcttgaagatatggacaaccaaagtgatttttcctgtataagtaccttactagctgattgcaccactagagctccaaaaattatcatttatttctaaagaagttctgtagtagaattgaatcggatggcagtgggactgaacattttgtaacttttttttttcttttttaatgaacgtggaataggaatttgtcattcaagaagctttagaagaacatgacaaaaatggtgatggatttgttagtttggaagaatttcttggtgattacaggtgggatccaagtaagtcacctgggagaatgtgaaaagagaaaaggaattgaagaaagacattgaaagacagccttgctcattgaaagctctcttcaacaggaaatgtaatgaggatctgtgtctgatcctacttgtttcgttaactgtaatacaagttcaacaaatggatttatagcttatctgagaacgctgtcttgcttacttttacttccgtgtctagagtcaaacatttttctttcttttcaaacaaatctaattttattatcagtttaaatggggaaggaagtaaggtagatatttttaaacaaaatcctgtgctgttgcaggtggatcttaaaagagatagaaacataaaacactacaaatactggtgtaaacacagtatcagaagcttagtagaaggtgaataagtgtttgaaattaagagtttgcttttatataagcagctgttttttcagaattgttgcttaaagacaccaaacaatgccatttttaaattggtcaccagttttacttattctgattgtcactttaaaattacacatggcattactttgtgaaaacatgtaagaaactttgtatagaaacatgatatacagtaaaacattacccacctcacatctgggaaaactagatatcggaacaaatagcagttaacaaaattactagtttgtgaaaacatccaatgattttaaaactgggttgtttagactcgtgtcacttttgaaaatgactatatatttgttcttatgtcaggacttttcagttaagtagttctgttttattgggctttctttagtaaactttaaattcacttcctttattctagggatataccaaacttcttattggatacatgtgatattcttgtgtatgtatatttgtgtttttttatattaagctgcaaatgaagatccagaatggatacttgttgagaaagacagattcgtgaatgattatgacaaagataacgatggcaggcttgatccccaagagctgttaccttgggtagtacctaataatcagggcattgcacaagaggaggtaagtgttacagaacaactgtttctctccaccccctccccccgaatttggtgctgttgataggaaaagaagttcaaaatcttaagccaaagaaagaagtaatggagttatttgggattgatgcattactatgttttgaatttacgaactgtttagattgtcagggagacgaggaagttaagattgtgtcatgtattaatttgagagtacagtgaatagaataatagtttgtatttacctacagggactcaaaacaggttataataatttttcattgccttgatatatcctggattggatttgagtggagagagacagaacccagcagaaatgaagaaaggagataatgggaaaagcagtagacggacctggttacaacgtgtaacatttttagatacttaaacaataatgagtacttgtacacctggatgattttgacaagtcaaatcacattaaattgtgaacatcttgctgaaaatacttattacacttgacacttttttgttttattttgaaggcgcttcatctaattgatgaaatggatttgaatggtgacaaaaagctctctgaagaagagattctggaaaacccggacttgtttctcaccagtgaagccacagattatggcagacagctccatgatgactatttctatcatgatgagctttaatctctgagcctgtctcagtagagtactggctccttttataatttgttaccagctttacttttgtgataaaatattgatgttgtattttacactcttaagtcttaaccacagtcagaattatcttaatgtagattataattttggtcttttaggaaaaaaaaacaaaaatctgatatttatttcaaaatgtattgaagcaacaaaatattaatattgtgccatatgacaacaaagtctttcctaaatactccatctgtttagtactgtattgtggaatatttgagttctatttccatacttgaaaacatggaggattttagagatgcctgaacaatattatttaagtagtatgtgaccgagctataaatttttgtttttgttctaagtagatttaatttgggaactgacaggacaatgtttttaggtttagcattttgtttaaaaacctttaaagaaacctttagaaggacttagacctcacatattaatgttgagaagttctgcttaattttaaaatggtttctataaagggttttattgtatgaaatagaactttatatttttgcatatgtatagatagtaattatatttaatgtataactatagcattatggtgagtggaatttgacattgtccaaacctttttcatttttgagtgattaaaaatgaaatgtcctttgtatatgtttgtttgcttttctttaactttcagataaatattgaatttagcataggttttgtggtattgtacattatcttgcctcatccattcctttatgtggatagttcccaaaactgtcaaattattcttgctgcattttcttattttttttttaaataagagaatcatgttataatataattgaatgtgcacctgacacattttaataattggtgttgtagcaaatgtggttttgctctttggggctataaataatcttgagtaacgcaggttggaattaccaatagagctggtcagttatcaacagtagagctcagtatcaattttactgaaattaaaatcatacttgataagca

SEQ ID NO: 176 - DNA, 32744 bp, Homo sapiens
  source 1..32744: mol_type = other DNA
agagacgtgcgggtgaaaggtcgagcgacagccggccccgccccctggcgcgcgggcgtgtcggacccgcagagctctcggactttcggaagctctcggtgtgggtgcgacccgagagaaggagcggggctggtggggctgctgcagccggtgagtgtgggctggcgctgggggctggaacctcctaggccagcctttgggcggtgccggaggaacccgctcgctgcggctctgaggcgggaacaggggctggggccgagcgcgggctgggagcttcggtccccggagtgccgcttcccgtctggggccggggcggtcgcctgtctgtgtggacccaggatcctcaaagagaacgaatctgggaccctgcagaaatgaagggcatgtagtgtagaggtttttcctttttatttagaaaggaatgaaagaccggcagtgcacctgcttggataataagcacgtgacccaaaactttgttcgggctccatgggcaggaataaagctgggtatttgacctcgcgcgaggacgagcgagaatgtcagaatgagggacttgggggaagactgaagagagaaagggagcatcttcttcagcattttctctccctcctggatgcaacccttcctgtacgtggtcattggcctggagatgtttactggagtactcctccaccggcagggttactggtgtcactgtgcacccagtcccctcgagctgcgtgattcatcgcagcctttggatccggaaggatgagcaaactccttaagtgtaatcgtggtaggatactgactttagtgctcgaactggacttaggccttggtggtctatctcatcaataaacattcactgggttcttggtttaaggggtttgagaagcttgccacctcccagcgtttattattatttttttcttttgccccgacctttagcctctgggccatttgtaatacatatttaatttttagtcacaggaaataagtaatcatggtgctcaacagtttggataagatgattcaactccagaaaaacactgccaacatcaggaatatttgtgttttggctcatgttgaccatggtaagaatactttttaaatggcttattttgataaataagggagatgtgtctctgtatgtctcagtggagtgaagctgtggacagctgagagtgatgtttgctaagaagcaagtcttctttctttaaaagttttgtgtgatgttagggaagcctgctttgctataaagcatttgaaatgaacacggttacctagtgagtagcattcttctatatattatgtcatgttgttttttaaagcagaacttgaattttttgtttttgaaatggctttacatataaaatgtctgtagtcttgacataatgtccttagagtctgtggtatgtgatcctatttaattcatcagatatttatcaaacgtctgttaagttcaagatattttgcttagtatgtctgaaggtggagatttatgagtagggcactagcccaggggaggttttaacggggagcagagcaaaatgagacaaacaagagaaaaaagtagactctaaggttgggagaactagaggattaggaagtgaggggttaggaaaagacctcacaacataattagtattagagatgacacttgaagggggctcaagatgacaaatggagataatcattacaggtgggaatgtgtcatcaaggggagagggaaatatatgtggtcaaagcccagtatatgggaaaggcagagatagctaacccatggtatgttcttctgacagatactgctgtaactccatagcgctccttcatgctaagcctcctcttgatttcaaacctcttggtagtttaggtaaccacagcaaagtgattgggatgggcatatgaaataaaacatatttaccatcctgaagatgaaggaccagttggcgaggtgaagaagcaggctgagtcatatctcatagagctgctcatgccagctaggaactgggataagagttgagtgctccagctctggagttagacaacctaagttcagatctccattttcaagttacataccttgcctttttgagcttcaatatacagcatctgtaaaacaggatgaaaactatacctgctttataggctataggattaaatgtgataataatgagagggaaggtaaacgcttcaccatgaaaacgatcattaatgtctactattaggcagtagggagcctttgggggaaaacatggagcaggaatgatgtaatcaaataaaacatgagaaagattagattggtagacatgcttaggatggatccaaagtcagagattaggtggctgttgtcattgatagaagagctgaagtaatgtgagtatggaaactgacagaaagacagatagtggatcacttacaagtgaagccagctgtgaatgagttttagtacaaatccagtgagtaacccctgcctccatgagtttttataattttactgctcacattttgagaatgtgaaggctgataaaagggttttttttttctttatgaatttattcaagtggaaagttagtggggtgtaacaaattactttaaatgtattgtttaaaattatgttaagctgctactatcctaaaaaacctgggattcatccattcaacaagtattttctgaaggtcttctatatgacaagcgttgttctggtcctagggatactgctgtgaataaagcaaagttcctgcttgcttgataattattttctagggaggtatatacttggtgtacttagaataaattcagctttactgggtagcaggaaagtgatgctctaggattatatgctaatacatatttacattgcagacagatagcagtgttaaatatcttcagttctcctactcattggtctctggtttgaacaatacagagattccatagctttgctgaagttcctaaagtgcaataaagacttgtcttgaaggaaaaaaaccctcctttgcttactccaacccagttgtagtaattatgcatacccctgacattctttacacagaatcacctgtttatatcacataaaatctcatagactttagttgtatgtagtctgcttaataaaagtaactataaatatattcgaagattcttttgctttaaagtagattcctaggtttagatttggatactaggtttcattggttgttacagtatgtttatgccctccacatgctatattacaaacagtaagagatatggataatgttcctgaatttctttgataagtaagtattttcttaagacagtttagcaaattccagctgaggccatgcatggggaaatatggcaaaagagtatgttctctaaagttacttgacaacttttcagatgaggttgagtagatccacagggttggagataagattacagcattatagagtgctagcctctgtgtccttccagatgatattctgttcaaaagtctaataaatctcttttgtcacctagcataggtaaatagaaaatctttactaaaccaattcttatgaccagattttaaatctataggtatgatccatgaccccttttaaaaaagatatagatttgaattgatgttgctattttaacaggaaaaactactctggctgactgtcttatatctagcaatggaatcatctccagccgcctagcaggcaaggtatgttattattttataaatacttgttgcatttcagtattagctatcaacaatgtgatgaaccattttctgtgttcttcagccatccaaaagggtataaaacataattcttgcgtctaaaagctgccaatccattttgcaagataaaaatgctgaggagaaaaatagttacttctgtattgctttgtattgctttatcctaagtgcaaaagtgagtttttgcagcaagcaaatgatacaccattgtggaagatttcacagcgcaagagattctttgtaggtgaatgagttgagtggtttgaggagaagacagaaaagctaccaggtagtgggaaataagacggataaaggctaatttgtgtgttgtgctctatttgagtggagtgtttgcctagagactagtgacagagaaaacatactggcagggagaataagattatagaagaccttaaaagttaacctaagtatcaaaggaaagctgcttgtgcctgaggattgtgatgaaaatagtgggttttttggtttttgtttttgagacaggatctcactctgttgcccaggctagagtgcagtggtgtgatcatgcacggctcactgcaacctcgccctgttgggctcaggtgatcctcccacctcagcctcttgggtacctgggactacaggtgcacaccaccacacctggctaattttttgtagagacagggttttgccatgttccctaggctgatcttgaactcctgggctcaagcaatcctcctgccttgacttcccaaagtgctggaattacaggtgtgagtcaccacacctagcctgaaaatagcgtttgaggaaataaaattaaagagatctttatttgtagctatgagttgaaagggcttggaataatttacttggcagtagaaaaataaagatatattcgtttccataatgaatttaggatatgatcaatagggtttatcaggtgacagagaatagagagaagaggagacggagaagcaaaattgaatccacagggtagacccaatagacttgaagatcgatttgggaattgatgtgtgggttgggagggaagctggcccaagatactatctagaggaggctgaagaaaactaggttgagtgaaataatgaaatgcttatattttccccacttgagaatttagagaaagtacaaaactgaagtaagtagatgaaaggaaatagtaaagcataaattaatgaaatagtaaacagacattttatagaaaggatcagtgaagccagaagtttgtttttggaaaagattaacccagctaacaaatacaaagagtgaaccctaatgtaaactatggactttaattaatcataatgcatcaatattggttcatcagttgtaacaaaggtatcacaccatatgctaatacaagatagatataataggggaaactgtgtgggtgggaggagagagtatgtgggaaccttcagtcaatttttctgtaaacttaaaggtgctctaaaaatataaagttattaatttaaacaattactagcaatatagacaatttttgattctcttgactaggaaacttttttgttttgtttttcattgacattgttgaggaacatttgacacttttgacctggtaatgttcctaatgtggctcactgtactttggacatatagaaagcatagtatatataaataaatatttttgaatgaatgactttaaagaagagtaacacaactgacaaaacaccagcaagatgatcaagaagaaaagagaggaggcagaaatatgtgatacccagaaagaaaaatgctgcagaagttaataaggtaataataggatataatgaacaactctgtgccagtaaacttaaaagtgctaaaatggaaaaatgtctggaaaacataacttgctaaaatggagtcaagaagaaataggaaacttgaattattctatagtcatttaagaaattgaattggctggcaaaaatctttccataaagtaaagacccagatggtttaactctctagttctgccaaacattcaaagaataatttcagtcctacttaaaccatttcaaaatatagcagagaaaaacccaacaatcggcagtattctccaaatcatatgaagatagcataactttgataccaaaagtctgttaaggatagtacaatataggagaattatataccaaccttatgattatggatgcaaaaattatcatcctcattaacaaacaattcagcatagtataaaaagatgattattcatatccaaatcgagtttatcccaaggaattcaagattggtttaacatgtaatttcactatattaatggattaaaggaagaaaatcatgatcatttcaacagatataaagacatgtagtaaaattcaacatctattgtgataaaacctctttgcaatgtagttacagaagagaacttctgtaatctgatgtgggatatttataaaaaacctaaaatgaagattgaacttaatgatgaagtgttaaaacttctctattcatagccaggaataaggcaagaatggctgtcacacccttctgctcattgtgttataacttctactttagattgtactggaggttctagttgcagtgataaagctggaaagaaaaataaaaagtgtgaattttggaaaggaagaaaacaaaaatgtagataaattgctaggatattagtaacaatttggcaggtttcaggatacgaaaactgttgaaaagaagtatacgtgagcaataaataggtaatatacagtaatttaaaaacgtaaaccatttaaatagcataataaatgtacctgtgccgggcatggtggctcatgcctgtaatcccagctacttgggaagctaggcaggacagttgcataaacccaggagtttgaggctgcaaagagctgtgacagcaactgcactccggcctggtggatagcacaagacgccatctcttcaaaaacaacaacaataacaacaaaacctatgagatattggagaaaacttaaatggaaggatataccatatttacgtattggctgtctattttttaaatgacatttaaaaaatattgatctgtagattcagcaattccagtaaaaattccaacagatttttaaaaatttcaacttgatatgctgatttaaaaatatatacagaagagcaaataaaccaattaatagccgggactgaagaagagtaagatatggaaatacatcttacccactggcaagacttatcaatgtgttgatgtgttgtaacctgtggcctggaatcggctgaggcatgaaattgactgacggctcagaatagtaggctggcatttcagatctgtgggaaaaagatgaacctttcaagtggttcttgggcaactggttatccctgtggaaaaaaaaattggacctctagttaacaccacacacaaattgcacagttaagacatttttatttaaaagcttttttatttaaaaactaaagcttttagaaaataatatgggctaatatttttatgaccttaaaggaagatttcttaagacaaaaatgtgcaaacaattttataaaaggttaataaactacttaaaattaagtacatattcatcaaagatgccagaaagaaatggaaaaaacaagcctggtaactgtgaaaaatattaataacacacatataattgacaaaggactaatattcagagactataaataactcctatccaaaacaaaataaatctgtattgcaaccagtaggaaggtggacaaaagccttgtataggcaattcacagaaaaggaatgttaaatggccagtaaaaaacttacaaaaggatacttaatcccattaataataggataaatgtaaatttaaaaccatgagatgctatttatcacccatcttacttagaaaataaagtccagcaatatcagctgtggaggttatggatcaagaaacgcactattccactgtggatcagtccaacaatttggaaaataatttggaaatatcaagttaggttgaggatgtgcagatttaataactcagaaattctactggtagggagtgtacaagagacccacaactgttcatatcaactcagtaatagttacaaaaaactggaatcagtctccatgtccatcagtacccaccagttgaaggtctacatctcattctctagaccttgaagtacatcagtactgacagtggtttcatttaaataaagatcccatccttttccaactccttagccctaagcaccagactaacctcctcctcctttctccagaatgattttcccttacccttccttcattctctacaatggacgaatgggtctggtagatttgtgaggtggagtcctacagtaataaaaatgaataaattacgtcaatgtggctgaatctcaggaaaacaatattgagcagagaaaaagtgacagtataatatattaagtatgattcttatagaaggcttaaaacttgccactctaaatgatatattgcttagtgacacactcatttttaaaaattataaagaaaataaggaaatgatcaagataaaattcaagatagtggttacctgtaagccaggggcacagggtacttcaaaagtaacaaacatttttttttttccttttgaaatgggatggtgcatacacaggggttcattgtgttgttatttatgtattacacgtttcataccaattcagtgcttaaaaacatacattatagaaaactgacaagggactgagactttctgaaggaaggactgactgagaggttggagaggtgaagggaaaccagcagtgggatctaaggagagatggaggtaaattaagaggtttcagactcttggaagaatttcacatatgcacgtaacacacatgcacacaaagggtaactgtcatgctgcactggaatcaagaaaaatgaggattgagaatgattattgcgtttcgccagaggtcattgatagcttttaggactttgattttgccagagctgtggaaatggaagcttttctgaaaatttcagaattaatatggatgaataaatgtggcagttcatatcaacagataattcttggtgcttttgaatgaaagaaaggagaaaatagacaggttaagaatttttcaaaagtttgacagtggagagaatggaggaagggtaagggaaaatcattctggagaaaggaggagaaggttagtctggtgcttagggctaaggagttggaaagggatgggatctttatttaaacgacaccactgtcagtactgatgcactgcaaggcctagaaaatgagatgtagacactcattggtgggtattacagtgttatgaaagtcatcaactaaatggtcatattacaaatattttctactgtattctttttttaaaaaagatgtattcaaaatctattaatttgggaaaggaataaagacttctcttgcttctagagacttctgtttcagtctctgctcagaatttgtcaaacagcttataaataggaaaagaatggctatgttattgatgtttagaaagaattccctcaaatgctactgtccgtaagttgttcttgacctgccccatcattcacggctgatatttggatgagcaacactctggggagggtatgcagtatttcaatacatttatggttcctagtggttatgtttttcaatttttcatgttcccttcccctcaatcaacttcacttctccagacccccatcatcttaaaaaaaaaaaaaagagagagggctaggcgcggtagctcatgcccgtaatgccagcactttgggagactgaggtgggtggatcacctcaggtcaggagctcaagaccagcctggccagcatggcgaaaccctgtctctactaaaaatacaaaaattagccaggtgtgttagcacatgcctgtaatctcagctgtttgggaggcctgaggcaagagaatcacttgaacctgggaagtagagtttgcagtgagccgagattgtaccattgcattccagcctgggcaacagaataagactctgtctcaaaaaaaaaaaaggctctatataggttaaaatttaagtattggctgggcatgatggttcacacctgtaatctcagcactttgggaggccacggtgggaggatcacttgaggctagaagttcaagactagtgtgggcaacatagcaagaccctgtctctacaaaaataaataaaaataacaaattaaatataagtatttaaaacaaaaatctaaattagcaaattttaatgttacattttaattctttgggaagtgaagatgcatatgttgcatttttccagttaaggtacatggacagcagagaagatgaacagatccgagggatcactatgaaatccagtgccatttccctacattatgcaacaggtaaatcagtctgtgttttaacgaaacacagctttgcatctttcatgtcctcttctgtctttctgaattaattgcatgcctcagtttctttgcttatattccacgtattttattctggcctctccacatgatctgttgtcagagtcaggctgtccaggcttggatgcagatggaaacctctgactggtttgagggcagaagaactggcaattcacacctgccccctccaccaggtgattatatggattccttcacaaggaaagtcaggagccctaggactttagctggttcagccttactattctgcctcatggcctggcctgcatgttagatttggagtagattaaaggtagactgccgtgatcagtaccagcttgctgtcctcaaatgaggatgctacattgatagtaacacttctaggaatttatctgacagaaatagtcatgtaagtatatgagatacatgtcactgatattcactaaaaagtttgtattcgtgaaaaaaataacaacaacctgaatgtcaataggagaatggttcaataaactgatatatccaagcagtgaaatactgtgcagctgttaaaacaaatgtttaatatatatgttattgtacaggggaaaatggtatgttcagagacagaaaacaaattgcagagtatttttgtaagatatgaatgtgtttaggtaataaaaatatattatatatgcagataaaggtgtctggaaggatacataccaaacccttaacagtagctctctgcaggggctagattatggagaaacttgcacttttcaaaatatttatttttgtagtatgtgaaaattttacacaaaatgtatatttttgtaattagaagaaaataataaagataaattttatttccctaatggacttacatgtggttcatccttcacaagtgtcatatctttgacactgccaccaaaagatgtactgtgtggggcatggctgttgtaccaaaccagttttgaagctcttaggcacatgatttctcgatgtttaatgtttaacgcttcatttttttttaaaccacttctcacattttaaaggttatattctcatcctgtgatccagagaatgaggttaagggtctattgatttcttatctcgttttatagacttcaagagatttgaaggctgccttcttccttactcagattattagtctgtttttatttgaagattcctctggtgtcagttttagttgttctgctctatactttgtctctagtccccctcccttgagtcctttaaccactttattaaggtttaatttatataccataaaattcacctgttccaattcacatttatctttctggtgtagtattgtaggagaatttgctataggaccctgggaactgaatggtctgaactctattttatcgagctctgtgaccttgaccttggctgctcacagatcagattgttttaggtacgctttcttttttattttttgagacggagtcttgctctgtcgcccaggctggagtgcagtggcatgatctcagctcactgcagcctctgcctcccggattccagcgattctcctgcctcagcctcctgggaagctgggattgcagatgcatgccaccgtgcccggctaatttttgtatttttagtagaggcggggtttcaccatgttggccaggctggtcttgaactcctgaccgcaggtgatccgcccgcctcggtgtcccaaagtgctgggattacagtcgggagccaccgcgcccagccaggtatgctttcttgattgcatagaccagagacttaagctagcttgggttggggtgggatagattattgaaagcatatgtgtgaaatgatattggaaataatattcatgaaaacggaaaaacaggagtcttattggagtgatgtctcataaaaattggagccagatttttattctggatccaagatagctctagagaccgtatcagtaaaagtttatggatccttcctctggaactccactgttgtccttggatttgggtgtctgtttgtatttccactattatcctgtatgtcttttctctgtctcatagcttttgcctactgtcatgtcttcatctttgtacattcaccttgccctgacttcttaccctattatcctgtctgttttcaccttatttctgttgcctactgcttcaatctcttgtgtttctgagcacacaggctcaagagcaggatgcggctctgcttatcttttcatgccagcccatcacagaggttgcacctatggattggctgcgcttgggttggttagtcacctcctaatccaatcagtggtgatcggagtggagtcacaaagtgtcaaacatgtttcttgtgagcatgggattactgcctagaagggaatttgggccgagcagtcatcacacttgacagtgcagagccttatggggatagaagttaggaatgttgactgggacatatcctctcagagcacttgagagatgagatatgtttttatctgtatcttagtactgattctccagaatggggtatttcctgttctgaaggtgggacgtctgaaggggaacctagatgggagaaaaagagggaaacctgatgattgaagaaactccacaggtgacttttatttataccatgccttcccctccttctcacccacttcgaatgccctcttatttgagaatctgtgtactaaatgcaagttaagccctttctgtggttctgactcttaatttaccgagctttcaaaagtattttcaaatatttatttgggttgaaatatagggtcttattctagtttaaagtaaacagataaatcctgcacattatagaagtggtgttgaaaaccatcaaggtcatacactatctcagcattttccaggaacctaatttttctttgagaaaatggaacctctattatctttacgtttgtgaccaaaatttgctacaaatattgggatcatattattaaatcttgttatttgcctgtttcttacctctctttgtgtcccacccacaaggataccatacatttatcttgtcatctcaagagttaggaagtattcctaacaatatacgttctgtaaaatatcctaaggggatgtaatgcctttgaatcctttagcctagaatccagatacagaagagagaaatagattcacatgggttaaataatttgaaattcatcaaaaggaatactgcagtcgtttctactgtatagccattttttatatctgagcaaatattgctgttgctgaacttttgaagtttttatctaattcatcttttaaaatattttaaataaatttacaagtttatatgcatacatacatattaggtatattgcatatatagtatatatgtatgtatatttcaatgtatatatttatttatatatatatttcaaatgttttgtagcgatgggatgttgctatgttgcccagactggtctcaacctcgtggatgcaagccttctacctatttcctaaagttttggtattacagttgtgagccaccacacctggcccaagtttatatttactatagaaaatttagtgtgtgttatagaatatacagtaaaacacaaaaatgaaataaaaatcactctcagttcatcaccagttattttatattttcaatttttatatttaatgcaagttgtatgtgtatgcacacactgtgaggtaactatctaactttatttctccccccaaatagcttacttattctaacacctgtcagatgtgattattaagtacaatattattagttcctgacatggtgttgacacctctgcataagtgaggcagtttgagtgattttttttttttttcaagaaaagttggcatcaggattttcggtaaaatcttccaagtatcaaaatgctgccaacttatttaaaaattgtaaaacaccatatggaaaacactgcagtgggctttagcttatgagcttttagttagtaaccttaggcatatagtctagctaatagcctggttcagtggtacacttgggattcacccaagagtcagccatatgcagtgaggttgtcctccaaacagggagaccaaggatatagcagtcttctgcaaagaggtccatatgcaagttgatcactttgtaaatacctctgttaggatagggttagtggttgtgggcagaaggaggatttacgcatgtgttgatttcagctctgtggctctctggttttatactccgaagactaggccatggagacactgactcatgccatctaattacagacaaggccagcatgtagcagaaagtcatctcttattcagaggcagtagcttcccttttcctctggctgtgtgaacgtttacccatggtcctaacttgccttattctttccagaatgaggctgggagggaagagttccattacccctcatttgactgaagggtagattttgttctcgtcagacaatgaatgctttactttgtgaagtattcagttgatgccaggcctaagaaactaggtacacgatagttcacttctgagctaggtgtctcatatgcctgattttgtttaatcttcacagcaactctgtgatgggtattactctgattttacacatgtgcaaaaatggagttcagagaggtgaagacactttcccaaggacagagtaatttctagcatgtggtagtagtcctagaacccacatttccagcatattcacttggaccattagtctcttggaagtcaggccacaactaattcctcctgaggcttgagttatctcctttccactagggattgttatgcacgtcttgtggccaacactacctacgtccctgtggtcttcagtcactgcccacgatgcaagccacatgatctggcctctcttatagtctcttccccatgtttctctgtgattctgacaccctctttcaatttcccattattcccttccttaccaaaacttactgtgaaaacattccaagagaaacaaacatcgctacatcctcaatgtctttttattgacgtttcccccttctgcctggctgtcttctgatgacattgcctgccttgtaccttttccaagtgaatgctactcattcattcatgttccacgtatctctgggttagcatatgggattgccattctttttgttcccagatctgattacaaaagttaattcttctacccttgttttcaaacttcttctttcaagactcagaccatccaattattcacctttccagtcattgtcagctcctggtgatggttcctgttcattagtgaatttggcacccggactcataattgttctttttacctgaatcttctaaggtggcttttcaccatccctgagaatgacttcttcaacagcttatcctctcaacaacattgattctgcgtttcacctacctgttgtcatgaatactttctggattttagcatcaccttgagctatccatcttcgacctttcaaacttaaatacttccttctctacaatctttgattctcccagctctttctttcacctgattaatgaggtacccattctttgacttcataatgttctctagtttttttgactccccacagcctctttcttcattcatttcctgcttcatacagcccagatttgtcatttcactgacagtcttgccagcgtcttcagtctctttggttcttgaccttctgtcatatttttcccaacaaaactttaacccttgataaagctaattctctacacgtcttcatccttgcatttgggctaggttctcaagtggtcctccagactgctggcagatttcccatctctcactgttaggtcttgctcattcttcccaatacctattttaaaccttctggtctctttcagcctacctgtcatcccctcctccacaatctcagcagacattcttaccttctatttcacagaaaagagaagaattctcacctgcttgccactgtatctcaaaacgtaatggtatgggcattttttgcttgcctcctgtcactggcaaaaacctgtgctctggacttaatgatcttttcttcagtatcttccacctctccctctgtactggcttgtatccatcagcttttaagcatgctcaagtctttcttgtctttcttgtcttaaaaaaatacataaatccttctttcagccccacattcctctgcattttccctcttcccccttcttagtcaaagttatcctacaattactctctcaattactccgataatgagactagcaccttacagtaatgacatgcattagcagtgtgaaattggtccttgatctatgaccttctctccagggtgatgctaagcatagagagattataagaagtaaacatcaaccttttttttactccagggtttcttattctggttcttacacccttccaagcaaaactgccaatgatcaaaggaatcaagacaatgtggatgtgtaattattagatttactatctacgcagcaggccttgaaaggtggagaagttctcagtgatgtcagagttcagggtgtggccacagtactgggtggcagatgtggactggcatcatactgagaaaaaccaaaagcgggtgaggccaaatgtaatcagaagtggtctgtacgtggtctagtttcatgttggaggaaggtctggagaggtcttcgggtcgggtttgtgcagcaaaagaaaacttaatcagtttgctattcatagttgtttctagatcatttttcctctcattttcctaacccctgtcactttttttttttttttaagacaagagtctcattctatcacccaggctggagtgcagtggtgatcatagctcactgcagcccagaactcctaggctcaagcagtcctcctgcctcagcctcccgagtagctaatactgcaggcatgtgccaccatgcctggctaattttttaaatttttttgtagagatgatggtcttaccatgttgtccaggctggtcttggctcaagtgatcttcctgttttggccttccaaagcatttggattataggtatgagccactgtgcctgaccccatctcagttttgacacatactatcagagtcaaccacccttcacctctccttgtggcaggcttctcataaagatagttaccctgttacctgtgtcagctttacaattgtgctttacagttctgtcaaataataagtcgtattagttgatttataacttataatgttatacattgatttaaaatataaaaggataatagtgatttaagatataaaaggaaaccaggtgcagtggctcacatctgtaatcccagcactttgggagactgaggcagaaggatcacttagggacaggagtttgagacctgccacggcaacacagtgaaaccccatctctacaaaaaataaaagttacccttgtgtgcctgcagtccctgctacttgggaggctgaggcaggaggatcgcttgagcccaggaatttgaggctgcagtgagctatgattgtgccactgcatccagcctgaatgtttcagtgagaccctgtctctaaaaaaaacaaaaaacaaaaaaaagtagtatttcctgtggagggagacttgtggttactttatatatagttggggtacaatttttgtatataattgttagaagttcatacataaggaatgtaggaacatgtcttcagataactcaggttctgcctatatttctgttatttttgttgtcaggcaaaatactctaccaatacactgacacataaaggacactttcaggaggttcagatcttcttccataacttcagtttttcttttttattttatggaaagttttctctcatcagctttctatgtatgctttagtgagcatttccagtgttttggaagttgaacactaaactccttacatgaagttttactgaatacagagatgttttggcaggtcctagtgacaaatgtgcaccttctgtgagacaattatccatggcactttaaaaccatgggcaagggaggaattcttttcccataactccctattagcagcagaaattgtctggaagatatctcccataattaacttcagttcttccaacttttttttcagccccctggaacataaaaagattggattgttgcttgactgattagatctgtgccttgaaatgaagccgtttagtttggaatgcctgggaagtaaagcagcagaagtttctgtccctgaatgctattgcagggattaattcaacatatagcttcaggactttgttacaaatcggaaagatcatttagcatgcttaaaaaattttgtctcttgaaaagtgttatgcattctctactttttaaataattaatactggcaataacaataatatctaccatggtaaacccctataactgcgtttatgtattttttaatttgatcacacacacgcaaaagtggtaagtggcattttttaaagagacataatgtggctgaagtcacagcagaagagctgtgcttggggacgttttttctctaatggatatgggacttctgtccccaacctttgaaatttaggttaacgttgtttggaaagggttaagatgaaaaaggcattgaaggaggaattgggaggcctggctcagagctgagccaagcctttgtcagctgtgtaactgaccatggcatttcctccttctcaccattaaatatatttgagaaactccaggttaaacagaattggacaaacttcttttacagggcttctctgaacctttaatatgtatgtgtgatgtgagctccaaggctggctgtttatttctcagctatattatttgatcagacacttattttttaggatgtagattgtcgggtggaaacacttggtgtatctctagctttcagttcctctctagatctgaacctgcccttcctgaatgaatttcaaagaatctggaaatggacgcgtacttaggggagcatagataagtagataggtattcgtttttctgactattccctaaaaggtctgtaactccaataaaaggtaagagcactgttgtataggaagcctgaaatgtctgtacgagtgcatttttagactctgtaaagaacttgactggagacccagtctctgaaacttcagtatcaggtcccggtcgtatcacaaaggatggaaaagtgcttgaagttctcccactctaaagtctggagtttagccagatgaataggcaagtgttgtttccccagttgcaaagtatgaaggaatctaagacccgagaagtgactaagatggttcgatagccctgggtgtatttctggcttgcttcttttgggaccttgggtcagtctcttaccttttgagggcgttagcatgtttttctatggaataaaggcttaggctgagaaaatgctgagtgattctaagaatctcacagctttaattttgtatgataggaccctagaccactactagacatgctcctttttctctggtgtacttggttgagatcacgatacttatcgaaaatgttgactaggagaactggtgtgagatctgacagtgaaaggctcgattgaggtccagtgggccattgctccagggctctggttatttgacttcttggattttcactggatatctccatggtcttctctggttggagccttctctggtggtttcagcagagcaatggttcctcataaagcagtttgcatgaaaagaccaggaggcagcggggaggagtggtactgaagaaggcagtctgttgctaactgatggcagtctttcccactgagcctcagtacacttgggaatgcttcacccagtgttttaggaattcattagcagtggaatcttggcatgtgaggtgaaagttactgccttctgagtgtagtggttagaggtatggtctttggagttaagtggatttgaacttatgctctatcattttgaattgtgtgatcttagtcaacctcagaattggattctagctggatgtccttgagaaaaatacttaacttttctgtgccttagttacctgctatataaaattgggctaatagttgtaactactacaggggattgttgtaagtaaacatcagataatttctgtattatgcttagaacaatgccagccatgaataggcagtccacagatgttaagcgctggttgtggttattgttgtggtggtgtttatcatcagtatcacctagggcacaagcgaagtcattaaaattatattgggggaaaatcctttaaatggcccataaattgcaggttgagcatcccaaatctgaaaatccaaaatctgaaatgctccaaaattcaaaactcttcaaataccaacatggcacaaaaaggaaatgctcattggagcattttggatttcagataaaggatactcaaccctgtagtcattcttgagtgcattcaagttgataaacactgagttaaggggaggagcaaaagtaaagtatatgtttgagcattctaatagttattctgcctttaaaagagaattatatcaaatttatcaataatggggaatgagtacagaattctaaagtattaactaattttctgcatggtatactaagttatgtttagtgataactctctataacctaagatgatctttttttttcttgtttgcctgggactaagggctttgataggatgtgggaatttccgtgctaaaaccagacaactcaggatgtgtcatcaccctactataagtttaatacatttgtctgttgagactattgaaggagatattaatgggagagcacatagcacactgcttggcacatagtaactgctccttaagtttttgtagaattgagtctaaatcttgattgagcagattcatacactgctctttgacaaactgtagggaagaacttggccaactgctttgttggccctttgaacagctcttactgtcaggcccttaggcattgatttctttcagtttcaatttcctaacctgtaaaaggagaatagtaatatgtatctcatagggatattgtaaggattcaataatatgtgattagcacattaaaagtgagtatcatagtggctggctcccaataagctcttaagtggtaactattagaataataaagtcctttaacattttatatagatgctatttggaatcagtagtcccatcagtgggaaaagttggaatggtagctctggattgagctttcaactcctttagctttgttcagttttttcttagaagctttcagctttcttattctagaacgcctgaggaagaacattgtgtacctggacaactgaaaatgtgtgtttacaaattgtattttaggtaatgaggagtacctgatcaatctgatagactctccaggacacgtggacttttcctcagaagtatcaaccgctgttcgcatttgtgatggatgcatcattgtggtagatgctgtggaaggagtctgtccacaggtaatggattgtgatgagaaaatacttaaatggttaagggtgaggaaagagggggaactgactgactttaggcatttcactgacaatcacaacattggttttatatttcacatttggtaacgttccagtctgtgaaggagttaaatcaccagagttctgaagggatcttagagatgatgactttaatttaacatactttgtttttgtttttgtttgttttgagacagagtcttgctctgtcacccaggctttagtgcagtggcatgatcttggcttactgcaacctccgcctcctgggttcaagtgattttcatgcttcaacctccagagtaactgggattacaggcatgtgccaccatgcctggctaatttctgtacttttaatacagacgggattttgccatgttggccaggctagtcttgaattcctggcctcaagcagtccacctgcctcagcctcccagagtgctgagatacaggtgtgacccaccatgcccggccttatttatccttcttaactgtcagttgcataaaggcaacaatgatttcttatgtgtagttctttgctactccgctgtatacatagtttgtgaatgcctaatgaatacctttgtctgactggcatagtctagagtggttattaatcacgattttctaatgtgctctaattatttcaaatcatgagttttacatttttctttctgtttttatcagacacaggcagttctgcgacaagcttggcttgaaaacatccgtccggttttagtgattaataagattgatcgcttgatagtggaactgaaattcaccccacaagaggcctattctcacctcaagaatattttagaacaggtattttaatttttagtatttaaaaaatttagccacgaagaagagttgtaaggaagttactgagctgggtatgagccgttgctacagaaaagggaacttttccacttcagattcatacgtgttgctgttattctacaagagaggcaatagaaaaagcatgttctcagtagtcttttccatctcttggaatcacccatcatataaagcttggacaataggctctcttgtttaaaactgtatcttggttccaaagtgaagccatattaggattttattacctgtctgtagtattttattacctgtcgttacaggaaattttacccaagcattcattcatttatttattcagcaaatatttcatagatatatgttgaataaatgaattatcaaatgtccattgtgcactagggattgtgaatataagatgaacaggtcagaatccctattttcaaggagctcacagtatagtaggggagacaaagagatatttggagaacaatgagataagtcctgggtgtgatataacagcatagataagggccatctaacccagtctgggtcaagagggaagaatgagttagaagtcttaaaatggaagccttgagatggaagtaaagtaggtgtttgccaggtagacaggaaaaggacattcaaaagagaaggaatacgatgggcaaagtcataaaggcaagaaaaagcacagtacagtgtttcatttaaggaactgcaaattgttttttagctgaagaattagatcgtttgcaacagttacaagagatgggaaaaaggatataggatttagatgtcagtgaacctgatatgccgtgcgtgagagtttgaaatgtcttcctcaacacagtggaaagctgttgatgagagcaacttgagtatatttatttgttaaaggcaggaaacaataaaagtagaacagtgaaaaagaatgatggatggatatcattcgttgtagaaataggaagaggtaggccgggcgagctggcttacacctgtaatcccagcgctttgggaggccgaggcgggtggatcacgaggtcaggagattgagaccatcctgtcgaacaaggtgaaaccctgtctctactaaaaatacaaaaaattagccgggcgtggtagcaggcccctgtagtcccagctactagggaggctgaagcaggagaatggtgtgaacccgggaggcagagcgtgtggtgagccaagatcacgccactgcactccagcctgggcaacagagcgagactccacctcagaaaaaagaaaaaaattaggaacaggtaaaataactcctgccctgcattggcaggagaaaggtcagtggtatttgcagacataagtgagcttgtagattgggatgtggggcacttgaaggaaatctgagtaataggttccattttctctctgaggtaggacataagattactgcctatttgggagtgaaagtagagttgaggattaggagttgggaagagggcctgaagagggtagtgcacatttcagacagccgatgtgagagatgggcaaggcagtggactaaggttacaaactaggattgtggggttggaaatcatgagtactttgtgatactaggcctcagcactgagaaacaaattaaggatatgacacattaacatttacattaaactaataataataatcacaaaataaccttccaaaaaccttataatttagttatgctgagtttaggaagaatggatacatctaagttattcactgattatgaatgtcacctccattcatgtatgcttaatgagcccaaactgactaatgattctagccctaacacaggttaaacagtgtttctcctgccgtgagcatgctgagcatctgaatgacgctctgccatttcaccatctctcctagattaatgcgctcacagggactctttttacttctaaagtcctagaagaaagagcagagagggagactgaatcccaagtgaatccaaattctgaacaaggagagcaagtatatgactggagcactggcttggaggacacagatgattctcacctttacttctctccagaacagggaaatgtggtgtttaccagtgcaatagatgggtggggctttgggtaagtctgtttgcatctgattaaatctctttgcagattttatatgcagttgattgtttttagtgaaacttttattttgagataattatagattcacctatagttgtaagagataatgcagagagttctctggtgccctttacccagtaactgcctcctatccatgataacatcttgtagaactgtagtacaataaccaagcaggactttgccatttgccgtcaatatacaaaacatttctatcaccacaaggctccttcacgttgcccttatattgccacagctacttccttcccaccctcaaaccctttttaacccttgacaaccatttatctccaaatttctcatttcaagggtgttatagaaatggaaccaaaaaatatgtaatattttttaaattgatttttttcacttagcatgattctctagagacttatccaagttattgcatgcattaatactgtagttggttcctttctgttgctcagtagtattccatggtgtggatgtaccccagtttattcacccattaaaggacatctggtgttttttttttttttcctttttgggccattatgagtaaagctgctataaacattcatgtgtaggtttttgtgtgaacataagtttcatttctctggaataaatgcctaggagtgcagttgctgggtcatatgatagttgtatgtttagtttttaaagaaactaccaaactgtttccagacggactgtaccattttatattctcaccagcagtgcatgcgtgagtgatccagtttctccaaatgttcacgtttggtgttgtcaccgttttcattttagcaattctgttgggtgtgtactaatatgatattgtggttttaatttgcgttttcctaacagctggtttaccttgaacatcttttcatgtgctgatttgtcatctgtaggtcctcttgggtgaaaagtcttttcacatcctttcccattttcttaatgtgttttcttcgtactcctgaattttgagagttttttctattctaaacagtagtcctttgtctcatatgtgctttgcaaatattttctcccagtctgtagtttgacttcatatcctctaacagtgtctttcaaaatgagcaacgtttattttttgttttttgttttgtttgttttgttttgttttttgagacagagtcttgccctgttgcccaggctggagtgcagtgacgcaatcttggctcactgcaacctccgcctcccaggttcaagcgattctcctgcctcagcctcctgagtagctgggactacaggtgtgcaccaccactgccagctaatttttgtgtttcttttagtagagaccaggtttcaccatgttgtccaggctggtctcaaactcctgacctcaagtgatccgcctcggcctcccacagtgctgggattacaggcatgagccactgctcccagccatcaaagtccgcaaagtttttaatttggctgaagtttcgtttatcattttttctttttatggatcttgattttagagtcaagttgaagaactctttgcctagctctagatcctaaagattgtctctcatttttttctataagttttggttttactttttacatttaatccatgacccattttgagttaatttttgtataaagtgtgaggcttgggttaaggttttcttttggtgggaggagagggcctttggatttccatttagtctagaacgctttgttgaaaaggttatctattctccatagaattgcttttgtgcctttgtcaaaatcacttggacatacttgtgtgggtctgtttctgagtgttttgttctgttcctttaatctatgtgtctgtctttccaacagtaccacataattttgattagtgtagctgcataataagtcttgaaatcaggtagattatttctgtccacattatttttaattttcaaaatttcttttgctgttcaaggcctttgcctttccatgtaaattttatagtaatcttacctatatctgcaaaaacattttgctaggattttgatggaaattgattggtaaacctgttaatttggggagaattttgacatctttgctatgttgaattttttctattccatgaacactatgcctctccttttatttaaaatttttaaaaattcttttatgagcattttgtagttttcagcatccaagtgctgtacatgttgagttagatttacacttaatttttcatttttctgaatgattataaatgatatttttaattttggtgttagcacattcatctagtatatagaaatacaattaatttttgtatgttgatcttgtatactgtcaccttgctgaactcacttgcagttctttgtagatattttggaatttgctatgagactatcatgtctgcaaataggggttgttgtatttttttccttttctatctgcatgctgttttctcttttgctgattgcactggctagaatttccagcactatatgactgacattgatgggagtgggcatccttgccttgttcttggtcttaggaggaaagcattaagcctttcaccgttagaaataatgttaggactgcaggctgtttttagatgtcctttatcaagttgaggaagtcccctaatattcttatttttctgaatgtcattattatgaatgtgtcaagttttgtcacataccttttctgtattaattaatatatttgtatgatttttcttctttagcttgttaatatggtatattacattgattgatgttttttaatattgagccagtcttgcatttctttatagattttatatacaattgatttttaactttaactttattcttgagtaaattcaaatgtataccacaaagggatcccaccttattccttagctcagtttatttcatgtcagttttttgtttatcttcttaaagttatttgtacatagatgaacaaatatatttatatcaactttgataccaacagtagcaaaagttagtctagctttattgaggatgtacatatgctaaatattgagttactcactttatttaaattatttcaccaaattctgacaacactcctttgaaacagatattactatctattatctaagtctcaagaacattaagtaacttttgttcagcatcactcagctgctaagaggcagagttgatattaagattaaagtctgcctgagtctgaagcctgtgttttcttgacatggttcttctcttggtgtcttccctatggggtataaggatccttatttcttcttattgcctctcccgaatttgcacatgctgaggccatgttaacagtgacattggatttcagaatggagtaggtaattgatcacattttttaaactgcaacagtttctgacttgtggaatcaaaaaatccaaatgtagttaaaagattattactttgagaaaaatgtctgtggtttggataaatagtagtgggaccataactgtagttaactttagttgtgggcttgatattgcatgtaatttgcagggatcatagaactagaaatgatgcactaggagaaaacagagtctcttcatgaaatttatatcagtatgacttagaattggaaagaaagaaaggatcaggagctgactagaatgcaaggcttgggtgtagcctaacaaatctctggctccgttttttaaaatgtattttcctttttacaggaacttgttctccaatttccctttgaccagattttgtcttgggcagggcagtgtaatataatatcataattttctgtttgtaataaattatagatatcttagtccatttgatgcccgaaagatgatactagagctaaataaattgaagtaatgcatatatgatgaaaatagaaattgtgaacctgctgagaatttgtacttttcatatatggttgatgggttgtcattatcacctttctaggcctcagtttacttatctgaaaaaacaagaatattgggctaagatgatttcaagactttctttagattcattcacagtgattcattcagtcatataatacggtcgtacttgttgatttcctgatttgtgagcattctgctaataagccacaagatgggaggcttgtccctttcttacattgattttcataagtaattcaatgttttatgctaattttagtctaaatcacacaaattgggggaagtttattgtggaaggacagggaatagggagaaagttgaatggatagaataagggtaatttacatagcccttacttttgacatttttagatactatcagccaataaatgaatgttcccctgtattagacaaggtcagatttagagattggctactgtctgttctcaacaagttgatatgtgaatttatgggaaagtagtggtggaaatgaaagcaccagagactttttccttccccttttcctctaaaatgtcagtgaataggccaagttgacagctgcatgtgtcacaaaaggtggaaaatgagcacattccagaatttgcaagatggttctataaactctgcagtgggaaaggattaagaagtgtgactagaggctgaacctaggtcttctcccgaaatctatcctgttaattgatgttaatctgggagagtctgctctgaaaagcagaagcatattgacttggatgggtagcatcaagaatctaagttcttgttttagatacatagaactgagtcctcaaccttatagaagagggacaggagagaagagaaatgaaaagccctttgtaatagatttacttgtctttgtgtaactgagtattagaattctgtaattaacattaatctactgggtagcttggagggcaaaagggtgtgtgtggctcagtaatttcatacttgactgagttgtcattcaggaagataggcaatgaatagatcagtagtcttggaatataaatctttctgcaggtctcttagaatcttgcttgcagttactctgtagaggaaatgaattaaaatagaattcaagaatggggaagtgctagaaattgtcagtgtttaaaaattgtaactaatgacaaaaataaataaaaacactagcagtaatgtcgaatgggttgatgttaagcaaattttgtagtaactacgggataaaaaagaatgaaaaggataagcaacaagatttttgaaagatttgtgtacccgtatgtgtacacatgtgtgaatatttaatatggtggactagaagagcctagcctaagcaaatgggcaaatgtcttactataatttatgattttgatagaggttttagagtgtttatttataaaaatctttaagtttaccactttcagaattaagagcaggatatttatctgacatattataaaagataaaataatgtataatacagtctgggtaacacaaatcaacatttaaaaaaaaatcctggaagaatagaaaccacaccagaaatctaactgatcaaaacagttgtaccaataaatgattataccaataaatgtatgaaatcccctactaaggagatattttttagaaaggaaattttattaaaaaaataaatccataagtttgctacataaaagagataaacttaaagcataatggacagaggctaaataccaaagctttagctcagattatgtcaaccaaatgtgaatgaaaagagaggtttggcaatattaacaataaaataggatttatggtaaatgaattatggcataaggatcattttcatatagataattgacacatttactagtgaagagattaactatcaattatcataacaacaaagtgcatgaggcaaaaatagaactataagtagaactctgtaggcacatggtttgggggcgattttcacaggttagtagacaggaacatgaaccatatgaatagaataattaaagtcagaatttaagtgtcagtgaaggatatacaaaaattggtcctatatcaggtgaaaaaataattcaaatttaaaagaaagaaaatgtcacaggtttcatgtattcatcgctcagtcattatctctggttttaaccatctaagaatagacccaagtcgccaatatggagagcaaagcttcagctgtattattgaggccccagggagcatcactactaacaaatagggctcccttctaaggttaggttggagagtgcctgggaagtcagtccacagtggttgcctcctattgtttctttccatatgtggaccttggacctgcctgtaggtcctgaattggatttgcaaatctgcatggcaggttgcagcctgcctagcaaaactgggtatttataaatgaaaagccacagagataagggtatcctgacttaacatctggaagtaaggctctgtgtgccgttctgggtgtgctgaaacaccggaagccaggaggaggcctgaatctttttagggatccacagagtaggcagcaaggcagagcctgctttctttttgaggcataggaactctaccagtggatttcagcctttcaccttgtcttcatttgtggaagagtgattaaagagtcacgtgtgaacaaagatagttttatttcttcttttctaatcagtataccctttatttccttttcttgtgcgattgcattaggttgggctttcagtatggtgtggaaaaaactggggatatcctttttttttttcctgagcaggcatcttttaagatgctggtactttgaaaattctaatctcaaaccttaaactagattgttctctaaagaaaaggtatttcttaggtcctttatccagacaatgcagatgctgtatataggacccttagttgttgattgactgtcttcctgtgactggagaccacggtggtaagtggtttttctctgtgggttgatgcgagttaagtcagtgtgtgtatgtttaccattaatctaggataataaaaatcttgttttggcaggttgtggctcaagaatttctttcatttgtgagcagctgtcacttaacagcagtgagtagctgaaataaaattttattgttggcatagttgtgacaggcagctggagcttgcattttcttgtccctaattttatcttgttttacacctgcaaaattaagaaagaaagctatagcatgtagtacaattcatattggtgtagacctgaacatgggctttggagccagaccgcttggatttaaatccccacctcacttgttccctgtgtgatatctctgcttcattacccttttctgtaaaatgaggaaattttgtaggatactggattaagtttagtaatacacgtgtaaagaagtttgaacagtacctgtcacagaaatcaataatcgttgttattaataacatgaacatttggtcttctttcagaattgagcacttcgccagaatctacagtcaaaaaattggcatcaaaaaggaagttcttatgaaaaccttgtggggagattactatataaatatgaaggctaaaaagatcatgaagggtgatcaggtaatgtggtatatgtcccttttggttgttggtcatattcttgccctatgaaaacctatactgtaatatctttaataaatgtaattcagctttaatttatgcaggtgagttcatgagggattttttactgtatataattgggaaaggcttacaagtccatatacaggtattattcatacagaattcttagtccttttaagtatagtgagcaaagaactgccttttcttttctttcttttctttttttttcagaagaccaaaaatcttagatcttgggcacctgaagacacacattttgtgctgtgcatttgtttgtccctgtcaccataaagagatgtctcttctagacatccctgtatggttcacactgtctttctagtgtcagctgaggccttatctcactgcatgctggtcatcgtgcagtgtagatcgggagaggtgggtgctccctgaaaccccttctatagatagaggtggtgtaggaatgctgtcatataccctcaaaggatacttttcttggagctttgtgtttttaatgttaaaaccaggatttcataaatttattctcattgaaaatcatatacattgctttgagaaaatattcacaagtataaagccacagtaaacaaaaaaatcaaagccagcactgctagtagatgtttataatttctttcatcctttttacatagatatatacatccctcagttgagatatgctgtttatacaacgtagctgcccttttgcttttgtcatatcatgaacatcttcccttgccattaaaagcttttttataaacaatatattttaaagggagtgaatatagctaa

SEQ ID NO: 177 - DNA, 32744 bp, Homo sapiens
  source 1..32744: mol_type = other DNA
cttgttgttacgggtaacggaagtgtggcggcgttgggttgagcgggctttttggaagtttgtggcggaggtgaggccgaggtgactgcagagcggctcgcgaggtgctcgggctgtgggactgggcccctgggagggagcggttctgtgggggaaaggaggctcctgtcctgacttggcgttctggtattttctctggcgtggaaagtaggcgcgctccgctgtctcccgccgcctgcctcagctttcgcggttccctcctaggggtgtgcctcagtcggagccccttctgttaaattcttcccccttggccgagggtgagctcttacttctgagaaatttcccttaaccttgctttgcatttgttgtccggtcgcggtctccatcaccagctgcttcgtgttatagtttttgtatttgcgctcacggcttgttaactgaagaacccggaagggaaggccgcggcgtttcccgccggcggggctctgccattctcggatcttggcttcagatctctgatgctccccagcgtctcttggcaaggaatctacttcgcgttcagggaattcacagccacccgcctctggtcttacctctggttttaggatgattttagcaaatgtgcctaggttgatttaaacgtatccccctccgaagccgcctgccccttctggctggacacctttttaggttggtgtgtcctgtttgcatccggtagttcaaagcatgggatcttggagtccggagctggacagactcgggtttcacttctctctctgccacttggtagccttctaatcttgggggaaattccctaatctctgaatcccaaaagttgttcatctaaaatggggctaatattacacctacctagtaggtggtgttgtgggagtcatgttaatgaatgtaaagtgctgggttcagtgttttccctattataggggttcaataatttgttcaacaaacatttgttacctagtttgagctaggtactgtgctaagtgctggagatacaatgataaacaaaaccagctacggcccgtgtccttaggggacttatagtctagtgggagataacatttgttaatctgataattacacatgtaatattaaaaattggtgacagtatgtaagagagtttactggtgccatgagaggatgtactaggggaacgtttaacaacctatactgagcttttcttttcttttcttttcttttttttttgagacagagtctccctctgttgccaggctggagtgcagtggcgcgatctcggctcactgcaacctccgcctcctgagttcaagtgattctcctgcctcagcctcacaagtagctgggactacaggtgcgtgccgtcacgcccagctattttttttttttttttttttttttttttttttttttgtatttttagtagagacggggtttcaccatcttggccaggaaggtctggatgtcttgacctagtgatccgcccgccttggcctcccaaagtgctgagattacaggcgtgagctactgcgcctggcctagactgagcttttgaggagatgtggattgagctaagatctgaaggatttgtaggaattagtaataaaagattggggggcagtggatggaagcaggaatatttatttaagttccagatggaaacatgtggaagggcctgtggcagaaagaacttggagatttgaaggactggaagcaattctgcatggctggagcagagtgatgaaagggaggtaggcatgggtcagaacttgcaggacttattttatccttacttaagggttttggactgataaagcaatggaagccactgaagagctttaagatgaggatggcatggagggaagataagtcacataatcaggtttgtgtttcaaaaacatcactttagttgctgcgtagaagggaacaagttaggaaacgattgcagtagttcaggtgagagatggtggtggcttggggtaatgtgtcagtagtggagatggagaaaagtagacagatttgggagatatttagtaggtaacattgacaggacttggtaatggatgtggtgaaggatgaaggcaaagttgttaagaatgttacctaggtttctggtctgagcagctgagtggatgatggtaccatttatggagacgggaaacacaggaggaagaagaggaggaacagattttctttctactaggctgtacttcccccttctattttcatagctactcactgaattctatctgcttcatgtgcctccatttcatcccatcttttctgttctccagtcaccaccctagtacaggtctttatcatttccactaaaataacttccaaatggtctcttagcatttgctgtttcttcttaccttctccccactttaatctgcacaaagatgctaggttctgtttcctcaaacacttgcaatcttgtgagattgtcttttgctcaaattttttaatggttctcagtaatttacgaaatagaatctaaattccttaacctgtttacttccagcctatctttccagacttcctactcactattttcctacttggattctacctcagccattttactcattttcccccaaagaaatttctcatttcccgtatgaatgcctttgttcatgatacccttctccataatgtatacaacctggttgtctggactacctatatttaatctctaagttccagttcaagctttcctctgctgcgaaaccttgacatttaagaacacagttacatcttttaccttgttaacttctcagcttttctttctttctttcttcctttcttttttttttttttttttttgagacagagcctcgctctgtcgcccaggctggagtgcagtggcgtgatctccgctcactgcaagctcctcctcccgggttcacgccattctcctgcctcagcctcccgagtagctgggactataggcgcccgccaccacgcccagctaatttttttttgtatttttggtagagacgggggtttcaccgtgttagccaaaatggtctcgatctcctgacttcgtgatctgccctcctcagcctcccaaagtgctgggattacaggcatgagccacggtgccggcctctttttttttttttttttaagagacagggtcttaccttgttgcctaggctggagtactgtggcatgatcatagctcactgcagcctcacactcttgggctccccttctcacttgtttttataccatttaattggcacatagcatttatagtgctattggtttattcatttatttgtcaaatactttattacatgcttatggtaatatataatgtattacatacttgatatgctgttaaatggaagctttgttctaggtagtatggtgagtagatggtaacaagtgtgggcaaaaattatgaaaccacttgattagaatacagattcctaataaggcaattccagggaattttcaggattattttggttaggttaagaatcatcttgccactgagcttaagaagaagaagaaaaaagaatcagctacttaaagatagtcctaagtttgttgagcacccattgcataataggtatgaaatattcagttaacagggaaggaaaacaaatcaagtttgtttatttctggaatcttcacccacctctgacgtttttcccttgtagttctgtgatatgagcaacaatggaccagaagattttatctctagcagcagaaaaaacagcagacaaactgcaagaatttcttcaaaccctgagagaaggtgatgtgagtattaggaagcatgttctgctaaaagtaaatgtcaggcatgatgacacattcaaaggacatgtgagaaagaaaaattacgctgcttcttcatctactccccattcactgtaggagacaaggatttatttaataataatttatagatgtaaagaaattggggtgagggaatgagagaaatagactacttgagggcatttgtgaccaagtttaaacctgaaatagtttaagaatagaatgcttttacaactgtatttataaaagcaattagtatacttttatggtcctcagaacaatcctatttgatgataatatccagactatagttactgattgagacattagttttgcattttgatgcttctctgtatttttccgtaaagaaattaagtttataagcggcaaaatattttgaaattattagtaaaaattagggcctctgttttcactataagtgtaggattataaaatgggatagtaattgccttatatgttaggctgtttcttctccctaatgttctttctcagctgatatactgctcctttttccataagtgatctcatcctatccaggtccctgcctggaaaagaatccctcttcaaggtatatgtacaaacaagtaaagacattgagtatcatgggatttttttcctttttctgtcaattgatgagtattatgtttttaagggaatttctttgtgttaatgttgtagttattgaaggaaggtgcatcttagtgtgtgttatctgacatactaactaggaattgatgcagtgttgctctttgatttttttttctttgaaattatccaagattgcctttatagctattttttgagatgacttgttgcatgagttgtaacttgaatcattctatagacaagatttgattgaaactagcatttaaattatttatttaaagtttcatgcctcaaattgaaggcgtgaacactgtcaaattgaagacagtgttccagatgttttctgactctaggatagagtaatgctaatatttccctcatttttccattaatgcaaaatcagctttttggcagcaacattatattgtagtctcattgctcttatatttatttttgtatatgttgataagttgctaagtttcctttatctctgaagtccttttagaatccatgttaaaaactatatataggccaggcatggtgacttacacctgtagtcccagcactttgggaggattcctttaggccaggagttcgagatcagcttaggcaacatagtgagacccagtttctaaaaacaactaccaaaacaacaaactttatatctgttaactgtcaccttttttagattcatcttgttttactccatcaagatcattttgtatgattctgctgaccgtattaatcagctttttatcctctacaaatttgttaagcatgtcagtaatatatgcaggcagttcatttgataaaatgtcccacagaagatgaactcagagtaaaaaattataaaacacataaagaagtcctgtggcaagaaagactcaaacagaaatgggaaaattcatattcaaggatttagagcaatctgaaaaaaatctttaattatttaacacaaatacttaatacagtatttaactttatttatttaaaggtgggatctcacccttgcacaggctggagtgcagtggggcgatctcggcacactgcagcctcaacctcctgggctcatgcgatcctcccacctcagcctcctgagtagctgggagtacaagcatgtgccaccatgtccgactaatttttgtatttttagcagagatggggtttcgccatgctttccaggctggtcttgaactcctgagctcaagcaatccacccacctcagcctcccacagtgccgggattacacgtgtgagccactctgcctgacctagtatttaaaatatttgaagatgtaaatgaaggaatagaactcacaaaataagggatggatttagaaaacaatgaaagacaacttcttgaaatgaaaacctcagtaggtggtttaacagtagacaaaacattgctaaagagaaaattagtaaagtggaatacagagctgaggataactaaataaagcacagattgtaaagaggtggaaaatataaagaatatttaaaatatatgcagagaactttgataagaatatattatcttcttaaacacatagaatgttcataaaaattaatcacatgtcatatactagagcacaaagaaaacatgggtaggtcccataaggtagaattattacaaactattctctgtgatcacaatgcaataaaactggaaatgaaaaccgaaactaaaagtcaaaaagcaaagacacttttacttggaaattaaaataccttctattcaaccattgtggaagacagtgtggcgatttctcagggatctagaactagaaataccatttgacccagtgatcccattactgggtatatacccaaaggactgtaaatcatgctgctataaagacacattcacacgtatgtttattgcggcactattcacaatagcaaagacttggaaccaacccaagtgtccaacaatgatagactggattaagaaaatgtggcacatctacaccatggaatactatgcagccataaaaaatgatgagttcatgtcctttgtagggacatggatgaagctggaagccatcattctcagcaaactatcgcaaggacaaaaaaaccaaaccccacatgttctcactcataggtgggaattgaacagtgagaacacttggacacgggaatgggaacatcacacaccggggcctgttgtggagtgaggggaggggggagggatagcattaggagatacacctaatgtaaatgacgagttaatgggtgcagcacaccaacatggcacatgtacgcatatgtaacaaacctgcatgttgtgcacatgtaccctagaacttaaagtataataaaaatatatatatatataaaaataaaaaaataccttctaaataactcttggaggaaaagagatacaaacaaattacaggatttttgaagaataattacagataacaaaaatactacatgttaaaaatccatggaataatgttaaaaacaagtgtttaacaaatgaaataatgaaatcaatacaaatgaaataatgaaaataaataaattcccaactcaaaaacctagaaaaaagagaaagtaaacaacaacaaaaaaacacaagaaactactaaagataaaagtggaaattaataaagtagagaacagaaaaatagtggatcaaattaatcaaaatcttggttctttgtgggggaaaaaaacaccattaattaatataataatcaaaacagtggagtaaaaacatgcacaaaatgagaaatgacaagggagaaatactgttaatacagagaaaatctcaaaaaatactgtgagactacagtagattcctgtgcaaataaatttgaaaacctagaggaaatggataatttcttaggcacgtacagtttaataaaattgagccaatttgagatggaaagcttaagcagaccagtttccatagaagaaaagagaaagttatgaaggaactacttcgtacaaaaacaccaggcccagatagattggcaggaaacttctgtcaaacctttagagatcaggtagatagtcctaatgctacataaattgttttagagcataaataataaaggaaaacttccaagttctttgaatgaagcaagtataacattgaattaaacaaatataacattgatttttttatgctatctttatcaggtataaccttaaacctcataaagatagcatagaaaaaagaggatatagactaatgtaacttacgaatattgatataaaagtcttaaatattaggggacagattgcaacaccacatttaaaaaaagtacaccatgatcaagtgggatttaatagcaggaatacaaggttggttcagtatttgaaagtatattactataaagattatacgattatcttcatggatcagagaaagcctttgacaaaattcaacactcattcctaataaaagcttgagaaaaatcagaatgggtggctgtttcctttacatcataaaatgtatatatctaaattctagagtcagcatcttagtgggaaaccatagagacatttcctctaaggccgggaacaaagcaatgatgcctactgtctccattactatataatgttctgattggctagcctatgcatttaacctagagaaaacaatcacaggcataataatggaaaaataaaggctgagtgcagtggctcacacccataatcccaacgctttgggaggccaaggtgggcagatcacttgaggtcaggagttcgaaaccagcctggccaacatggtgaaaccccttctctactaaaaatataaaaattagctgggcgtggtggtgtgtgcctgtaatcccagctactcgggaggctgaggcagaagaatcacttgaacctgggaggtggaggttgcagtgagcccagattgcaccattgcacttcaacctgggtaaacaaagtgagattccatctaaaaaaaaaaaaaagaaaatataaaacgtctctctttgtagatggcatgatagtatacctggaaaaccctggagaatctgtgataaaaccatctataaacgaattcatcaaggtagcagaatataaaattaatatgcaaaaatcagtagcattcatacataatagccagttagctcacgcctgtaatcccagcactttgggaggccaaggcaggcggatcacctgaggtgaggagttctaaactagcctggccaacatggtgaaacctcaactctactaaaaatagaaaaattagctgggcgtggtggtgcacgcctgtagtctcagctactcaggaggctgaggcaggagaattgcttgaacccgggaggtggaagttgcagtgagctgagatcacgccactgtactccagcctgggccccatttacaatagcaacagaaaagttaaaacaggaataaacctgagaaatgtccaaaacccatgcgaaaaaaaactatgaaacacttctgaaggacaaagtagaaaactaagaagatatcccctgttcttgattggggagtctcaacatcacgaaaatgtcaattcttccaaagttaatttatcaatttaataccagtaaaaatcccattgagctatatatataagttgactgcaaaattcatatagcaaattgtacacacagggatagttagggaaaagctgaaaagagctctgagagaggattaaccatagcagagactaaacaccacaaaaacttttataaataagagtgcagtactggtacatgagtagataaacagaaacggaataggatacaaagaatagaataggtaatgcataagaatggaaagtctcaaaatagacccaactacaagtaaaatctagtatataataaaattacatcttaaaacactgaaataaagataatctttgacaaatgatattggaacaactggatggacatttggaaaaaatagatgaaattagatgtgtttctcatattcaagagaaagctccaaatgaatcagaaatttaaatgtaaaaaacaaatctaaataaatgttagggctgggcacaggggcttatccctgtaatcccagcactttgggaggctgaggtgggaagatcgcttgagccacgaggttcagattacagtgagctatgattgtgccactgcacttcaacgggtgaaagtgagactctgtctcttaaaaataaataaataaataaataaataaataaataagtatatgttagaagaaaacatggatgaatttctctttaagctcagtgcagtgaaaagctttctaactgtcatacaaagtatagatgcaagaaaagataagtttgtctacatataagttaaaaagtttgtgtggccagaaataccataagcagagtcaaaagacaaatggcaaactgggaaaaaatatttgtaacgtatcacagaaaaaggattaatatccctaattcataaataacttgtgggggggggggggaagataaactgtattttaaaaaggcaaaaaacatgagaataatcactaaaagatatataaaaatggccttaaacataagaaaatatgctcaacttcactcataataagagaaaaataaaataaaagatagtgatccacctgccttggcctcacaaagtgctgggattacaggcaggagccaccatgcctggccccatgtatatttttatgtgtataaacatgcatacatttcctggctctctccaatgaaagaaccatgaagcaaagatgccatagttgctcggtgcggtggctcacgcctgtaatcccaacactttgggaaactgcgtgggtggatcacttgagtccgggagttcaagaccagtttgggcaacgtggtcaaatcctgtctctataaaaaaataaataaataaattttaaaaagatgccttagtaacaacaaacacacccatcacctagatctttgctgtttcataaccattcctcactcaagggaaccagggctcttcagagaaacggataagtttatgcgtgggcaggatggatacaagatgaacctggaacatcttgctataccagaaagtaaagaagtgctcaaaaaagacagtgggggcgtgtcacaaagacagaagagccagcttgaagggtttccctttggccaaatctgggactatttgagcatcaaaataagttcaataatgaaccattgaaaaatacagagatttataagtccatactcataattaataaataaattactttgggagttcgaggacggaggatcacttgagtccaggagtttgagaccagcttggacaacatagtgagaacccacctctacaaaaaaataatttaaaaaattagcatggcatatcagcacacgcttgtattcctagctaactggagggttgctgaggcaggagaattgcttgagcccaggagtttcaagttatagtgagctatgactgtgccactgcagtccagccagggtgacaaagaagactctgtctctaaggtaagtaaagtaagtaaatgaatacatgggtagaaaggagttctcttgcttacagtgcaggagttggaaaatcattcctttgcaattgtaatggtaaagattgaaccagacaagaaataccaatggatgttaaatccagggggactttaaaaacattgatacgatacaattaatgaagctaagaaccttattccaactctccccagtaattatttcactaatgttctctttatgttccaggatcccactcagcatcctacattgctcttagttgtcatttccccctgatttcctacactctgcaatagttctcagtctttccttatctctgttgatcatgatagccctgaggagtattgattagttgttttgctgaatgtgtctcatttagggcctgtttggtggtgtctcatgattggaccaatgtcttgtatccctggcataaggaccacagaaatggtaccatgccctttttagtgtatcaaatcactgagctcttgatgtcagtgttattcctggtgatactgactttgataacctggtaacagtggtttctgctgggcttttccattttacaggaagaaaattagatgaggagcaagatatttgcatgatcttaaagtgtctccctataaattgcttactggtggcaaagggacagggtgggggaagtaattataaagtgggatcagaatatcaccaatgagggacagatggacatcatgtgcttcctgatgtgatactccgagaatgacatgatatcacctgtgttcttgtgagaccgcataaactcaatctagccacaaggaaacatcagacaacacaaaatgaggaatgttctattttttaaaaactaaaatttatttggattatgctgttaacttggtagttacagtctgccaattaattttaaagccttctgaggtaacagggatacttaaatcttacttgctctatttctgagttttaaaatgtagtaaaaagcataactgaacatggtcaaaagaaagactgaagatcacataagtggaaggaggaagaaggggagtagaggacagagtcaatagaagaaaattaacattcgttgagtacttgtcgtgtgttaggctctgtgcaaattcttctcccctttatctcagtcctttgaggtggggaaatggacacacataacagattaagttgcctgaggttttatagctagtaaatggcatagctaggatttacatccagggcttctgattctggatccagctttttttccctcttcctatgccacactgctttctgttgaaactgaactatttcaaaaagagtcaacagcttctcagccttggcagtgctcacgttttggctcggataaatctttgttgtggtgggctgtccagtgcattgcagaatgtttgatagcatctcttacctctacccactagattccaacagcatccttccagttgtgacaaccagaaatgtttctagacattgtctagtgtcccctgggggacaaaaatcactggttgagaactgctgctctaagggttatgtcaaggaccaagtactctgttggaaggtataggcaagagtagtcagatacttctttattatatatttaatagagagatggactccagctagaaacaccagcctcatgtacttgtggaagagagagtttattgttttattagtcttggcttctgtgacacctctctctcgagattatcctccaatgttattgacttcactttctccattgtctttgctggcagctgcttctctttttaatgactgactcttggtgtttctcttctttatattctttcctggatggtctcatctgtttccattgatgctccacttggcatatttcattgtcatctatttggcacttccacttggatatctcagagtagtggttctgagcctcacagcagacccgaatcataaactgtgggtagatcctggaaatttagtaagctctcagggtgatttagatgcttccttaatcccaaattttcagcacgtaaacagatggtgccactatccaccagctagctgcttaagccagaaatttaggaatcctccttgatttctttcttttttgttgtttttttttgatatggagtctcgctctgtcacccaggctagagtgcaggggcgtgagctcggctcactgcaagctccgcttcccgggttcatgccattctcctgcctcagcctcccaagtagctgggactacaggtgcccgccaccacgcccggctaattttttgtatttttagtagagacggggtttcaccgtgttagccaggatggtcttgatctcctgaccttgtgatctgcccacctcggcctcccaaagtgctgggattacaggcatgagccaccacgcttggccagatttcttttccttcatcaccaccccctacttcccttccaaactaaggaatttctattcttagttctcaaatatttatcttagatctatctacttttcttcatcgcctgtattagtgtgctagggctgctgttacaatgtatcacaaattgggtagcttaaatagcagcaatgtaatgtttcacagttctggagactagaagtgcaagatcaagtgttgtcagggttggttccttttgagggctatgagaatttgttctgtgtctctcacctagcttctggtggtttgttggcaacctttagcattccttggcttgtatcacctgatatctgctttcatcttcacctgacattccccctgtttgtgtttctgtgtccagagttcccctttttataagggcattagtctttggattaggacccatcctaatgacctcaactaatctcacctacaagaagagcccaatttccaaataaggtcacattctgaaatactgggggttagagcttcaacatatgaaatttggggttgtggggaggacacaattcaattcataatgcctctattactttggtctaggccactgtcatctctctcttaaacatggtagcagtctactaacaggtatccccatttcactcttaaacccccataactcattctccacacaaggagcaaggatgatttttgaaaaatctatcatcccatttccttcttttctctttagtaacttccgttgcacttagagaaaagctaaacttcctaccatggcctgtaagattcttcataatctggtcctttcccgtttctcttcaaactcatcttctactactcttttctttattattctccagccatgttgatttttttttttttaagcaaggctttggcctcaaatatgccaagttctttgctgcttcttggacattgcacgtgatcatacttccatctggaatatccttctctaacgcctttgaataattagctccttcttgtccgccaggtctctacttaaatgtcacctacttctgagaagcttccccttactaccctagaggaaatttccttcctttcctcacttattgtctatctcagcctcttatttggttcttttacaatttttttctgccatcctttcccctcctgctctgttatgaactctgagtcaaattactatgtctgttttgttcatctttataacatgcctaaggaaaataacatgctcaaaaagtatttgttggatgaatgtatgttcccaacttagtgctaagttataaacataaatgtttatagaatgagtaagaatagattttagtcttgacaatccaggatcatattaagatataccctcctctgtctaaaaattatggtgtttgtaatacttggcgtctctgaatgatctgaacgtgacagaagagtactttttcatattgagtgtttaggtcattggggtaaaagactgttgccagagacttgtacctttttctttctttgcagttgactaatctccttcagaatcaagcagtgaaaggaaaagttgctggagcactcctgagagccatcttcaaaggtaataataattaatgtcacttctgtctgtctcctgcattcattggtagatttgtttagttttcgtacttttcttacggtttgaagccccactggaacattttccatgttttgaggattctacagaatcaactacagcagcagtttcctgtctagtggacttaagtaattttactgaagggagtttgaagtggctacctgagattgcgttgctgatttgggggcctataattacagaatgtgcttttcgtaaaatctgctttggtttacttgtgcttttaagattgtggagaagagaacagcaatgtttaatacataatccatgcttagcaaggggcaagtaacctctggggtttaatgaaatggggtatcttaaggtgccttatatagagattcttcatgcccgctgagacgtatttgttttcttgtcttgaacaagggctagtttaaattgttgcagattgtgatttatagtggttttataaattctggtaggataaaattttacaaggcaaaaattaaaagtgtctttggactcttaattaggtatgttaacttggtttatttttcttcccccaagtaaattagatctctgctgcaagggtacaaaaacacatcttcctattcatgaaagaactttcaagattggttgagtcaacctgtatggaaacttgctaaatattttatagaaatatcagagaaaaggaaataattaaagatcaatagcaactgcctacgtacactactactaaatggaagagcaattctatggcttttagtatattcagagttgtgtatccattaccacaattgattttaaaacaatttccttacccctgaaagaaggtttgcatctcttagatgtcacctctccaaacccctagtccattccagtcctaagaaaccacgaatctactttttgtctctacagatttgtctattctggacatttcatttagtggaatcattctatatatggtcctttgtgactgacttctttcgtttataatgttacaaaggttcctctatgttgtaatatgtatcagtactttatttttactgctgaataatattccattatgtggatatacaacatttttccattcatgagttgatgaagacttaagttgtatctattttctggccattataatactactatgaacatttgtgtataaatttttgtgcggacatgttttcctttctcttggatatatatctaggagtggaattgccggatcatgtggaaactcttatgtttaactgagaaaccgccaaactgttttccaatgtggctggattaggatgccaattttttcacatcctcatcaacacttgttattatctttttttttcagttttgatttattttcatcactttttctacatgatccagatattttaaaatgcaaagaaaattaactttaatgatatgttccaggatcggcactaaaaaaaaattttcagactgcaaatgaattatacaaatgaaaatatcaaatggagatccccttatccaaatgaaagcactcaacttattaaaagttcacaagtatttgtatagagcacattaaaaaagtcagcttgctaaatgttttgattttaaagaacgattgcagaagtctgaagaaaatagattagttattaaatttgggttactggacttctcaaaagctgtaagacctattagaaggttacttcatcctgtaattattaaaataataggtagatgaagaaaagatgacattttagtccctttattttggctaaattaagcactttttcaaagcccttaaccattgctgttctaagcaccgtagtaatcagtcgtttgataattctgtttttttgtatttaactacaaacctgttcgtttttcctatttacctgtcaatgttgtaagacttgtttctgaaccccctgtttaaaacaataaggttccccctgctctgaggaagctggaacacttaggagacgtaagatatacacttgttgtatccagttggtggaatcgggggatttgcagaaagaaatagcgtctgagatcataggattactgatgctggaggtaagatggcaaacaaaaacttttatttgggggtaggtttttgagggtttgtaatttgttgagggaaggaaaacttaagtgcccaacctagcatagtccttatttatgagtaagacctgttgttaaaaaacaaagaagcaggccgggcatggtgactcacacctgtaatcccagcactttgggaggctgaggtgaggatcgcttgagctcaggagtttgagaccaccctctgcaacatggtgaaaccccatctctaccaaaaatacaaaagaaaaaaaattagccgggctcgtggcgcatgtcagtggtcacagctacttgggaggctgaggcaggaagatcgcctgagccagggaggcggaggttgcagtgagccgagattgcaccgctgcagtccagcctgggcagcagagtgagaccccgtctcaaaaaaaaagcagatgaatgggttataatccacttaggtgtatatattacatttctggtaccatggacatatatctctttgaagagctggcatatctgaaaacatcagggaaccgatacaggattctaacttttgaagcccttcacaattataactacgtaccagacagagcagaatgattccataaatcccttatgggaccagttctggatctcggtcaattcatttatttcagcaaaagactttatttcttagaaagatttatcaaacattggatttctgcttgagatttcctttatcctgtgaacttttaggctcaccattttccaggaccattattggttgaattagccaatgagtttattagtgctgtcagagaaggcagcctagtgaatggaaaatctttggagttactacctatcattctcactgccctggctacgaaaaaggaaaatctggcttatggaaaaggtaattttcttccgactttagtggctttttctctatgcacataatcaaattcattgctcagtatattttgcatttctaggtgtactgagtggggaagaatgtaagaaacagttgattaacaccctgtgttctggcaggtgagtcttgttaatatgtataactttcttaggaatacaagtggcggaaaaaaaaccactttatttcaggaatttatgtctggaggttttaagtccttcttttttgttgtttttaatataacactataaaactatttagtctgcaatgaattagtgagaaagaaatgatttactatattctgtcctctaagactgttcatatagttttatttgcttgactgtatcttcttacagcaatttagtgtgttaagatacacataattaaatgttaatttagtgtgtttaatgctccaatctaagcattattggagtctcaaggtcgtgaaggctgggaaagtcaccctgctgctgcatcttttctttttttcttttttcttttttttttgagggagtagaatatacaagtgatgtatcctttaaccagtaattgtatttctgggaatctacattaaagaatgactgcaacatacaagaaaatcctcacatatgaacatgttcaacacagaaatttgtgaccagtataagcatacagtaatagagacatgtaaactatgtaagttaaggtagagccactccatgacatttatacctattaaaagtgaaatgtatacatcaaagatgaaaaattctaaccatataattaacaaagagattactatgttatataatactgtgattgcgtgtaggtttgttaaaaagaacaagaagggaatacccaagattatctaaaccagagataattgcttttatggttccttacataagatcccttacataaatcattttaagcatgtatttgtcaattaatttgtttttaattacacaagagtttattcaatacatactgtaatataccttgcattttttatttaatacaactgtccatgtcagcatatacaactctacatcattctttttaatggtttgcagtaatctattatttggctaatctacaattgtcagattatttggttatttccagtttttgtgctattacaaagagtgttgcaatgaatgtcttttttaattttaaatagagatgggaatcttgctttattggccaggctggtctcttgaactcctggcctcaagggatcctcctcctttggcctcccaaagtgttgggataataagcatgagccactgcacctggcctgaacatctttatatatctagatgaccttttataagcatgtacatggcatatatttcaaatagtaaattgggtagatctgtgattatgtgcatttttaaagttgataactactgccagcttgtcatacattccctaaaacggtatgtgaatagagtttgttttccacaatctcaccaacattgggtatcatcagaattttgattttgcgagtcgggtaggttaacaactgctatttcattgttttaaatggtatttatttgatcttgtttctcggtattgcaaaatcaaacttgaattggccctgtttttttgtcctcattaattttacaaagttatatctaaataagttgtaaagaaataaactttgtcattttcttctaccaggtgggatcagcaatatgtaatccaactcacctccatgttcaagtaagcatcatcttttcccttttctttgtgtatcctgctttgtgaacttacttgctagaaattaaactatagcaaacgtaaacatcactctctcctgattgtaagaatattagtagttatgttttctgttacagattcacagattccctcctcactcctgcctcctttttggctttacttacttatttaaaacataactttattttttttataagaatgactttgcttaggtaaggttattggttcccttaaaggttcttcattagagaaaaatcaaaagggacagttataataatctattatctctttaattctctgctcccaagtttcatttcttaaaatatgtttaatggaattttaaccactgtaaagccctgaattgaatttctgaaaacaaggcagttagacactgtctatagcctttagaatctttgatccacagggatgtccctctgactgcagaagaggtggaatttgtggtggaaaaagcattgagcatgttctccaagatgaatcttcaagaaataccacctttggtctatcagcttctggttctctcctccaaggtacaaatggaaaattgtttctccttagttctggtggtatgaccagttatgaccattcaacttattcatacccttggtttatatagcagagcaaacatagccgaacatagatgctttcatttcacgtgagcaaacatagccgaacatagatgctttcatttcacatatagtggtttggtctggtaaaaggatcatacttctcatccaaggaaaacatgcattatctcttgtattgccacattttctttgcggaggtaaaagggataaagatctcagaaagggtagactataggccccataaattcttacagtaagaggtatttcaaatcttgtttcaacatgaaagtgttctatacattcttagtttgagtctaagtcatagattatttatttaaatttgtactggagaattctttaagctgaaaactactttgaattcaaattggttattttgctgttaattgggagaccttaccaattttgtattgttttcagggaagcagaaagagtgttttggaaggaatcatagccttcttcagtgcactagataagcagcacaatgaggaacagagtggtgacgagtgagtaatatagtgtagaaataaagatcatttttacaaattcatcttctcattgtgtattttagctatttcattttcttctctctcaccgcctaccttcacctcagcacaaaacttttctaatcttctcttagctactcagtaataaagagaataacatgatctcttcagctctttcattttcacctttccaggaaaataattgtcctataagctgcaagtttaaaacctatttattaggtgtcagctctctgccaggaactgtttagccttggggctaccgtgctgaaccagtcagacaatgtccctgctcttgtagaacttcaattttagtgagaagaggaaagaaaataaataacaagaaaaatgttatagtaaaagtgctatgcaggtaattcaaatggatgatctaccactgacagtatagctactttagattgggtcagggaaaacctctctcagatgtgctattttaactgaagcctgaatgataagatccataatatatagatcagagaacattctcaggtagggaaataatacaaaggcagaagaacagtgtgacatgtctgagaaagaggattttgggttttttttgtttcattttgttttgtttttgagacagagtgtagctctgtggcccaggctggagtacattggcatgatctcagctcactgcatcttccacctcccaggttcaagtgattctcctgcctcagcctcctgagtatctggtactacaggtgcgcaccactacgcccagctaatttttgtatttttagcagagacagggtttgccatgttggccaggctggtctcaaactcctggcctgaagtgattcaccctcctcggtctctcaaagtgctgggattacagacatgagccactgtgcctggccaaggatttttgttttttctttctttctttttttttgagatggggtctcactctgttgcccagactggagtgcagtggtacgatctcggctcagtgcaacctccacctcctgggttcaagagattctcctccctcagcctcctgagtagctgagattgcaggcatgcgccaccacgcccagctaactttttgtatttttagtagcgatggggtttcaccatgttggccaggctggtcttgaactgacctcaggtgatccacctgcctcggcctcccaaagtgctgggatcacaggcgtgagccaccgtgcctggccggattttttgttttttaagcaaacatttgtaggatgttcattctgtgccaggggctattctaagcactttaaacctcacaaccctattttacctctactttatggatatggaaatcgagagacaaagaatttagttagtttggcttgagcaatttattagaggtggtttcttatttcttttttttttttttttttaagagtgtcttgccctgttgtccaggttggagtacagtggcaccatcatagctcactacagcctccaattcctgggctcaagtgaccctccagcctctgcttcccaagtagctgggactataggcacgtgacaccaagcctggctactgttttttttttttttttttgagatggagtctctgtcacccaggctggagtacagtggtgtgatctcggctcactgcaacctctgcttcccaagttcaagtgattctcttgcctcagcctcccaagtggctggcattacaggcacccaccactatgcctggctaattttttttttttttttttgagaggaagtctcactgtgttgcccaggctggagtacattggcatgatgtcaggtcactgcaaactctgcctcctgggttcaagcgatcctcctgcctcagcctccctagtagctggggttacaggtgcgtgccaccacgcccggctactttttgtatttttagtagagacgggctttcaccatattggccaggctggtctcgaactcctgacctcaagtgatccgcctaccttggcctcccaaagtgctgggattacaggcgtgagccactgcacctggcccaagcctggctaattttaaaaattttttctagagatggtctcactgtgttgcccaggctggtcttgaactcctagcttcaggcgatctcctgcctcagcctcccaaagtgctggaattacaggagcaagctgccacacccagcagagaaggtggtcttagatactaaattagaataagctgacagagaatcagattttggagaaaataattagctcacttttttttttttaattagctcacttttgaccacactaggtttgagatatatattagggtcccataaggagatattaagcaggtactctggagtagtagggagagggctgaactggggataagactggaagggactaaagccaagagactggatgggattatcaagggaaagcatgaagaaaaacctaagactgagttcagaggcattccaccatttcaaggtcaagcactttgggaggccgaggcaggcagattgcttgagctcaggagttcaagaccagcctggatgacatggtaaaaacctatctctacaaaaagtacaaaaatagccaggcgcagtggctcatgcctgtagtcccaactacttgggaggctgaggcaggagaatcacttgagctcaggaggcggaggttgcagtgagctgagattgcacctttgcattccatcctgggcaatgggagtgaatccttgtctcaaaaaaaaaaaatttttttttttttttttgagaagaggccagtgatgatgccctggaagctaagagaagaaaatttttcaagaaagaagtagttaattgtgtcagatctgagatgttaattaagatgggactttattgtttttgacaacttggaggtcatttgtgacccttgaaaaaataatctaatgttattgtgggggtgagggtagaaagaggatagaagcctgattgaattggattgtactgggaagagattgtgagataaaaaaggagaaattatgactatacacatttattttacgaaatcttgtaaaaagaagcagagtctgggcacagtgaatcgtgcctgtgatcccaacgttttgggaggctgaggcatgagaatcacttgagcccaggagttcaaaaccagctgggcaatatagtgaaactccatctctaccaaaaaatagaaaaattagccgggcatagtggcacatgcctgtagtcccagctactcaggaggctgaggtgggaggatcgtttgagcctgggaggttgaggccacagtgagctatgatcatgccattgcacaccagcctgagtgacagagcgagaccctgtctcagataaatagatggatagatagatagacagacagacaggagcagaaaattgggcagtagaatttctagtaaacacctgccttcagtgattgtatgagtttagcttgagttggtctacttgctcatcgtagcacctgtccttgtctctcactcaaaaaccatagctcataccttttttttgttgttgttgagacagggtctctctgttgcctaggctgaagtgcaatggcacaatcttggctcacggcaacgtccaccttccgggctgaagcaatcctcccacctcagcctcccaagtagctgggactataggaatgccaccacatcgggctgatttttttgtatttttagtagaggctggtcttgaactcctgggatcaagtgatgcgcccgccttggcctcccaaagtgctggcattacaggcatgagccactgcaccttatagctcataactttctgttgaatcttttaggctattggatgttgtcactgtgccatcaggtgaacttcgtcatgtggaaggcaccattattctacacattgtgtttgccatcaaattggactatgaactaggcagagaactcgtgaaacacttaaaggtagcatcaaacttgtaaggtgatctgggtctcttttgaatgaaagtgtttgaacttaagccactgttatgccagttaatgacaggaaataaatactgtaaaatgaccctgggtgtggaggatctctttttttttttttactttaaaagtggaaaatacatgatgttaccacactcccttttttttaatgtcctcactttagcagtataccacatccttaagcaagccagaaagttctatttaaaaaaaccctcaaaagttctaacgcaaaaaagtgggaaaaaaggtgagaactattcagcaggaaactcaaaatctaattctaagtagattatgtgtcactgtcttatgtgaccttcagctatggcctctgctttctcatttatgaactaggatgttgcatctagtagtatatcgtggagttgtgtgatgctaagtcattcatcatgaagtatttgtaaagcagtaaaataaaactcagaagtgttttaaactatattaaaagtagtgtacagatatatttgttcctccaactttttagtttgaaaattctaactcagaaaagttaaaacactacatagcgtgaagaacacctatgttcccttcacctagattgaccaattattagacactttgccacatttacctcactttttctctcatacatattctttttctgaacatttaaaagtaagatgcagaaacccaaaccctaacacttcaatgcctgaatatttcagcatgctaagaataaggacacattatcacaataccatcatcacatctaagaaaattaacaataattccataatattatttaatttatattccctattcacattttcacagttgtctctaaaatgtcttttgcagctgtgttttttttttcctctgctccaggctctcatcaggcttcatgcattgcatttggttgttctttctttctagttttagactgatttttttgaagcatcagcccacttgtcttgtgtaatgtcccacatttttggatttatctgattgtttcctcacgattgggttcaagttaaacatttttggcaagaatacttcgtaagtgatgtgtacattttcttgcaagggccagatactaatattttacactttgcaggccatgcaggttctgtcacaactactcagctttacggttccagcaagaaggcagccatagacaaaatgtactaacgagtgtggctgttttcccatttatggacactgaaatctgaattttattccgtttttatattgtgggatattattcttcctttgatttgttttttttttttggacagagtctcactgtgtcacccaagctagagtgccgtggcccaatcttggctcactgcaacctccacctcccaggttcaagtgattctcatgcctcagcctcccaagtagctgggactacaagtgcgtgccaccacgcctggctaattttcgtatttttaatagaggtggggtttcgccatattggccaggctggtcttcaactcctggcctcaagtgatctgcctgccttggcctcccaaagtgctgagattacaggcgtgagccactgcactggccttcctttgattttttttttcccccaaccatttaaaaccataaaaaccagtgttagctcatgggttgcacaaaaacaggtagtgggttggatttggccaacaggctgtatgtagtttgccaaccactgttctgtgcattacatcaggaggaacatagtattagctaccttactatttgtgaggctgaatcatttgcttttaagaaaatgaccattgattttcttcatttataggtacatatgtatccctttgtattagaaagaaatctataggatcatagttcgagatagtattcaaaatccttttcccaacaacatttcacagaaggttttcgttttcccatctattgatgattcttggcctaaatcagtaattataccaggaattcaaattttatatcttattttttttttcttttttttgtcctcacaatctgttcccaaggaattctaattttaattagaaaattttaattgcatctttctttcggcattattagctggcattcttctgtaaaaagagcctctcctttccctattgttttgaatatcattatgcactcatgaacctttttaaattcaatgtacttattattcattactgtcattatttgttttgagcacaaaattacccaaatttagccagttggatccttcaagtcagcttatgtgttcttttgatgtgaccccatttagtctttgagcttgtggcatgatatgcccaaggctcaccatagtactttctttgccccatcctgatgctagccatgtctctaaaaagccctgggtcccttctgtaggaaaggatatttaaagaccataatctgagtaggctttaaaacttctttatcttctctgtatctgttcactctttttttaaatttaggttcgtagtaactatattgctggcctttttaccagctttatgtattttgatccagtctgttgttttctttttgttttccatttgattgctgttttattttacattttttttgttttactagtatcttttctaggccttgaaaatgtattctttaaactttttgaggcacaatttacatagcacaaaattattttattctaagcatgcaatccagtgattttttttcataaatttacctagttttgtaactgtcactataatccaattttagaacattttttatcaccctgtaagatcttttatgcccatttaatctgcattagcactcccagtcccaggtaaccactaatctactttctgtctctatagatttacctttcctagatattttgtataaatggaattatatgatatgtggtcttttgtgtatgtcttctttcattaagtgtaatgttttcaggattcacctgtgttgtagcgtatgtcagtatttcatttctttttattgttttgtttgttttaggagacatggtctcactctgtcacctagggtggagtgcaatatcatgatcatggctcactgcaccctcaaactcctggcctcaagtgatcctcccactgtagagttctgactagctaggaccgcaggcgcacaccaccatgcctggctaatttgtaaacaatttttttaagagatggaggtcttgctgtgaactcctgacctcaagtgatcctcctgcctcagcctcctgagtagctgggattacaggtgtgagctaccatatcaggctcatttctttttattgttgaatagtattccattgtgtggatatatatgagttttgtttagcagtctcccagctggtggacatttgaattgtttctactgtttggctattacaaataatgctgccactaacattcaaatgtaagtctttgtgtggacatacattttatttcttttgtgcatatatccaggagtagaactgctggcttatatgagaaatttatgtttatatttttaagaaactgcctgttttccaaaacggtatcattttacattcccactatcactatgtgagggttcctatttctctgtgtcttggccaacatttgttattgtctgtcttttttattatatccattctaatgggtatgaaacagtacctcattgaggtttaactttgcattttcttaatgactgatgataattgagcatcttttcatgtgctcattaactgttctaataccttctttggtgaaatgtctattcaaatcttttgcccgttttttgagtgtgttgtttgtcttcttaattaaaattctttgtatattctactgacaagctcttttttattttttcaataactttgttatgaatggtgacaagttctttatcaggtatataattagcaaatattttttctcagtctgtgacttgtctttttattttcttaatggtatcttttgaagtacaaaagttttaaattttggtgaggtccagtttatcaattttttcttgtagaaattatgcttttggtattgtatgtaagcaatctttacttaatccaaggtcttgaaatttttctatatgttttcctctaaaaatattacaatttttgctcttacatttggatttctgatccattcaaggacctatttttattttttattactattaaaaaatgttttttatgtctctcgagtcataaggacttttttgggggatgcagtggcgcaatctgagctcactgcaaccttcgcctcccagattcaagtgattctcctgcctcaacctcccgagtagctgggattacaggtgtgtgccaccactcccagctaatttttgtactttacaagacagggtttcaccatgttggccagactgatcttgaactcctgacctcaagtgacccacctgcctcagtctcccaaagtgctggcattacaggcataagccaccacacccggccaagggacttactgttaaataggctgttatacttttaagatgtatgtaatgggaccaggtgtggtggttcacacctgtaatcccagcactttgagagaccaaggtgggaggatcacttgaggccaggagtttgagactctcctgggcaacatagtgagacttcatctctccaaaaaaattaaaaattaaaaattaaaaaattagccaggcatggtatagtcccagctacttgggaggctaagccaggaggatccgttgagcctgggaaatcaaggctgcagtgagctatgattgcatcactgcactctagcctgggcaacagagagacccaatctttttttttttaaaaaaaaaaaaaaaagaaaaaagaaaatgtaagtaaatgacttccttttggttgctctcttctaggtaggacagcaaggagattccaataataacttaagtcccttcagcattgctcttcttctgtctgtaacaagaatacaaagatttcaggaccaggtatttttttaaaatgccattttgtttctttctgtagttggtaaaaaaaaaaaaaaaaaaaaaaaatcacagtaatctgtttttgttgtatccgttcctaaacaattttatccccttcctgccagcagcaaagctgcaataagacatgtatgtcccctctgttctctggggattgatggaaaacttttacaggtttttggtttattcctccgtttcctgttgtgtggtaagctaggtagtgaggtgggaataagagtggaaggataccacacagccccagttggaggaagggacaatttagctggatattcaccagcagttttactatgttgtagctttccaagagtaggttagttgcaaggatgaaatttacaatttttttcttatatgtgttccaggttgtgggtaatatttatattgacttttagccttttttcccccttttttcttaaggaaggcttgtcttcagctccttaaagttcccactgaatgtcataatttttgtaacatcttcatctagttaaaatagttgtcatagggatatatgtgaatggcagctcataggaacagttataaggttaagatttatagcatgagctatataatatttgctttattttcttatttctttcattctgttaggtgcttgatcttttatttatttattttttcatttatttttattaactatactcaaggtgcttgatcttttaaagacttcggttgtaaagagctttaaggatcttcaactcctccaaggctcaaaatttcttcagaatctagttcctcatagatcttatgtttcaaccatgatcttggaagtagtgaagaataggtaagttggtgaaccatatctcaaaaggtttataaggtgtttaatgttagaaaatgcaatgtgatatcatacttgcagcctgtgaggggaaactgatgacttaacagctgttgacgtcacacatcgaggttcattttcttaaaactggtagaggatactttttccctatggaaatatccttgaatctcaggccctggtttcttggccaccttgacagcaagcatacaaaactgaattagttgcttttgtttattccatgatattacaattctctattttccttttctttctttcctttttttttttttttttttttttgagacagagtctcactctgtcaccgaggctggagtgtagtgccacaatcttggctcactgcacccttgacctcctgggctcaagcaatcctcccacctgaacctctcgagtacctggtattacaggcatgctccaccatgcccaagtaatttttgcgttttttgtagagacagagtttcgccatattgcccaggctggtcttgaacttctgagctcaagcaatccacctgccttggcctcccaaagtgctgggattacaggcttgagccaccggtcctggccgtttcttttcctttttaaaggaaacagtctcactatgttgcccaggctggagtgcaatggctattcacaggctctattatagcacggtaaagcctcaaactcctggcctcaagtgatgctcccacctcagtagctgggactataggcatgtagccctgtgcctggcttggcctttcttcttttttttttttttttttttctgaagacgtaggaacttttcactatgttgcccaggctagacttgatcttctgggctcaactgatcctcctgcctcagcctctcaagtagctgggacaataataggtgcatgccactgcatctgactcatggcctctttttaaagtgagtaaaaaacattaagagttttatttactttgttgaaatttggagcgtacagttggaattcaattattgattagccagtttagagaaattcatttaaaaccacatggaaaacatcagtaactgtcctggtttttattttaatttcaggatatacattagctgttgtaacagtctttactatgtcatgctttcactgtgtattaaatatattttaaagtttcataatttaagcataatttatggtaggcctcttctaggcctggaattcttgtttattaatagattgaatttacatgagctttgcagtagggcaaatttgaaattagagtttattgtttgagtgttttacccattgttaggccttaaagctttttaatctttgtatctcattattctttttcctgaggtttatacttgtgtctccagtattttcccaacccaatctcttaaagttgggctaaagaaggaggtactcactaaccaggaaattcctggaaagcttcccatcttctggaaatctcaactgtcataggacttgaaagcatctccatgtataattagcctggagtgggtacttgccactgggtgggaccaaacctcagctgggagagatttggatagccttattagatcctctaaaataactggctggttagttacacatgcttgccccagtcagttaatgaacctttaaataatgcattctccattttatgtaattgaatttttggctcttcagagtatgaatattgttaactctgttaaagtcttataatttatccataactgtctacttcattctgtagtgctgcattataatttgttgcaatttaacaggtagatataatggataaaggttatattcacattatttccactgtggggtataacattaagtggtataaaaccaccaatgattctactcttttacaaaagattatttgtagttttagcttatgctgttgataccagatcactcatccatttatagtataaatatctactgagtgtcttttatatgccacccttgtgctaagcaatgtgggtaaaaatatgactatactatgacctctctcctagagaatctctgtctttggaggggagctaatttgtaagcctctacataagcgttgtcagtgctgtagggtaatagaagaggcagcaatgaacttctcatcatgaaatcttgaataggaatctttaatttttttaatactctctagcttctggattttcccagtattctgtgtgtcattggagaccacttgcctgctgttcccattatggtacatttaggaattcagaattctgtcagacgatgtgtgtaaagaaaaggtttatatgcagagtacgttgattatctaggtcaagtttgggaaatgtataacagggcaatgagtataaaggtaagaatatctcactaagtttttcttttttaactaagctttgtgttcttg

SEQ ID NO: 178 - DNA, 32744 bp, Homo sapiens
  source 1..32744: mol_type = other DNA
gaccccggcaagcccgcgcacttggcaggagctgtagctaccgccgtccgcgcctccaaggtttcacggcttcctcagcagagactcgggctcgtccgccatgtccgccgcagacgaggttgacgggctgggcgtggcccggccgcactatggctgtgagtgcggggctccgcggcgcgggggcttcgggctgggctaattgcagacgaggcgcgattttcctgggggctcggccgggcgggtggggcagggcggctgccggcagctcggacccggaagagccgtcccggtggggcggcgggcggcgggcggggaggcccctggttcgcgccccctcggggtccgaggcggcggagaggacccccgaggcctcccgccttagctggggccgcggtagggggagccccacccagcgcctctcgccgcccaggctcggccgagattggggaagacggcctagagtgaggtggcaggatgaccgcgcagggcgtgtcccggggattgggggtctgggtacgcgggctctgcccgtttcgtggaaaggcgctgccctagtgttgcctgcggggtagacccaagggatagaccagggtccagacctgtccggtcccaggctagctacgaggtgccgtcctgggcaagtcacttcagttttctcgggcttagttccctcctcaagatttcaaaagtaaaatagtaataaagaaaaaaaaaagaagcagaaaatcctctgacttcctcattttctgttgtcggccctggacgtcattgaactgcaggcaggattggctaaaggaggaccctttgggattttgaggttttcggttttattttatattgtgggaataatgttcttttttaaaggatcaacatttcacgcatcaacagttatacgtgaggtattgtgccacgtttgtgaaattaaagatgagtaagatcaggccctgtctccaaagagcgttttaatcagagagtcaggtgtgcaagctaatgattataaggtgcaataatgataaaagatgctgaacttactagccatacagagtaatgtaggtaaggagaaggggcctggggaagacagtatgagcacgggaggtgacttttttttttttttttttggagacagggggtcttgctctggtcgcccagcctggagttcagtggtgcaatctcagctcactgcaaactccacctcccaggttcaagcgattctcctgcagtctcccgagtacaggcgtcggccaccacactggctaatttttgtatttttagtagagacagggtttcactgtgttggtcaggctggtctcaaactcctgatctcaaatgatccccacgcctcgacctcccaaagtgtgagccactgcacctggcctgaaggtgacatttgaacagagccttgaagaatgctgtgtagaaagtttgacaggtggccaggcatagtgactcctgcgtgtaatcccagcactttgggagtccgaggtgagaggatagtttgaggccttgagtttgagaccagcctgggcagcacagtgagactccatctcttaaaaaaaaaaaaaaaaattagccaggcgtggtggcccatgcctgtggtcccagctgcttggggctgaggtaggaggatcatttgagcccagaaagtcgaggctgcagtaagccatgattgtgccactgcactcgagccggagtgacagaacaagaccctgtctcaaaaaaaaaaaaaaaaaagtttgatagggcatgtggaacaagagacaggacctgagggaagagcataaacaaaggtattgaaagtagagggatactgtgttgggaactgagtgatgtagactgcacagtggtgggaggaagggaagaggagagtttccaaaaatagttgggaccagactgggaaaggccttgaatgccttcccaaggagttaggaatttattccacacctggtgcccatgaaggaagcagattgcttcaaggttaagctcaggctttggagacagactctccaggtttggattcaggccctgtcacttatttgccatggggctgagttcacccagcctcagtttcttcgtctgtaaaataggagtgataatcacaggattgttgtggggtttcaatgagagaatgcgtgtaaaatgcttcgtacaattactgccacttatgtctcaataactgctggctttggtcattaataaaagagggaaacaatattatcagatctgtatttagaaggagttctggcagatagggacagatttgtgccaaaatctcaagacagtatttttcaagattacactgaaacttagtacatatttatattatcatacatttttaaaaaggtcaagatgattatagttgaaaccacatagttctttttttaagaaagtcattgtagtacacctggctggctacacactcattagttatcctgactttctaggtgagtggcaggaaattgattctgtggcaatcttttatcactcaggaaggctacagatcctggtgtttacattctttcttttatgttgtagctgtcctggataatgaaagacttactgcagaggagatggatgaaaggagacgtcagaacgtggcttatgagtacctttgtcatttggaagaagcgaagaggtaaagattggctggctggagagaagattaagagaagggaactgataatagtgtgaatacaaataaagattgctttgaggctgaacacagtggtccatgcctgtaatcccaacacgttgggaggccgaggtgggggggaatcacttgaacccagctgtttgagaccagattgggcaacatagtgacaccccatctctacaaaaaaattttaaaaattagccaggcatggtggtgcatgccagtagtcctagctactcgggagcctgaggagggaggatcacttgagtccgggaggtcgaggcagcagtgagccgtgctctcaccactgtgctctagcctgggtgacaaaactcctgtttttggtggggggaaaaaaaagaaaagatttatttgagtatgttatagatgtaactgggaagctggtggttgagggaataagtataggtagggtatttatttatggcaataagtagccttgatgagagtttatcatgaatcactgtgatgggcatttaagtgtactgaacggttttccaggtttctattgttcagtcttatgcttattgtgcatgttttgggcgttaccaactgtggggtggaaatagcatttttaggatttgaagttattggctttaatgtttcacttatgcttcatgaattttgatttatatatgaattgagtctcctcctcctatgacctgcggagtggctgcttggtttgggaggcttagaagcgtggtgctgttggtgtaggtccatctgtttggcaatattcagagtcagcatcctctgcattctttgtgaagtgaatgtaaagctgctcttttcctttttcagatgccccacaaccttgtggtcttaattttagagtgtcattttgttatcagtgattcatttcttttgttctggtgcttgtgttcttttgcagagtcccagggtagatgtaattatagatcatgtattctataagtgagctttggtggaaaagtcaagtgagggataatgaaatatttgtaattaacgtttaataaaaagggtgtttgaagtggtgctaataaacaagtgtgtgtgtatgtgtgtattttaattctgaaaatcttaaaatgctacaagaaagtccagagaacagtacaacaaacatcattgtattccagaactaacaaatgttaacatttgagatatttccctttcctctaaaaacaaaacaaaacaaaaccaacatcgctacatttaaagtcttttttgtgcccctctggtcccattcttccttctcctggggcaaacactaacctgtattttgcatgccctcttgtgtctaggcttcttttctgagcttaaaacttccaggaaactggagcttgggtttcagtgatgacttaagtgaggaggataacacttgtctttctaaataatagaagatgacatagcaaggcatgctatatcactagaaaagggggcattttctcatatgaagtttataagaaaacaaaaactgtaagatctctgccatttaaattgtggatttcaaggtttggaaggtcaaagaatttggaagctgcagctgttctgagagaccatcttgtgctctgtggagctttggtgattccactgaggtgacctgggggtgagagggaagagcttcaacacaccttccttcccccatccaaagtagctctgcttttgttttactgttgaatttcttgaataaaattcacttgttacagagggtgttttggctaacacctcccctcccccaaacactaccaataactagttcaactgctaatctagttcaaccatctcatttaatgaagaaactgaagcctgagttttttggtctacttgtagttttcttgattgaagaatgtttctatctttttttttttttttttgtacagtctcgctctgttgcccaggctggagggcagtggcgcaatcttggctcattgcaacctccacctcccgggttcaagcgattctcctgcctcagcctcctgagtagctggaattacaggcatccgccactacgcctggctaatttttgtatctttagtagagactgggtttcaccataatggccaggctggtctcaaactcctgacctcaggtgatccgcccgtctcagcctcccaaagtgctggaattacaaacgtgagctgctgtgcctggcctcatcatttttttaactatggttgttaaccaggtgtgtgcattagaatcacctggggaacttaaaaaaaaaaaaaaatacacctatctgggccctaccatagagattgtggttcagtaggtcggggtgggagatccagacacatagtagtcccttggtatctgtgggggtttggttccaggacacctgcagatatcagaatccacagttgctcaacttccttatataaaatggcatagtatttgcatataaccttagcacattgcataatatatacttgaaaacatctctagattacttatcatacctctagattactctagatatatctctagattacttatcatacctgatccaatgtaaatgctacataaatagttgttacactgtattgttttatttatatctttctttatttttttctgactgtttttgatccatagtttgttgaatccatggatgcagaacccatggataaggagggccgactgtattttaaatgtctctagtgattccgatgctccttccttggcccccactcctccccctgttgagaaacaagatttaaaactctgccttatgctgggatatcatgacctcagtagaatgttacacttcatcctatttcttcatcaggttctgcattagccaggcattttattttcagctactctagagcgtctttttttctgtcaggtgtttttttccagtataggaaagtagcccatttcctttaaagaccacccagcaggcatgatcccctgaggtgtttttttgttgagtgcttttgcatacttaaggagtaactgacctggcccggtggctcacgcctgtaatcccagcactttggaaagctgaggtgggcggatcacctggcggtcgggagttcgagaccagcctgaccaacatggagaaacccccgtctctactaaaaatacaaaattagtcgggcgtggtggcgggtgcctgtaatcccagctactcgggaggctgaggcaggagaattgcttgaacccgggaggcagagcttgcggtaagctgagacagtgccattgcactccagcctgggcatcaagagtaaaactctgtctcaaaaaaaaaaaaaaaaaaaaaaggcagtggagacatttgtgatgatcttcaggtttttttttttttttttaagggagggcataatagtggcatattaccctagcacaccctgcccattggcctggcatcatggaaaggtgcctggtctattttatggaggcaatcataaaactgggtgtggtgatttttgttgttgtttaaggctttgattttaaaaaatcaaggttggaagcacctatttagattgtaaactagagaggacaaaggaaagaagcctgggaatgttatggtgagaaaagaggactagaatccctgtcagccacctatgtggctgctgccacccctaaaaagtgttgtgagtgcaccaaggacaaatggcatgctcttcgttattagtgagctattaacctcttccagttctttctcctaccttggtgaaccggcctgtatcttgtgtgttccgagggcccctctttcccctctagcgctagacccagtttgcctttttggtttggttccatcctgtttcctccataacctccacccctcccaagttggaggagccccaatatctgggatttacagtaactctaaggccaggaataaagatcatagagattggagggagaaaagcttcccctcttcagttctatttataatacctctacttctactaaaagctccaccttttagtacagtggccccattgtgtatcctagggcactccattttctcctctgcctgtaacagagctctttcttgggaaaagagaggagtgtgtagagagtgaatatgactgtgtagaggcagtgagtataagtaagagagtataagtgtagagagacgaaagttttctgtggctgtgggtttgtgtttccctgaaaggttaactgggaaaatttaggggtaattcctataaatgagcactgggagtggttgagaaatagaaaatgtagagatttctgcttttcttcattgtttggagagcagcttcaatattgaaattaagccgctgttctaatgagatatcacctaacgattcaaggctttttgctaagggctgcacaatagatcaaggatacatcttaaattattatttatgcttaaattgaagcttatttttatccttttgcctgttcttattgagttttacatttgtttaggctaaggagcggggttttttttgtttttttgtttttttttgaaacggagtctcgctctgtcgcccgggccagagtgcaatgacgctatctcggctcactgcaagctccgcctcccaggttaacgccattctcctggctcagcctcccgagtagctgggactacaggcgcccaccaccacgcctggctaattttttgtatttttagtagagacggggtttcaccgtgttagccaggatagtcttgatctcctgacctcgtgatccgcccgccttggcctcccacagtgctgggattacaggcgtgagccactgcgcccggccggctaaagagcagttgtataggagcaatgaataccgtttcactcagttgaaggaggtaacatttaaatatgtgaggtatgttcagtgcttaggtcttggacaggaggaagtaacagatcagaataaggttcaggtgaaaagaaccaagaagagaacgtgtcaggcaggacagaacagggaattctgcaagtgagaagaaagtacgattagtactggaaatggaagaaaattcagctaggttaaaggtcacaggaagaaagttaattccagcattctctgagtttcagacaattcctggtgtgcgctttcaagtctgtcatgggccacctttctgctgctgagtgcccgtaccctagctcaaggaatagggcacacccctcttgtagaagggaaggtaggaacgctggctggttggagactgtcagcaactccacggtgataagtcgagcttagcactaagtagaagtatgtcactttctgtaatttagaggaattgaaaaggtatcttggaaagaaattagttcttgggaacaaagtcttttttgtgcatatgtctttactgttggcatagagcattttctgggatgggctcttcagatctcctctccctgtaagtgatttcagaattccatgaatgttgggatatgtccaggctggcaccctgggatcatgaaaatagaagttaagacatttaagaagcaagaaaacaaaatgggtaggtgaggtgactaggaagaatatcatgcccagcacttctagaattctcaaaatgaggagcatcacttaaattttgagggggatcatttttaggatggtgacccaagctctctttgtacagatgagaagtctagttatctcatgagacccagtgtgactaaaggaccatagcatgtagctgcgtaatggcacggtggcactaggagctgatccattcatttatttataattaccaaggggaagtatggggtgagatttattcttaactcttaaaatggtgacatacactattttaagaataaacctccattcttttttcggatattaatttagtgcaacggccttggacaggctccaccataagaagtgggttgcatttaaaagtgtatttattaaaagtggttgaagctgagtgcttttctgtattgtaacactgttgcaaatggggagtattcattcctaatgtggctgccgaaagctttttaccctaccatgtagctgaaaatttagcaaaaaaaattttttttttttttggagacggagtctcgctctgttgcccaggctggagtgcagtggtgcgatctgggctcaccacaacctctgcctcccgggttcaaacgattctccttcctcaccctcccgagtagctgggattacaggtgcccactgccatgcctggctaatttttgtatttttagtagagatggggtttgaccatgttggccaggctggtctccaactcctgacctcaagtgatccacccgcctcggcccccgcaaagtgctgggattataggcgtgagccactgcacccagcctagcaaaatttaaaattaagaaatgtaaagagttgaactagttagtacccattattattaagaaaagtcatgtggctctatattctcatagtacgaataattaagtaaaatagaaattcaaaagtatgaataaaatttctttgaaaatcttgaatgttgagatatcttgccacagtgaaaagaatcagactttctgttttggcaggtgtgagttctgattctggttttgcaagttgcttaacgtcagggagtgagcccaaatttgtcctttgcagaatgggaacgctatgcatcttacagagctgctgtgatggttaattgcttggcacagtgaaatacagtaggcactcaacaaacttttttttttttttttttttttttgagacggagtcttgctctgtcgcccaggctggagtgcagtggtacaatcttggctcactgcaacctccgcctcccaggttctcaccattctcctgcctcagcctcccgagtagctgggactacaggcgcctgccaccacacctggctaattttttacatttttagtagagatggggtttcactgtgttagccaggatggtctcgatctcctgacctcgtgatccacctgcctcggcctcccaaagtgctgggattacaggcgtgagccaccacgcccggcctgaactcaataaacttttatccaagcacctggataaaggatatcctgaattttttcttttctttttttttttcttttttttttttgagatggagtctcactcttgttgcccaggctggagtgcagtggcactatgttggctcactgtaacctctgccttctgggttcaagcgattctcctgcctcagcctcccaagtagctgggattacaggtgcctaccaccatacccagctaatttttgtattttttagtggagacgggggtttcaccatgttggccaggctggtctcaaactcctgacctcaggtgatccacccgccttggcctcctacagtgctgggattacagacatgagccactgtgcccggcctcctgaattttcacattaaatctgcaaaaggaaaagcagatttaatgtgaagatgacaggaattttctgggcactttcaaggtcctaaggttggtagccctagttttttcacttcagaccttagcttttatctgaaggaaaacaccagaaacagaagatacttctagggagtggaatgggggtagagggtgtgagatttcctttttacttaatactgtactatatatttaaaatgctttttacagtgataattttataataaaggaaaagaagggattaagtaaaaggaaaaactgtgtatataatttttagatataatcacaaattcagatttttaagttactacacagatgttcctcgatttaggagggggttatatcccaatattgtaagtcaaaatgcatttaatacacctaacctactgagtatcatagcccagtccaccttaattgtgctgagaatactgatgttagcttacagttggacaaaattatctagcacaaagcctatattacaataaagtattaagtatcttggctgggcgcggtggctcacacctgtaatctcagcactttgggaggccaaggcaggtggatcacttgatgccaggagttcgagactagcctggccaacatggtgaaacctcatctgtactaaaaatacaaaaaacattagttgggtatggtggcgtgtgcttgtaatcccagctactctggaagctgaggcacaagaatcactggaactgggaggtggaggttgcagtgagctgagatcacgccactgtactgcagcctgggtgatagaaccagacattgtctcaaaaaaaaaaaaaaaaaaaaagtgaatataggaaatcttccttgaaaaaacaaagatactcctacctcagcttctcaagtacctgggactataggcccacttcacctcacctaactaattaaaaaaaatttttttttttgtagagatggggtttctctatgttgccaggctggtcttcatctcctggggctcaggctatccttcgctaaagtgctgggatacaggcgtgagcagccacacctggcctgtattgtcttaatttactattttcagtggccatctaatgttcataatttatttaggtttattcctgtttaaagttctattgctttgattgctggagagtttaaacattttcttacatatttgtttatcagtattattttcttatgcaaattttctgtttttgttatgtgcctggcttctagggtcatgatgttaacttttgtgagctcttttataacatggacttgactttctctcgtatttgctacaaacattttcccttgatgtttcattgtatttgttttcttcattgtagttttaaattttattgagtttaaatgtcagtctttcgatttgtaatttcttctatcaactcgaagtctagatagtttaatttctctaaaaccttgccaaaattttcagtttaataatcgattggcttactttttatatatttgtagagatggggtcttgtaatgttgattgtaaggggaacttatcccgaacttctggccttaggtgatcctcctgcctcagcctcccaaagtgatggaattacaggcctctaatatcctttaaaaaccagctgtttattacctattagcaattcatgtctgttttgtcaaatattatgtatatatatatttctagttctggacttttaaattatggtgaaccatatttcatttttttgagaaaaatatatatgactttgttatacttcttatcattgagaaacaacatctgaagctagcttaattttaactctatgacaagtaacttgatttttttttccttttttcgtgacttgaaatttgtagaattgttgttccttgaggtataaacatttccccagttaacatgttagggttgctattggcttagcaattttgcctgcaatgtggagactcttcttggtttataatgtctcttgtttgtttattttagctttaggaaattgtccattatgcctgtggtgattagttagatctgtgtagtctattttatggctcttcttcattttgtttacgttaaataagcgttctaggtatgtgtctcacatacatcttttgttgcactgacttgattttctacagtcttgatattttttccttggttctgttaatggtagttgctttgtcctattgtagtttatatttttaattaattccttttccgtctccattcttgttaatagcttaaatgatctctttttagttcatgaagaagagtgtggcacaaaagatcctttcaaggtgaaaaaaaggagcaggtagccaagatagttgggttacatagtttaccacttccctttataatccgtaggtgttgaaatagatgtggccatgaaaaaccagtgttaatcgggcagctgagtgtatggattgtccaccagtcaaggttggggaaaaaatctggctgggctaagtgtggcccgttagtttgacctcatttggcatgtatttcttctggtcttacaggtcagagcaactgtttttatatattttaatgtccctaatgacaaaatagtaaaaatacatttgaggacccaagttggcatgttctaggaatttcattttccggcttagtgtggtgacctgcctctgattgctgtacaattccttctgcttcacagtgtcacatctggggataccagttggtagtggaacctgttttggacatttttaagccttgtggtatctgatggactcttggttgtttctagctggtgctaaataaaccccttgacaagaagtatttgtgtaagaaagcgctggtaggcaaagtgagaacatccggaagtgattcatattactgtggttgtttgcttaactcaggacttggttgcctagagaccatatcgttgagttagccgagtgaagtgccagtggaacctggagggcctgtggcctaccggatcaaatcagggctctgctccttaatttttctcctgaagtctcctagcaatctgattgatctctgtggtttgacagtgcgtgaattaaaaaaatcttaaacatattaatgtttaagaaagatctggttaatggtttattttgaagagtaagagtttacttgctgaagtttgaatgttgggttaaaattttttaaaaaaatagttgtatgttgggaagaattagttatttcaataaggcattttattctagaaacctcagtactttaaggcagctaaaggaaagccaaaataatcccccaaaacaaaaaaccaaaaacctgcaatttgcaaggcagtcataatctaaaatattttctgtctgtcccaaagtcagtgtattccccttgcctctccccctcttcctcattgtcatgattagtaccgtttattgcatactttctacatgcaaggcactgtgctaagcactttatatgctttatctaattagctattcttgaagccctgtgaggtgcttattatctacatttaacagataagaaagcaaagctcagagaggttaactcattcatctaataagtggttgatccagatttcaggtttggcaagaactctgaagtcctttctcttaactgccatgttagtctgctgctgctatacttctggttctaaaaataatgacaacagtagtaactactgttaattaagcagaatgatgatgaaatttacatattacattattgtgagataggcattatttttattttaaagagggaaaaaaatagagttgataacacttttcccaaggtcatatattggaattcaagcccaggtttgtgacaccaaagctggtgctcttaacttctgcagatgctgaagtggcaacatttaagtctaacctctttaactggtgcccagagacattaagtaacttgtgtagttttcaagtcagtgagggaactccatcaatttcctgccacttattttggagtctcttccacctgccacctgagggaaagtctccagttgtcttatgtatttttgtgtctaactagcttgttggacccttcctaattgcttcccttcttcataacctggtatctgctttgaattcagcttagaaaggtgttccttcctaccactttcttgtttgttaaagagttacctcatacagacaggagtggcaaattggattggaaattgctttggatcatttggcaagaactgtatttttggggttgtgggaggaggagaggcctgtctaaaagctctatttcttctttactcagaataccttcctgttgactcattggaaatcataacaaaaagcagaaggaatattggagaggcagctgccagcctagggcttggcttctgttggggcagctgtttggggatttagacacactgggctctaagaactgtgaggtttctgcagcagaaggaaatagtattactctgataggtatttattcataaggttaaaaagtgtcagactattgcttgggattattgatgagcaacataagaaactaaaaatattttctcaaatagaattaactggtgatcctaaaaacagaatgaattgaggaatacaagagggagtgggggcaaaattagaaaaggaaaagttgaaaagaagagaaaaaaaacttacaatcattaaaaataggaaaaagataacatttaaatagaaaaagtctcacagatatgcatgcagtaggcattaatcagcaggtcattttactgtaagtaacatacatctcagatgacctttaaaacagctaaaagtaaacaaaatttgtcttttatttaaatgactattataacaaaatgtttttttgggctgggccctgtgattcacaccagtaatcccaacacttacggaggccgaggagggaggatagcatcaggccaggagttcatgaccagcctgggcaacatattaagaccctgtctctacaaaatataagaaataaaaaaaagccaaacgtggtggcacacacctgtagttccagctactcgggaggctgaggtggaaggatcacttgagcccaagagttcgaggctgcagtgagctacgatcacactgctgcacaaaaatgtgtttcttccctgaagacatgctatgtcattagtttgggcaataccttttcataattgatagtttaaaaaggtagtgtttgacaatggcttgacttttggggttttccttaaaaatttgagaatccccataggaatgttttttagatagatttggtcttaatttaaaatttttaaatttaaaacatttttttcttagaaataggtaatacacagacgtgatacataattcagagactatgcaagtatataacactgaaaaaaagtctatatccttagtcttctttctctagctattcagttattttccccacatggaactgctatcatgattgtgtctctttccggagatattctgtgcatgtaaatacaaattactttgatttgtttagaagtggttgcacactgtacattttgctttacatctttttgttgttgttttttgagatggagtcttgctctgttgcccaggctggagtgcagtggtgtgatctcggctcattacaacctccacctccagggttcaagcgattgtcccgcctcagcctcccaagtagatgggactacaggcaatccgccatcaggcctggctaatttttgtatttttagtagagacagggtttcaccatgttggccaggctggtcttgaactcctgaccttaggttatctgcccgccttggcctccctaagtgttgggcttacagacatgagccaccgttttgctttgcatcttaaaattcattccatatgagtgaatgtggaatgaagtgcctctttttttccttcacagttttagttttcggttttgaagttaacctgtcaacggacattttctcctcagcttttgctgttataaaaagtcactttgtaggtatgccattgtgcatgtatgagtattcttgcaggataaatttctaaaagtgtaatttctgggtcaaagggaatatgcatatttagttctcaaaaatattgccaatttgctctcgtaagaggttgtaccagtttgcacatctgcctgtcaataatgtacatataagaaggctgtttccgctttaattttaccaacccagagtattacagattttttacatttgccagtttcataggtgaaaatggtatttcattgtagctattttggattatctaattatgagtgaagatgagcatctttacatgtgtttaaaagccatttgtatgttcttttctgtgaactttttcggtagaatcctttgctcatttttctattggattattcatctttttcttattcattgtggtaagagctctttatatattgaggaaattggctcgttgtacaccgtgggtgttataaatattcattccactttgtcctttaattttttttttttgagaaagtctcattctgttgcccagcctggcgtgcagtggcccgatcttggccaggttcaagcgattcttgtgcctcatcctcccgaggaactgggattacaggcgcgtatcaccacactcagctaatttttgtatttttttagtagagacagggttttgccatgttggccaggctggtcttgaactcctgatctcgggtgatccacctgcctcgacctcccaaagtgctgggattacagccaagagccacctcacctggccattgtcctttaaattttgactttgtatttcaaataaagttttaaaacatatttgaacttactaatattttacttttagtttttgaattttttgcatgatttttaaagagtcttatctatactgagattatataaaaacattctcccatgttttcctctagtatgtttaggatgtaaagtgttttaatatttaactctttgatccatttggaatttattttggtgtgaggagtaagatagatcctgcttttttgacttttgaatcgtattttacattttgagtcttagcagtgtcttaggaaatgtgctctggagggtgtcttgtgctctagtttatgaactgatatcttaatttttttcagaacaaggcagcttcaactgttgagctttttgaaacatatggcttaactatcattttagggaatttggttaggattttccagagtgctttcaagcaagttatattgtaatgctaaacagattaatatcgtgtagtaaagttggcgttgagaaaacaggttttgaattaacagctttgacataaagactgtgaagagattactagacttgccaaactaacataatttattctttgtgtaaaggagagtgcaaatttggagtttgaaaaactgtgtggctgactttctagatcagtattttttgaggtatattgtgctgtgacattaaagaaagggtttagtggtgaaataagcttcagaaatactgagttaaaccaagccaaatattattcaagtggcaaattatttggaatctttgtcatagacttgtaaattctgagtctccaaggcaaaggatagtgtatgcaatattcctcaaacctactttatcaatagtgttccaggttttttttttttttctggtttgcgaacacttttttttctatcagttacggatttgagggactattttttctttcttttactttattttttatttttggactctaagactttcttcagagactatttcaaataagaatttgggagatgttcatggtcacttctcagctattttgtgttttatgatagttagtttacattctccgttgagttatcctgttcttggcttatagagcttaaattaaagccataattgtactaattggataggtataattgctcagtgatctttaaggcattgcaaaggacgggagtgtggtttttaaaaatgaggggtgcaaatgtactaattattaaaaaggaaaagataaatatgacaaattctggtctagtaaactagtttctggccaaacattggaccagaaaaattccagagcacattgtcagatgcataacttatgaacacttagcgagaaaagtgatgcttgggagccaacatgggctccctaaaaaaagccctgtcacattaacatcatttccttttggacagggtcaccagattggtgaatcagagaaaaacacacgcctggcaattttttgtatttttagtagagacggggtttcaccgtgttaaccaggatagtcttgatctcctgacctggtgatccacccgcctcagcctcccagtgctgggattagaggcgtgagccaccgtgcccggccggggtttgtttttggttgatgaaagtgttctggaattagatagtgatgacggttgtacaacattgtgaatattctaaaagcaactgaattgtatattttaaatgagtttacgttacgaatcgtatctcagcaaaaagagctgcagatttttagttcagagaaagcacttttagggcatgttatttgtaaacatttttattgggacttactagggcgtcagtgatgtgtcagtgaagttaggattttacttgtttctagagagatagttaatatattgtaaggcacattttgctttcaatgtaccgtgaatctaataatgaaattcaatagtaataagtgtgatgtcctacattggagttcaaaaagtgtataggataagggagagaagtagcgttagtgggaataacgttggtgggaaacgaaaacaaaatgaaagaaacctgagaagttcattaactcattagtagatatatggtatatgcagccaaggaaaagatggttccactgtcctctggactaatcagaggcttcctgaaattggtgtttagttctggaggccatactttaagatggatctcgtagtctagagcaaggatgttagatttgtggtaggttattttacacccacagcaagcactgctgatagatcagaatccttttcaacgtagaagctgaggaaccactcccaatcagtgggtgttggttgtccattagttgagacttagttgttgctctgggatgagagcgtgttcgatgagtatgaccaggatgataaagggtctaccaattatgatctatgaagaataattgggaatactgaggctatataaaatggaaacaagatttagaagaaatataaaatcagaatctcagaagctcaacctttcatctagtttaggaattcagtcaactgttatattaacattttacctactttactaaaaaattcctgagagatgggaggggagttcattttgtcagatgtggtgccaggggaacagaactagacaatggaaatctgcttaataggaggatagtttcttatataacaataagaaatttccaaacggtgtctgagctgctttgggaaaacccgtgttgcagattttcaggtttagactgtgtaacagtttaatggaagattgttatgttctaacctaagtattttctcgttatttaaaaacaatttttatttcatttcctgtgttattaaaaactatttttattttgaatgacttgatactattccattgctcattttttctaacatggctaagaagttgggaaaattcctccaataaaataattactttaaagcaagtaaaacacgtttttagctcctccattgttcaggacactctgggagaactgaagaagatgcgaaagtataaaacagtcctgcccttaggagcttacggattaattgaagacagggcataaacatttgaaaagttacccaacatcagagaatgagaggtctcagtgtcacaaggcaatatgtaattgctgaggaaatgatgcaaatagttaatgtgtgagagtttagacagggaaagattattttatggctgggtttttcaggataagctgacattgtatggtcaggcgtttccctttcaagggaaagcataacactatgtatacttgtcttgttctctgtgctcctttagagttgaagctctttccacttcctggtacccaatggcacctctcaccacagtgctttttacaaagtaggtgcttggggatattgttaagttgaatgagtacagagttgtgtggtatgtgggggttgtggtaggaaaaagaatttcagtgttatggtgataagagcttggggtaattttctgttttggtttttgtttttcttttattatttggttataattgagaccaggagtaatacggtccctaagcaagagagaaagagcagtgtgtgtctttcagtagagtctttctaatttattcaaagataaattagaaaaggattctacccttatgtacataaataactattaggcgataaagagatataaagtgccataagaaagtttagaggaagtttggaacgagaagagattatttctgatggtaggtcatgaaaaggttcgtggaggagaggtgacttttgaaggtaacatttgaattggcagggatgggtggggctgatcacctaaaagttatactaaaccttgtattctttgtgggcatccctgtctctaccttcctgcatcgtggcttgatgacatctattttctctcaaaacttcttcacattttggccctaacaaatttaccccatctcatttaacatgctatcacttaaaaaattaattaattaatttttagagaaagggtcttgctctcttgcccaggttggagtgcaggggtgcaatcatagctcatggcagccgggaactcttgggctccagccatccccagacctcagccttgtgagtagctgggactgcagatgcatgccaccatgctggcttaacatgccatcttgacctctttccctgtagcagtgggaaaaacgtatttttctcctaacacttaaccttctatgtgtgatctagatcctatcccttcttgtcttctagggttcttattccaatattattttcccaactataacttgcactttttttcctgctgcttctttctctttagcacatgaacatcctcacccattcaagatacacttccttactcctagataccctgattgttttcccctctttgttctttcaaggaaaatttcctatattcactttttttttttttttttttttagataaggtctggctctatcactcaggctggagtgcagtggcacgatctcggttcattgcaacctccacctcccggcttcaagcgattctcctgcctcagcctcctgagtagctgagattatgggtgcccgccacaacagccagctaatttttgtatttttagtagagatggggtcttaccatgttggccaggctggtctcgaactcctgacctcaaatgatccacccgccttggcctcccaaagtgctgggattacagacgtgagccactgcgccaggccttaatttttacatttttttgtagaaacgggtttcactgggttgcccagcctggcctcgaacttacgaactcaagtgttctactcaccttggcttcccaaaatgctgggattgcaagtgtgagccactgtgccctgcccctatattcacttccttaacttaactcatttggatgtaattcctgtgccttccttttccccattgaaatttctcttgcttagttccaccaacagtgtaaaagtgttcctatttctccacatcctctccagcacctgttgtttcctgactttttaatgagcgacattctaactggtgtgagatggcatctcattgtggttttgatttgcatttctctgatgaccagtgatgatgagcattttttcatgtgtctgttggctgcataaatgtcttcttttgagaagtgtctgttcatatcctttgcccactttttgatagggttgtttgtttttttcttgtaaatttatttgagttctttgtaggttctggatattagccctttgtcagatgagcagattgcaaaaattttctcccattctgtaggttgcctgttcactgtgatggtagtttcttttgctgtgcagaagctctagtttaattagatcccatttctcaattttggcttttgttgccgttgcttttggtgttttagacatgaagtccttgcccatgcctatgtcctgaatggtatttcctagttcaaccattgtggaagacagtgtggcaattcctcaaggatctagaactagaaataccatttgacccagccatcccattactgggtatgtacccaaaggattataaatcatgctgctataaagacacatgcgcacgtatgtttactgcggcactattcatgatagcaaacacttggaaccaacccaaatgtccatcagtgatagactggattaagaaaatgtggcacatatacaccatggaatactatgaagccataaaaaaggatgagttcatgtcctttgtagggacatggatgaagctggaaactatcattctcagcaaactatcacaaggacagaaaaccaaacaccgcatgttctcactcataggtgggaattgaacaatgaaaacacatggacacagggtggggaacatcacacactggggcctgttgtggggtagggggaggggagaggggggagggacagcattaggagatatacctaatgctaaatgatgagttaatgggtgcagcacaccaacatggcacgtgtatacatatgtaacaaacctgcatgttgtgcacatgtaccctagaacttaaagtataataaaaaaaaaaaaaaagaaaaaacattcccaagatcccctcaaaaaaaagaaaaagaaaaagaaatttctcttgctcatatcaccaatggcctaattgctatgtcccatggaaatttttctagtacttaatctctgcagcatatgtcactctttcctgttcaattcatggagttttcttccttttaattgggtatcttttttatgctttttgaatttcgaactgtgtattgaagtattgacctgtgtaaaaaatatattgcctatctaagaaaatcagttagcattcctctgggaaactcacttggccatccatccttaccccaggtctaagttagatgttcctctctcatgtatctttattataacttttctctttcctaatgcactgttagccttagaaggcaagtactacgttctttctttctttcttttcttttcttttctttttttttggagacagggtctcactctgttacccaggctggaatgcagtggtgtgatctgggctcactgcagccacaacacccccaggctcagatgatcctccttgtctcagcctcccaaagtgctgggattataggcgtgagccacctcacctggcagtactgtgttcttaatgtatatcatagttaacccccactcccttattttcttactaaataataggtgtgaaaattaaatttttgacatatatggctctagcagaggattgcttttacagagaaataggtgcctgtcttctactttgtagaggactcttacctgttgttttcttctcaagagctgctcacaggttagtaatgattaggctgtagagctgctcacaggttagtaatgattaagctgtagcttctgagacttagctatcatctagatttaactcagttttggaatttcatttcatttcatttaagattaaaaggtctttcatgctccatggtaagtggtaaactagggatggatggatagatagacagctgaccatggtaatgtttcaccagactctggatctgaagacttgatcaaggagtaagtaatctattagccgagacttaaacaaacgaaaaactttattggagtttaatacacatcccacaaaatccacctgtttttttaatgtacaattcaataatatttagtaaatttgctgagttgtgcaacccatcactatgatctagtttccatttctccaataagaccagggactctattaaaataaaacaattagacatgtaattttgacaagtagacttgacctattctatctgattatgctaagaatgaagtgatttgctcaggggtctgtattagatataaatacacacagaagttaaatatataacttgaagcaaaaacatttccctgtttttcacttattcctatagcttttcagattggcctaatttatactcaggtttcctttaaaacagatactatcaagatttctcattttgcttgtatggtttgaaaaacaagccttttttgttccttggctggattactgcaatactttctttagtgtctcctcacttctctctagccctttctcctacaactgctcagaatggtcttttgaattaaatcttattctttaattcctgtgtaaatccttccaagggtctgcacattctctgcccttggcctgacgtattctcccttatcagcacataccacaagtctttcaagacctataaaatcagtaccattttctctgggaagtcatcctgattcccctctttctgcgtatggtgaagaatgctttatggaatactctgcattcctttctctcaagacttagatttaccattaccatatggaaatttctaggctgtttccaatgcctaggtggtgctcagaagtgttagtggtttagtagaatcctaattgtggagaaagacagccaaatttgggaggtttttagcatagagtaaccctggcattcagggatgtttgctgtgcaagatgggtgtggtaccagaggagctgttcctggaggaactgaatctcagtggcttgaagtggtcagttccggcattggtatgttccccttctgtattgcacagagctgggaaaccactgaagtcatgtgctctgcagaacttgttcaactggtttcctctccacagacccctaattcagatttccacccttattcttttctgcatatgctcttagtctgggcttgttttaaggtttaccacagtagagttctcagtatagttatttatttgtcttgctgagtgtagagtgggtagggccaagtatgtactccctttgaaaagtgttatcagtaagacaagatagacaggtattatgtaaatcatggagtgtcagactccattagcaggtttatttctgtggatctaaccatttcacccccacactcatgtgtacatacacatatacatagctatcattatttagagcctactactagttgctgggtgaggtgtcagagccccggcattggaaagtagtcaactcacaggttggtaggaagaatttactgacagcagtataggtttgaaaaaggaaagttttattagaaagaaggaactctgcagaagaatgcctcagcaagagagaactgagctcgcggtggatttttccttagggtatttatggaacttaaagcaggagcttaagggtagtttggaccatattagccaataggtcatgataaatgattacatttttagacgtaatgtcagcaagggttgcacagggagtttcggcatggcattccagagatgtatagaaagtctagttgcttacaaattttaggttgaaaagagagctggaaccaggtgccgattttagataacagggaagttaattacttctaaattcctcagataagaagttttgcctctgaatggtctccttagtggactccaggtgatcactagtatttggtatgtatcatctcatttaatccttacaacaaccttatgaagtttggtgtgttgctaatcctgctttatatatgggaaatggaagctcagagaagttagcgggtaacatgtcattcttggtttttcttatgtccttccctcttatctcagggaggaagtggggtatattcctttctgtagctggctgccgcctctgctcttcagaaccttgctttcttttgttcttattcctgtatctttagcccctccttcacgtgttcttttcttgcagactataaaaatatgctttttccacaatcatttaaaaaaaataaaaagacactttcccaggacatgtcaccatctcagactaactccttctccgttccccctagtttttcctcttcctttcttacacttctagaaaaagaagttggctgggtgcagtgactcatgcctgtaatcccagtactttgggagatggagaagggggcggggagggagttgggggttggaagtcaagaatctcttgagttcaggagttccataccagcctggacaacatagtgaaaccttgtctccattataaaaaaagtaataataataaaataaaaattagaaaaagaagcctacatttgctgcctctccttcctacttttagttacttttctagttattttaaatggactcctgtgtcaccactccactaagactccccttacaggagccaaagatgaccttgcttgtgtgccacattcttttctcttcaccacccgcctctctgcagcattgaaagctggtgacctctaccagtttgctgattttttccttccgtgattgccattgtgtgattctctcctggttcttaacttgatcacagacgctatctttgtctctttcacctcttaagtgttggtgttctctgaggcacagtgcttcagcttttacatttttctccacagcctctttctctgtgggcttatctactcttgtggtgccattttccagatttaggtcttcagcaacaggtctccctcctgagacctgtgtttccaactgcctacaagatgccactgtctggacgtcccgttgacatttcaagctgaacatgtttcaaccgtgaattgctcatcctctccggcttttgtgggtgtccccattcttgtttaatggcatcatcttttatgtagtcatccatgccgcaagtcaccaaatcatcttttaaaaaataagaaaaaaaccttctcttttcgttttatagaagtgtttgtaagtttgctgtagatggtatatggtgccggattttctcctagaattgtgtgtcagaatgtggggcttctcgacacactggacaacaatgttattttaaaaaatctttgctagtctgatagctgaagatggtgatattgttactttactttgtatttctttggttagtagtaagattgagaaattttcttataaattactggctatatgtatattttatgaatttttaaatttgtgtttctagcatatttttctagggaaatgtttgccattttatttcaagtgtttaaaatgtatatacatgtaaagattatggaatattgttagctctttgttatatgttgtgattttttttcctccagtaacctttcctgttaaagttttatttagttttttaaaaatggccttacagaagtttaaatactagccaatttatcttttcctttctgatttctgcttctgtagtagtgtttgtaaacttctttctcattttaagagtatataactattttttcttttttaaaaaattctctaatccatttggtgtttaatgttagttgtgaaccgtgaggtctggagctaactgcttccccaccctccatgccccctgccttttcagtcatctgtgagatttcacatctttcccactgcccttctaatccccgtgcctcatctaacagattgtcaaatggggtcaattctacctttgtaattgttaatcattctctttccaccattgtcccagttaaagactgtattaccactcacctggattaccgaaatgtttgcctgatatttctcccttgaatctgtcgtccatgctgctgtccaagttctccttctaagtctacttgaaaacctcccatggctcccattcctgcaggttagattactaatccagatacttttacacctacttctctaccacagtgacttaccgttccctgaatgtgccatttgttttcagcctttttttttgtcctttgtattatgctgttccttttttgttttttaatttttttatttattatactttaagttccagggtacatgtgcacaacgtgcaggtttgttacataatgtatacaggtgccatgttgatgtgctgcacccattaactcgtcatttacattaggtatgtctcctaatgctatccctcccgcctccccctaccccacaacaggccccagtgtgtgatgttcccatgtccctacaaaggacatgaactcatccttttttatggcttcatagtattccatggtgtatatgtgccacattttcttaatccattctatcattgatggacatttgggttggttccaagtctttgctattgtgaatggtgctgcagtaaacatacgtgcgcatgtgtctttatagcagcatgatttataatcctttgggtacatacccagtaatgggatggctgggtcaaatggtatttctagttctagatccttgaggaactgccacactgtcttccccaatggttgaagcagtttacagtccctccagcagtgtaaaagtgttcctatttctccacatcctctccagcacctgttgtttcctgactttttttttttttttttgagacggagtcttgctctgttgcccaggctggagtgcagtggcacaatcttggctcactgcaggcttcacctcccgtgttcacgccattctcctgcctcagcctcccgagtagctgggattacaggtgcccgccaccacgcccagctaattttttgtatttttagtagagatgggagttctccgtgttagccaggatggtctcgatctcctgacctcatgatccacctgccttggcctcccaaagtgctgggattacagacgtgagccgctgtgcccagcctgtttcttaactttttaatgatcactattctaactggtgtgagatggtatctcgttgtggttttgatttgcatttctctgatggccagtgatgaccattttttcatgtgtctgttggctgcataaatgtcttcttttgcaaagtgtctgttcatatccttcccctactttgtgatggggttgtttgtttcttttaaatttgtttgagttctttgtagattctggatattagccctttgtcagataagtatattgcaaaaattttctcccattctgtaggttgcctgttcactctgatggtagtttcttttgctgtgcagaagctctttcgtttaattagatcccatttgtcaattttggcttttgttgccattgcttttggtgtttcagacatgaagtccttgcccatgtctatgtcctgaatggtattgcctaggttttcttctagggtttttatggttttaggtctaacatttaagtctttaatccatctcgaattaatttttgtataacgtgtaaggaagggatccagtttcagctttctacatatggctagccagttttcccagcaccatttattaaatagggaatcgtttccccatttcttgttttggtcaggtttgtcaaagatcagatggttgtggatatgtggtattatttctgagggctctgttctgttccattggtctatatctctgttttggtaccagtaccataccatgctgttttggttattgtagccttgtagtatagtttgaagtcaggtagcatgatgcttccagctttgttcttttggcttaggattgtcttggcaatgcgggctctttttgggttccatatgaactttaaagtagttttttccaattctgtgaagaaagtcattggtagcttgatggggatggcattaaatctataaattaccttgctcagtatggccattttcacgatattgattcttcctatccatgagcatggaatgttcttccatttgtttgtatcctcttttatttcattgagcagtggtttgtagttctccttgaagaggtccttcacatcccttgtaagttggattcctaagtatttttatgctgttcctttatgttacatgtctccttttcccatttttcactattggaaatagaatttatttgagcaaagcctagttcagatatcatctcctattgtagctagctgttaaagcataactgttaccagagagtaattcccttgaaggtgctgactggtattcagcacaacgttataccactgataagtgttccacacagtagtcagttcgaaatgtttcctgaatgaatacgtgggtgtcagaatagacacctttttttttttgaggaattgacttaaaatacttaggaaaaaaactttaaaaaatagaataaatatgaaaaggtataagaattactatgtaggctgagcagagtggctcaagcctataatccttgcactttgggaggctgaggtggaaggatcccttgagcccaggagttggagaccagcctgagtaacatagggagttgctgtctctacaaataattttaaaaattagcctcgtgtggtggtacacacctgtggtcccagctactcaggaggctgaggtgggagcatcactgatcccaggaggttgaggccacagtgagccgtgtgattgggccactgaactccagactgggtggcagagcgagacactgtctcaaaaaaaaaattaaaagactgtaattaaagatagccttttgtataagcattcatttttgtactaattgtatcagcttcaccaatgtgtaatactaggcctctcccttagtgcttgatagaagtaagggttgttaatgaggttatatattgtggtgtgggatacttcaggaagcccaatttcagaacttgagcatttgtaagggaatgttcagtaggtcgtaactgttgttattgttgaaggaggaagtatcctgtagcaattaagagtatcagcttcatactggttcgtggctcacgcctgtaatcccagcactttgggagggtaaggcaggtggatggcttgagcccaggagtttggaccaccctgggtaacatggtgaaaccctttctctacaaaaaaaggcaaaaattagccgggtgttgtggcacatgcttgtgaccccagcttcttgagaggctaggtaggaggatccagaggatcgcttgaaccctgaaagtcaaggctgcagtgagccatgatcacaccactacatagactctgtctcaaaaaagaaaaaaaaaaaaaaaagccagagtatgggcttcagaatcacaccaacttgggttcaagtgagagtttacttgccagataatcttggaatatactttttggaacccacagtttatctgtaaaataattacaataatacttcagaggttgttgcaaagattgagataataatgcatgtaaagtatttggcttcatgtctgccacatggtgtgaagattattttttaagtgtcatttatattgaaaatgagtcattctatgttacttctttcctgtttagtacttgtgtttcagatctgacatcacctttttaaaaattttgcatttgagtgagatttgctaaagcagttctggggttaaacttgaagagaaaatattgaatatttatatttaatatcccatgtgagaggagagattaagaaccctgttgtctgcttgttacatctcttgtgaaaaacataaaaaatataagagttttgttactgaactctacttgtggttttggtcgagtctatcatgaaggtatgttgtggagattagtgcaaataatgatttaaatatggaattataaagtttagcagctctatattcggggaaaaacgagtctctgttgattgaaaaagcataataaaataatttattctgaggctttgtggttatgcagtgtcagaatgaaaaagatgatactcctgttccatttcaggctggtcagaccatacctggaacacagtgttcagttggagaaagttcagagatgagcaaaagacgtgagggggcagagatgatgtctaacactgctaatataatacctggtaacgttttgagtacttactctgtgccaggcactgttcttagtattttatatgtactatcatctctttaatcctcataaacattctgtgggtaggtgctattattattctgtttttatgactagtgcttgaaggagctggaatcattttacttatggaattgtcagcatgtgactcatcatgaggggataggaggaaaggcacaaatatttttttcaatacccagccaagcactgtgctagctctatttcacttgcaatcttatttaatcctcaatgacaaaccttggaagatcctgttagccttttttaacaaatgaaagaactggtcaagtggcttgctgtctttctcggtaagtgcgagagacaggacatggaaccagatctttccaagtccatggccagtgctactcacattatgcttttatttttacgttctcttgctccaggaggcagcttagggtgccagtagagaattgatgccggcttagcaaaaaccttctgactactggagtccagaaatgaactaggttaccttgaatgtttgattctctgtcagtattcaggctcagcctgcttcctgatttggctgagatgttttgggaacatcaaattggggatggagtagaacatgtgaggggagtggaggaattgagatgggctgaaagatctttaatgagccttccatccttgagattctatgattattgctaggacagggttaaatatgagaattggtgaaaagttgtgttggccagtgatttttcttttgtgcatagattgattgattttgagacaagagtttcactgtcgcccaggctgggaatgcagtggtatgatcactgctcactgcatcctcaaactctcagactcaggcaaccctcccacctcagccatagttttatttttaaatgtctttataggccgggcacagtggctcacgcctataatcccagcactttgggaggccaaggtgggcggatcacttgaggtcaggagttcaaggccagcccggccaacatggcgaaaccccgtct

SEQ ID NO: 179 - DNA, 32744 bp, Homo sapiens
  source 1..32744: mol_type = other DNA
atcggaataggcaagcttccggcgggaagtgagccagggcttggcgcggcggccgtggttgcggcgcgggaagtttggatcctggttccgtccgctaggagtctgcgtgcgaggtgagtaccgcgcgcgtaactacgggtcggtccgcattgatctagccctgctctggcggcccggcccggagctggaggccgctcgggttcttccgtttcctgcactggttcgcctcggcccgctgagtcctctagtctggccaacatcctgggaggacagcagatacataaatacgttcccaaatggggaaacagaggcccggggcgggggcgaactctgccaaggtctcccggggcgtcggaggccgagcatgggctaggacctggcatgttgttgcccatatactccagtgcgtaacatgatgccctgcacagagtaatcccagcccagacctctggcactactacctccgtgtccctcctgaggaacaacgaaaacactttgtactttttctgtggccttccataatcacgagctgggctactcttgtttttgagtgtctactgtgtgccatgttcctggcacccttgatcttacaactgtagctttacgatatcccagcaaagcgaagtgcttaagaatactgcatcagattgcttgggttcgaattctggctccttcacatttagctctgtgtctactgcacgttactgaaacactaagtgtcttggttttcgtctgtcatatgggggaaatggtctcttctacttcctggcgtttttgttaggattaaacgacttaatatatgcaataataaatgcttcgaaggctacctgttacatagtacacagtaagggttctgttatcattacccagagaagcggatgaaattgtccccattttagacatggagaatctgaagtacaaagaggttgtctccgtacagaaagagcatttggtgattaagtgctagagatacaggatttgaactaagcgcctgattttaaagtatgtcccacaacattaggctttctcctatagccctcacctgtccttaggtcacacagaactttaggtacctcatggcgtgagatggagcaggtgactgacagctccttgtgccacccatgcagataaataacactggtgtgtcactgtcaagattaagggacaggaattcgagagactgcatgagagatcagaagatgaagaagcgggtaggcaaaagtattctgtttggggaatagtaaatagaattaattaaatcaacattttgttagctgggctgcttatactgtcagacagtagcttataatctactgggaagaaatgaaatttctgggtcctgtgtcactttcaatgccactcaccatgacaggtaccttataagtatagtttacagtcctatcagtaacctggagaagtagttatttccttcgttttactgaggaaaccaagagttaaaaaatcaggaaaagtgttagatgtgcagtagaacatcatcatgctgggaagttctacacatccgcttcaggacaggtggtattacctatgagcaggaagggaagggaaaaaggtaaggggaatgagtgatagtttattgttttgatttttaaatttttatctgttttttcctttttcatagtcattcctggaatgagtgagtttgtttttgtttttgtttttgggggatggagtctcgctctgtcgcccaggctggagtgcagtggcgcgatcttggctcactgcaagctccgcctcccgggttcatgccattctcctgcctcagcctcccaaatagctgggactacaggcacccaccaccacgcccagctaattttttgtatttttagtagagacggggtttcactgtgttagccaggatggtctcgatctcctgacctcgtgatccgcctgcctccgcctcccaaggtgctgggattacaggcgagccaccgcgcccggccatgagtgagattttaaatatatctgaaatgaggccaggcacagtggctcacacccataatcccagcactttgggaggatgaggcgggcgaatcacctgaggccaggagttcgagacttgcctcaccaacatggcgaaactccctctctatagtaaatacaaaattatctgggcgtggtggtgtgcgcctgtggttctagctactggggaggctgaggcacgagaatcgcttgaacccaggaggctgcagttagtcaagattgcaccactgcactccagcctgggtgacagagtgagagtccgtcagtcaatctacctgaaatgttttatgcctttaaaagagagagaatagggccgagtttaactttttaaatttggttggtgggtacatgggtgtaattctattttctgtatctttatgtaagaaatattaaaaattaaaagatatacatatatattttaatttacatatatatgtgtttttttctaagagaaaaatggatagaataaagaggtccaagataatcgtagaataatcctaggacttcagtgctgaaagcccctaagggtctccactacctgtaggataaaatctaaactccttggcatgataccagaggcttttgagcattctgtatcgctaacacatactattctacctcagcctttgtaccactagttcatagactactcttcttcacaacctcagtcctgtctgtaaagttccacttgtccttcaatatccaattcagtgttctttgaaaagcttctctatcatttgcctgtttttccttaatctgggaagccatagtcttttaagaaaagacttgattgtcagacttatctcgttgcattgtaattatttgttgacatgtctattttctgctagtctataagctccttgaaggcagtaataatgtctttcccatctctgtacttcagtgcctaccatgatgcctggcacagagtagtcactgtagatattagctgaatgaaaaatacaagttgaagacagagagtgaaagttcttggagttatgacatatggactttgttctctggaatgacagggaactattgagtttactttctttaaaaattcccgtattttattgaaacatattctcaatgtcaagaaaaatattccagtcataatcctatctttcaaacacttgaactatttttattttccatgagtcctttccaaatttcagctataaaattagttatacagatttagctatacagatttcttaggtagctgtagccttaatgtattcataacttagtgtttttcttttttctttctttttaaacctgacacttgaggaattttttttttcttttctttttttttgagatagggctcactgcagctccagcctcccgggctcaagtgatcctcccacctcagctgggagtacaggggtgtaccaccatgcctggctaattcttgtatttgttgtagagatgggcttttgattttttgtagagatagggtctcgccgtgttgttcaggctgatctcgaactcgtaggctcaagcagtttgcccacggagtgctgggactacaggtttgagcccaccgcacctggcctgcttttttcaatattaaattatttcctggctgggcgcggtagcacatgcctatgatcccagcactttgggaagccaaggttggggattgcttgagcctgggagttcaagaccagcctgggcaacatggcaaaaccccgtctctaccaaaaaataaaataaaaatctaaataaattatttattttagtgaatcagtctttatgcttgtcatttgtcttataaattttcgcaatattcctctctctttggtttaataggtatgaaatgatgctccatgttattattagaaaaatttcacaattttttcataaatttacttagtgtctgtatattctggtgagctgttgtgtttatattccctgaacatttgttcactggaactggatgttctttatgtgtttttaatattaatcatttatctgttatttgttgctaatttttcttttcttttttctttttttgagatggagtctcatcctgttgctgaggctgaagtgcagtggcgtgatctcagctcactgtaacctccgtctcccgagttcaatccattctcctgcctcagcctcctgggtagctgggattacaggcacccgccaccacgcccggctaatttttgtatttttggtacagatggggtttcaccatgtcaggctggtctcaaactcctgaccttaggtgatctacccactttggcttcccaaagtgctgggattacaggtgtgagccactgcatccagcctaatttttcttttaaaaatatttttattggccgggcacagtggctcgcgcctgtaatcccagcactttgggaggcctaggtgggcggatcatgaggtcaggagttcgagaccagtgtggccaacatgatgaaaccctgtgtctactaaaaatacaaaaatcagctgagcatggtggcacatgcctgtaatcccagctacttgggaggctgaggcaggagaatcacttgaacccaggaggcagagattgcagtgagccgagatcacaccactccactccagcctggcgacagagcaagactgcatctcaaaaaaaaaaaaattttctttattatgacaaccaagatacatttgtaaaaatatacataatttcgctggaaaccaagagttaaagtggctcacgcctgtaatcccagcactttaggaggctgaggcaggtggatcacttaagggcaggagttcgagaccagcctggccaacagggtgaaaccccatctctttttttttgagacagagtctcactctctctcccagtctggagtgcagtggcgcaatcttggctcactgaaagctccgcctcccagcttcatgccattctcctgcctcagcctcccaagtagctgggactacaggcacctgccaccaggcccggctaattttttgtatttttagtagagaccgggtttcactgtgttagccaggatggtctcgatctcctgacctcatgatccacccacctcggcctcccaaagtgctgggattacaggcatgagccgccgtgcccagcaaaaagcccatctctactaaaatacaaaaattagctggccatggtggcccatgtctgtaatcccagctacttgtgaagctgaggcaggagaatcacttgaacctgggcagcggaggttgcagtgagcctagatcaggatcacgccattgcactccagcctgggcaacagaatgagactctgtctcaaaaaaataaaataatttaaaaaaagttacataatttaaagaatagttacaaagaaattacaaagtttagttatgcataaaaattatattgtattcatggtaaattgaagactcattataaaattatagttacacataactatcatctagatcaagaaagaaatagaatattaccaggatcccaggaccccagaagtgtatctttctgatacctcctccctatgttagggataactattgtcccaattatgtatttatttattttgagacggagttttgctcttgttgcccattctggagtgcagtggcgcgatctcggctcactgcaacctctgcttcctgggttcaagcaattctcctgcctcagcctcccaagtagcttggattacaggcgcctgccaccatggctggctaattttttctatttttagtagagacggggttacatcatgttggccaggctggtcttaaactcctgacctcaggtaatctgcctgcctcggcctcccaaagtgctgggattacaggcatgagccaccgctcctggccctattgtcccaatttttgtgataatgcttttcttgtcttcatagtttgccctgatctatacatctataaataatatagctcagttttgcctggttttgagctctgtaaatgggataatactatatgcattctactgagtctttctagtttgcgttattatgtttgtgagattcttccacgttgtagatatagtttttcttttctttttttttttttttaatagtaattttggctgggcatggtagctcacttctgtaatcccagcactttgggaggctgaggaagcaagatctcttgaggccaggagttcaagaccagtctggcaacaatgggagacttgtctctataaaaaatttaaaaaattagttgagcatgatgtcatgcacctgtagttccagattctccagaggctgaggcaggaggatcacttgagcttaggagtctgaggctgcagtgaactatgattgtgccactgcgctctagcctgagtgacagagcaagaccttgtctctaaaaaaaaatttttttaaattgtttttcttaacctcttaacagagttttacatgtatagtaccacacagccacaatgttgtatggcagatctctagaatgcgttcattttgcattactgaaactttatactttttgattaacaactccccatttcctgaaagcccctaccctggcaaccactgtgcccctctttgcttctatgagtttgcctattttagatacctcgttgcagtggaatcatgtagtatttgtcctgtgactggcttacttcactttgcttaatggcttcaaggttcatctgtgtcatctcatgttgcaggattttttttttaattttttattatttaacttaattgtattgtattttattatttttcagacagggtcttgctcagctatccaggctggagtgcagtagaatgatcgttgctcactgcagcctctaactcctgggctcagatgatccttctgcctcagcctcccgagaaggtgagactacaggagtgtaccaccatgcttggctaacttttttattttttgtagatactgggtcttgctttgttgcctaggctggtctcaaactcctgggctcaagcgatactcctgccttggcctcccaaagtgctgggattacaagcatgagccacttcatctagtcaatttttttctttttaaaggctgaatatttcattctatgcgtataccactgtaaagaaaactccatttcctctctactctgtacccatataataattcctcacttctgtcaccaaatgtgtggtgttttttttccccacaatagttcagttctttagcagacactgggtgtcctacatttagctcaggtctgacactaactgccaggtgttagtgcagaccccaaatgttaagtcctccctgtccacccgcattccagaccccccacttcagactacaagcacaagtggtaagtcctccacattcagtcacagaacagtttccttactagattatcagcttattataaacaactcagaagcagccagctggaagaaatacacaggacaaggtatgtgggaaggggtgtggcacttccatgccctctccaggcacaccagcctcccaccatctctacatgttctcaccaacctagaagctccctgagccctatccttctgggtttttacgtaggcctccttacctagacatgattgattaaataattggccattggtgattaagtcactccccagcccctttgtcctacccagaggaagttttgttttgttttttgagaaggagtctcactctgtcgcccaggctggagtgcagtggtatgatcttggctcactgcaacctctaccagctgggttcaagagattctcatgtctcagcctactgaatagctggggttataggtgtgcaccatcatgcctggctaatttttgtatttttagtagagagagcgttttgccatgttgtccaggatggtctcaaactcctgacctcaggtgatctgcccgtctcggcctcccaaagtgctgggattacaggcataagccaccacgcccggcccccagaggaaggttttattgaattaattacaaactgataggtcaaagagtgtgtatgttttaccttactatgtaatactaaattgttttcaaaagtgcttgcactcccaccaatgtattagattttccgttgctctgcatgctggctaatactttatatttacatttttattttccaatctggtatattcatgtatagtagtattttctggtagcattcatttctctgattattagtgaagatgagtaccctgatgtgtttatgggctatttcctcttttttacagtccctttttttttttttgaggcggagtctcactctgttgcccaggctggagtgcagtggcaccatctcggctcactgcaagctccgcctcccgggttcacgccattcacctgcctcagcctcccaagtcccaagtagctgggactacaggcgcccgccaccatgcccggctaatttttttttttttttggattgttttagtagagacggggtttcactgtgttagccagggtggtctcaatctcctgacctcgtgatccacccgcctcggcctcccaaagtgctgggattacaggcgtgagccaccgcgcccagcctacagtccctttttttctgtcttctctattaagttgtctctgttttatgtacatataaacatatttatatatagttatctacatttttatatatacgtacatacacatttacataggtgtagcagatatcttctactttggctttttaagtggatttaacataattttagtcaatgactttttttatttttacatttctttaaagtgacataattgtaccccaacaatttatggggtacatagtgatattttgatacatatactgtataatgatcagatcagggtaattagcatatctatcatcttaaaacatttatcatttctttgtgttgggagcattcaatatcctccttctagctatttgaaactgtatagtacattattgttaactgtagtcatcctgtagtgctacagaacaccagaacttattcttcccatctagctgtaattttatattcttttctttcctttttttgagatgaagtttcactcttgttgcccaggctggagtgcaatggcacaatcttggctcactgcaacctctgcctcctgggttcaagcaattctcctgcctcagcctcccaagtagctaggattacaggcatgcgccaccatgcctggctaattttgcatttttagtagagacggggtttctccatgttggtcaggctgatctcaaactcctgacctcaggtgatccacccacctcggcctcccaaagtgctgggattacaggcatgagccaccacacccagccaattttgtattctttaacaaatctgcccctacccttcccagcctccagtgtcctctgttctagattttacttctatgagagcaacgatttttaggttccacatatgagtgagaacatatggtgtttaactttctgttctttattccacttaacacaatgtcctcaggttccatgttgctgtgaataacaggattttattcttttttatggctgaatagtattctgttgtataaatgtactataatttttttattcattcatcgcttgttgaacaccttggttgattccgtatcttggctattgtgaatagtgctgcagtaagcatgggggtgcagatgtctctttgatatactgacatcttttcctttggataagtgttcagtagtgggtttgctgaatcatatggtaggtctatttgtagttatttgaggaacttccatactgttctccatagtggctgtactagtttatattctcaccatcagtggaagtgtaagagttctcttttctctgcatcctcaccagcatttgttattttctgtctttttgataatagctttcttaactggggtaggatgatacttcattgtgtttttgtttttgtttttttaatttttaaaattttttgtagagacggagtcttgctgtgttgcccaagctggtcctgaactcctagcctcaagcaatcctcccgcctcagcctcctaaagtgctaggattcaaggcatgagccactgtgcctggccctaattgtggttttgatttgcactattttttttaacatcttttattgtgaattattgtatgttatatttcatagatataacttgtacgtgaatgagctaatatagtaggcctgaaactgttaccttcagaaaagcctgcttgcaaaattggtccctggctgtgtctgagaacttggcttttgaaacctttcctacactgatcaggttgttttactaatacctgttttccttctgagagtctgaaattttggtgggaggaaggtgcctaagtgaccagccctcaataaaacccctagattcagagtctctaaccagcttcttttgggcagaaacattgcacacacatagctgcattttcactgagagaacatgcactttctcaggggttagagagcattggaagcctgcacgtgaattcctacagacactacctgatgtgtttttttttcccttgctgatctggttgtgtatccttaaagtgttgatgatataataaatgttagctgtgagtacaactgtacactgagtcccatgagttcttccagcaaaatattgaacttagctgttaagttcctccagaaaaaaaaaaagctggaattttgattagaaatgcatcaagttatagatgaatttgaggagaattagcatctccatatcgtcttccaatgtgaatgtggttcatatgattgtttcctccctccttgacttctcttaacgactttcaattttcttttctttttttgagacagggtcttgctctctcacccaggctagagcaagtggtgcaatcacagcttactgcagcctcaacctcctgggctcaggtgatcctcccacctcagcctcctaagtagctgggaccataggcacatgccaccatgaccaacaaatatttgtatttttgtagagacagggttttgctgtgttgcccaggctgctctcaaactcctgggctcaagtgatctgcccaccttggcctcccaaagtgctgggattataggcatgagccactgtgcccagcccaattttctgaatagatatcaaggacataatttgttagatgtatttttaggtatatattattttctttaaattttttttgagacagggtctcactctgtcacccagactgaagtgcagtggcgtgatctcagctcaccgcaaccaccgccttccaggctcaagcaatattcctgcctcagcctcccgggtagctgggattataggcacgtgccactactgccaccacgttcagctaatttttatatatttagtagagacggggtttcaccatgttggccaggctggtctcgaactcctgacctcaaatgatccacccaccttggcctcccaaagtgctgagattacaggcatgagccactgcacccggccgggtatttaaatttttgatgtcatcttaaaaagttttctgacattttattttttgtttattgatgatatagaaaaacaatttatttttgtatattgaccttgtctccagcagtcttcctaaacacactgtcttagttttctatagctgctgtaataaattaccataaacttagtggcttaaaacaacatagaggccgggaacattggctcatgcctgtaatctcagcagtttgggaggccaaggtgggagtatcgcgggagcccagaaattcgagaccagtctgggcaacacggtgagtccctgtctctgtttaaaaataacaataacacacggtagctcacacctgtaatcccagcactttgagaggccgaggcgggcaggtcacctgaggtcgggagtttgagactagcctggccaacgtggcgaaactccatctctactaaaaatacaaaaattagccaggcatggtggtacgcgcttgtaatcccagctactcaggaggctgaggtaggagaattgcttgagcccaggagacagaggttgcagtttgccgagatcgcgccactgtactccagcctgggcaacaagagagaaactcagtttcaaaataaataaataaaataaataaaaacaacaacaacatagatttattatcttatagttctgtagttcagaagtctgaatgggtttcattgggctaaagtcaaggtgttggcaggctgagttcccttctggaggctcaagggcagaatccatttccttccccttttcagcttttagagactattcgtattccttgactcttggctttcctcctccattatcaaagccagcaactttgagtcctcctgaagttgccatctttctggtctgtcatcttatttcctcttccacttaaaaagacacttgtgattgcattgggtccatctggttagtccaggataatcttcctattttaaggtcagcttattagcagtcttaattccgtatgacagtaattcacctttgtcatgtaaccaagcatattcacaacatccaaggatcaggatatagacatctttggatgggtatgggagatggggatagtggtggtggtcacattattttgcctcctgcattcacttaagatttttatttttatttttatttttatttttgagacgaagtctcgctctatcgcccaggctggagtgcagtggcgtgatctcggctcactgcaacctccgcctcccgggttcaagcgattctcctgcctcaacctcccaagtagctgggattacaggtacgcgccaccatgaccacctaatttttttcttattttttatttttagtagagacagggtttcactatgttggccaggctgatctcgaactcctgacctcgtgatccacccacctcggcctcccaaagtgctgggattacaggcttgagccactgcatccagccaagaattttaataatttaatctgaagattcttttagatgttccacacacaaaattatagcctttgtgaatattaatgattttacatctttccagttaacacgccttttatttattgttcatgatctactgctctggcttggacttccagtatatatctgataaaagtattgatagtgggcattctggaattgttcctgatctaaaaagaaaagtttcctaaacttcaccttactgtattctctctgtcaggttatagaagttcctttctattcctgtttgataagagttgtgtttttttttgttgtttatttttgaggtggagtcttgctctgccacccaggctggagtgcagtggcgcaatcttggcccactgcaacttccgcctcccggttcaagtgattctcctgtctcagcctcccaagtagctgagactagaggctgcgtcactgcgcccagctaatttttgtattttaggtagagacagggtttcaccatattggccagactggtctcgaactcctgaccttgtgatctgcccgtctcagcctcccaaagtgctgggattacaggtatgagccaccatgcccggcgtgataagagttttcattatgaatggatttcactgtgaatggatgtttgattttatcatatgcttattctagaagtcttgagacgatatggttgttcagctttaatgttgtggtgaattatattaattgatttttaaatgttgaaccacttctgagtcattttttagacaacacaacttggtctcggtattttttattttatttatttatttatccttttagacagggtctcactctgttacccaggctggagtgcagtggtgtgacttcagctcactgcagccttgatctcccaagtcatcctcccatctcagcttcccaagtagctgggactataggcaagtgtcaccatgcccagttaatttttataaatttttgtggagatgagatttaatcacactgcccaggctggtctcaatcctgggctcaagcaatcctcctgccttggcctccaaaagcgctgggattataggtgtgagtcatcatgcccgtggctcttggtgtattttatacatggctagatttactttgctaacatattgtttgggacttttgcatctacatttatgaaaaagaattagcctggagtttttcactgaggagttgcccttacaggacttagtatcagagttatgctagcctcacagaatgagctggggagttggttctttctatattttggaatcgtttatgtaaaactggaatattttactgccataagtgcttagaagaactcacctgcgccactctggtcttgatgctatctttgtgggtagatttttgaccatcaataggacttctttaatggttataaggctattaggttttctgtttatttttgagtgagttttgataagttaatttttaaggaatgtgtccatctcatctaaattttaaaatttattgatgcaaagttgttcataacagcctaatgttatcttttaatgtctatagcatatgtaattaaatctcgtctttcaatctcttcttttttgtctttttacagaacaaacttggtttattgatcctctctattatatatctattattttttactcttaaaaatttttttaaaaatctatttatttatttattttgagaccggtttatgaaactggctaatttttgtatttttggtagagatgaggtttcaccatgttgccaaggctggtcttgaactcctggcctcaagtgatccacctgccttggcttcccaaagtgctgggattacaggcatgagccaatgcgtctgaccctcttctctttaaaactgcctcccttctattttcatcaggcttattttttcagtttcttttctaataattagggtcatccattttcttgtaactacttctttagttgcatattagatatttttatgtgtagatttccattattcagtttaaagtatatttgaatactcactatgatatcttacttgactgatggcttattcacaagtatatttcttgattttcaatacaaagggattttctagatctcattttctttattttgaaattttaaaaatctacagaaaagaaaacctacagaaaagttgaagaattagtgcagtatatcatcttcccaagtaaacaatttacattcataaaaatagttcatatattaggtaacaaggaaaacattagtaatttcataaagtagaaatattataattctgatcaccatgcaacaaaactagaaattaaaaatgaaatttataaaaaagcagaaaggcccttccatctggaaaattgaaaacaactattggatgtaaggaaaacagaaactgaaataaaggatttctgaaaattaacgaaatgaaaacacagcatatcagattcttaaaaaaaaaaaaaaggtaaggcactagtcaggggaaaatttataatcttcagtacatattataaatgaagaaagggaaataatgaaataaattccaaacttagaaagttaggaaaagaaaaacaagtaaatcgaaagcacaagagaataaataataaagataaaaagagaaattagtaagagaacaggaaaacatctgattcaaaaattaagatttttatcttggctgggcgcagtggctcatgccagtaatcccagcactttgggaggccgaagcaggcagatcacgaggtcaggagatcaagactatcctgtccaacacggtgaaaccccgtctctactaaatacaaaaacttagccaggcgtggtggcatgcacctgtaatcccagctactcgggatgctgaggcaggagaattgcttgaacctggaaggcagagtttgcagtgagccgagatcgtgccactgcactgcagcctgggtgacagagtgagactatgtctcaaaaaaattaaaaaaaaaagatgtgtatcttgaattgtttaatgaagcaaataaattagcctaatagaaattacaaatatacagaataagaaatggtaagtggtaagtaaccactgacacaggatagtttttataacaggattaatttatgtacctttacgtaaacaaatttgaaaactaaaatgaaatggataattatgtgtgaaaatctagtttaccaaaattgactcaagtagatgttggaagttaaatagctcaatttccattgaataagtttttaaagttatgaaataactgtctcactgaaaaataaaaaacatgaggtccaaatggtttaacaggaaaattctactacatttatggagtccaaataatcctaatgctaaataaattgttttagaacgtagaaaagaaggaaaacttccaaattctttattttccaaatggcttggtattgtaaatgctgatttagttgtctgtctccagttgttgaagggctgaagtgaaataaagtaaaacatcttaaaacactttttagttcttagaccctcttttttaaagtagctttattgatatagactgcacgtatttaaagtatacaatttgttcagttttgacatacacacatcatcaccataattcagttaatgaacatatccatcactctcaaaagtttcctcatcccccttaattctgccttcttgctctcttcttgccggtcaaccacttatctggtttctgtcactgtagaataattagcatgttctaggacttttaataaatgttataatacagtgtgtattcttttgtatctcacttcttttacacagcataattattttatatcggtttttatgaagcaagtataaaacaaatatttaacataaaaattaaaggtagcacaaagaaaattacagatgaatattatgtataaaaattatgtaaaagttctaaataaaatactaccaaacagaacagaatccagcactctattacaaaactattagctcatcaccaagatgtataccaggaatgcaaagatggtttaacattagaatcatcaatgtaattcaccatattaattaacctaaggagaacagtcatatatttacttttatatatgctgaaaaagcctttgacaagattcaacaccaatatatagtaaaaactcttaagaaattatattgtaatcaatacttctttttttttttttgagatggagtctcaccctgtcgcccaggctgaagtacagtagcatgacctcagctcactgcaacctccacctcccaggttcaagccattctcctgcctcagcctcccaagtcgctgggattacaggcgcccaccaccacacctggctaatttttgtatttttagtagagatgcggtttcaccatcttggccaggctggtctcaaagtcctgacctcaggtgatctgcccacctcggcctcccaaaatgctgggattacagatgtgagccaccatgcctggccaatcaatacttcttaatgatggtattctctctctctctctctgtctctgtctctcacgcacacatacacacacacgcgcgcacgcacgcacacacacacacacacacgcagagagagagagagagagagagagagagagagagagactttattcctaaatcctgtattttatctaataggaaaatactagaggcatttttactaagattgagaaaaatatagagatactcaccaactccacttgtatttaacattgtactgggggcttagccaatgcagttagataaatcaattagaggcacaagatttggaaaataaaaagtaatattgtccctacttgcaggtgatatggtagtgtgtctggaatactgcagaaaatcaataatgaaactaactaaacagaaaaggaattttataagaatatgcaaaaatcagtagtcttcatatacacaacaagtttgaatatataatgaagggtaaaatcccatttacagcaacaagaaaaagagaaaatatttaggaatttaaaaacatgtaaaacctaggtgaagaaatctttaaaacacttctgaataacaaaaatagccttaaacaaatgaaatcttttgttctaggacaggacaacaacatcataaaagtgcctaagttaatatatatatatatatatatatatatatatatatatttaagttaatacatatacctaagttaatatataaatttaatgcaatctcaatataaatatcaacagagttctggcactagacaagttgattctaaagttcatatagaaaaataaacatataagaataggaaaacagaagagctacaaagagaaagtagacttccagatattgtaacatgttgcaaagcttctatcatgataatattgtggtatagaccaatggtatagaatggaaagtcaataattagtctcctaaacacatgaagaatttagtgtatgataaaggtagttctgaaattattagggcagagatggactctttataaatagtgctgggacaacttgttagccacttgaaaaaacaaaattatatctatactttatatcagacacaggaataaactccaaatgaaccagaaatctaattttttttaaattacctactagaagaatacatagatgagttttctgtaacctggatgtggagaagggcaataaaagagggggaaaaattggctacattgaaaagcaaattcttgattacaaaaatgaaaaacaccataagcaaatttaaaagatagatgagaaaccaggaaaaaaatctgcaaaatacattttaaagacctactatccctagtctaaattgagagaaaaaaatactaaaatttggttaaaaaggcagaatacatgagcagatacaattttttaaaaagattcaaaaaccatccttaaatatgtgaagaaaatattcaatttcacctaaacaggaagtgtaaatttaaagctgcactgaaataccgtttctcacctatcagctctgcactaattagaaagcttcacaagaagccccattggtgaggctgtgaggaatgcaaacttgtaaaacctcctttgagggagaagttggcaatccagcagactacacatgcatttgccctttgacccagccattccacttgtagaaatattccctaaagatacattttcttttctttctttcctttttttttgagacagggtcttgcttgttgcccaggctgaagtgcagtagtgtgatcttggctcactgcagctcaaactcccaggctcaattgatcccaccttggcctctggagtagctgggaccacaagtgcatgccaccacgccttactaatttaaaaattttttttatagagacggagtctcaccatgttgcccaggctggtcttgaactcctggactcaagcaatcctgtctctgcctcccaaattgctgggatgacaggtgtgagccaccgtgcccggccttacgttttcaacagtagggaaatatgaatgcacaaagttatttgttgcagcattatttgtaattgtaaaatatcagggaataccttaaatgtccatacaggaaatttgttggtaaatatctacacaatggagtactgtacagctgtaaagaagaatgaggaaaatctttgcaaacgggtgtagagtgatttctaacatgaatggaaagcgtacatacagtgtgctattttttatgtaagaaagaagggaaaatatgagactctaatgtctgcttattttgcaaaaagaaaaacaggaaagataaatcagaaattattgaaattgataacccacaggaagtagatggcaaaggatggagagggaagaacacttctctgtggggaaaaacagtcttttatgtagttttaacttttagaactatgtaaatgttttatatattcaaaaatcaaatccacaagaacagtacaaacacaaactaatctaattcaaatgatgaatgtaatcaccctgaaggtgaggtgggactgaccaatcaagtaacttttgaatatagtactttaattatgtacccttaatctgaagaaagaaatgcaactgaattttgaactcttcttagtaggttttttttttttagtgacaggagtgtagcaatttgaaattacttcctatagtttcagattgaataaatgaataaatatatgatggttttttctatgaattttaagatagatggatagatcaatggatgtatagctgtagatacagaaatagatagaagtgtttatatttcctagatctgtctactaaaagggcctaggagcaatgatatgcaagtagcagatcatatctaatggccaggtcttagattttaaagatttttcctcattaaaataaatgaaggctgtttgaggaaatggtgattctatggctgaagcaggaaaagtaaatgaagaccatgaatgttgtgccaggtaataagaaagtgcctgatgggaacactttaaaggacagaggaaccaatggattaaagaagaaaacaagagacattagagtatatcttgagacaatgaaaacgaaaacacaacatgccaaaactcatggaatacagtgaaagcagtactagaaaggaaatttatagctacaaatgcttacattaaaaaagaaagatctgaaatcaacaatttaacttcacacttaaaggaacagtaaaaagaacaaaccaaacccaaagctacagaaacaaggaaataataaatattagggcagagataaacaaaacagggactagaaaagcagtagagaaattgacaaaacagaattgattctttgaaatgataaaaaaattgataaaactttagccagatggactaagaaaaaataagacaaattactaaaatcagaagtgaacaaggggacattataactgatttacagaagtaaaaagatttataagagaatattgtgagcaaatgtatgccaacaaatttgataacataaatgaaatggataaattcctcaaaacacataaccaccaagacagaatcatgaagaaacagaaaatctgaacagacctataactagtaaggagattgagttagtaatcaggtatcacccaacaaagaaaagctcagggccagatggcctcactggtcatttctaaccaatatttaaagaagaattaagtccaattttcctcaagctcttccaattaatgatatatttgataaagggttaatacccaggatatataaagaactcctcagcactttgggaggctgccgggacgggagaatttcttgagcctaggagttggagaccagcctaggcaacatggtgaaaccctggctctacaaaaaatttaaaaatttgccaggtgtgatggtactttgctgtggtcccagctactccgtaggctgaggtgggaggaccacttgagcccgggaggtcgaggcagccgtgagctgttgcactccagcctgggtgacagagtgaaaccctgtttcaaaaaacaaaacaaaacaaaacaaaacaaaacaaaacaaaaactcatacagctcaacaaataacccatttagaaaatagagaaaggactcgaatagacacttcaccaaagaagatatacaaatggccaataagcaaatgaaaagatgcctattatcactaatcattagagaaaggcaaatcaaaaccaggagataagacctcacacctgttagaatgcctgttataaaacaaaacaacaaccagaaaataacaagtgttgctgaggatgtggagaaattaggatgtggaaaaatgggaagccctgtgcattatttatagcaatgtgaaatggtgcaaccactgtggagaacagtgtggtggttccttaaaaattaaacataaattaccatatgattcagcaattctcaaaaagatatttgtacacccatgttcataacagcattattcacaatagccaaaaggtggaagcaaccctaacgtccttgaatggataagaaaatgtggtatgtatctacagttagatattattcagccttaaaaaggaaggagcggccaggcgcggtggctcacacttgtaatcccagccctttgggaggctgagacaggcagatcacaaggtcacaggttcaagaccagcctggccaacatggtgaaaccccgtctctactaaaaatacaaaacagaaaaattagctgggcttgatggcacgcacctgtaatcccagctactcaggaggctcgggcaggagaatcacttgaacccgggaggcagaggttgcagtgagctgagattgcgccactgcaccccagcctgggcaacagagcaagactccatctcaaaaaatattaataataataaaggaaggagcctggcatggtgactcatacctgtaatcccagctactccggaggcagaggtgggaggatcattagagctcaggagattgaggctgcagcgagctctgcacacaggaaattctgacacatgtctcacaacatagataaagcttgagaacactgtgctgagtgaaataagccagtcccgaaaaggcaaatactgtatgattccacttacagtgtgaatacattatgattcccatactgtatgagtctgctgatgacaaactattgtttttttgataatctggaagtgtctctatttcttgtggcattttaaataacagctgtattgtttttaaattattatttgtttatttttttgagacagggtcttgctctgttgcccaggttagagtgcagtggtgcaatcacagctcactgcagcctcgacttcctggttgagcagtcctcccacctcagcttcccaagtagctgggacaacaggcatgcaccatcattcctggctaatcttttgtattttttgtagagatggggtttcaccatattgcccaggctggtctccaactcctgggctcaagcgatccccccgcctcagccttccaaagggctgggattacaggcatgagctactgtgtctggcctgaatgacaggtctattgaaatacattacacatataaaattcacccattaaactgtacaatccaatggctttgagtatattcacagttatgcaaccatcaccgcaatcaatgttggaacattttcatcagcccacagagaaatttgcataccccttgccatcatccccaaatcctctcatctttcccaaccctaggcaatcagtagtctacactgtatccatggatatgtctattcttatacatttcatataaatggaatcatacactagttcatcttttgtggctggattctttcacttaacataatggtttcaaggctcgtcattactgtagcatttatcagtactatatttttttgtgtggccaaataacattttgttgaatggatatacacattttatttatccattcatcacttgatggacatttgagtggtttctgaatttggctattgtgaataatgctcctgtgaacaatttgtgtacaagtatttattttgagtacccatttttcactctttcgcatatatagctaggagtgaaattgctgggttacatggtgatatggtttgcctgtgtccccattgaaatctcatcttgaactgtggctcccataatccccatgtgtcatgggagggacctcgtgggaggtaattgaatcatgggtttttcccatgctgttcttgtgagagtgaataagtctcacgagagctgatggttttataaaaggcagttcccctgcacacactttcttgcctgccaccatataagatgtgcctttgcccctcctttgccttctgccatgattgtgaggcctccccagccatgtggaactgagtccattaaacctctttttctttataaattacccactctcaggtgtttcttcatagcagtatgaaaatggactagaacacgtggtgactatgtttcgttttttgaggtactgcttgactgttttccaaagtggctgtgccattttagagtcctaccagcagtgtatgagggttctgatttccccacattgttgccaacacttatctgttgcttttattatagctactttttaaaaataacagctttattgagatataattcatataccatgaaattcacctttaaaaacctagtgtacaattcactgcccttgatttgtgaaagatattttttctgggaaaagaattctgggttaatttctatcagcacatcgaagatatcattccactgtcttttgattttcatttttgctaaagagaaatcaattttttgtccatatggtacactgatatatttgggtgtggatttctttttatctctgcttggaattttttggctttctcaaatctgaaggttagtgtctttaattagtcctggaaaagtcccagctgttatcttttcaaatattaattcttccctattttctcttctttctggaactctggctagatttatgttagactttctactctgtcttccatgtctcctaacttctcatattttccatctgttttctctatctctctgtgtgtgcatctattaagtcaaaaactatgaagggtctgagattttaccctacatttatagctatatttatctttagccacttttctgaagttctaattatctattgttatgactgattttctttgggttgtattggtatattatcaagttgtctacatataatgataatctcatctcttctagtatttcctttttcgaatatttttgcattggcaagagcatccaatatgggagtgaaaatgagagaacaatattgtttttgctgttgtttttaatggattcacccctagtgtaaaatatatggtatttgttggttctagattttaaacacttgtaattttgtgttttaatgtgtttgttagacatggtttgagttttattaggtgccttttcaaaaatgcattgataatacatactgtgtgattctatatatatgaatcaagaagtttaagaaaccatgaacgaagagaacatatgacataaaattctgtcaaaaatctctctttgtctagaaattgtgtttgatgtttaattttatcagagaacagaaagttgcttgccccagtgccccagttaaggtaaagctgaggttcataaatacctcaacttaaaaaaatacaaaaagtagattttttgatcgttcttagttaggctcaccacctttgccccagggaaagtaactcctcccctttgaacagtcactgagtgaggcttacagagcgacgctctgtttttcaggaaccaccccctaaaatctccacttttagcagaagactggaaacagaaacatctaaatgttacttggcactgaatgtcttggagtagtctttttggcagtctatcccttgatagactgaaatagccatctttgacaacaaaatgaataaaaagtaaggtttgacctagtcttaattttgatagatccccaaccagtaactttagtgtcacttatttcaaagaaaaggcactctttttttctgctgtgtttttctccatcccatgtctctctctctctctcttttttttttaaaggtttattgtgtttacttttattctttttttatttttgagacagggtctctgttgcccaggctggagtgcagtggggtgatcatggctcactgaaacctcgacctcccgggctcaaatgatccttcccacctcagcctcctgagtaactgggactacaggcatgtgccacctcactcagctaatttttgtgtttttttgtagagacaggtcgtactttgttgcccaggctgctctgcagctcctgggctcaagcgatcctcccgctttggcttcccaaagtgctagtattacaagtgtgagccgccgtgcccagcctatttgaaaaattcttaatagccagttttaaaggtaatgcttgaagcttacatttcctgtgactttttttttttttttttttaaacacagggtctcactgtcaccccagctggagcagtggcacagaattgctcactgcagcctcgaactcctgggctcaagggatactcccacctcagcctccctgagtagttgggactgtaggtgtgtgccaccatgcctggctaaagatgggatctccctgtgttgcccaggctagtctcaaactcctgggctcaagccatccccctgcctcagcctcccaaagtgctgggattataggcgtgagccaccgctcctggcctgcttatttatattcttttgtaatggcatgataacttctttcatatatgtaggagaaaattttaatcattttccagattgaacttgtgattcttgtggtcattctaattcataggtttatttttttagtttctggttgctcattgcacccagaaattgttcctttttttaatattgtgaaacttcactagcctcaatttatttgttttcagttaatttttctcctttatcactggtctttgttattgtggatgaacaattttttttaagagatggggtctcacagtgttgcccaggctatagtgcagtggctgtttacaggtgtgatcatagtgcactacagccctgaactcctgggctcatgcaatcctcctgcctcagcctcctgagtagctgagactacaggcatgttggtgaacaattttctttttgtgtccaacaattgtatcgatattttgatggagtatgtacagaagagacacccttatggttcttagtactcaccaacttcctgaaagcattcccactgaggattttgagtaagaaaattatgtactcattaccatacttcagaatatgattctggctggagggtgctacctcgtgaggaataaccaaagagcagtgcattttaaaagcaggaagaggtcccctggagttaaggttgactgcatgctagctgtgaatccatagtgtaatcactacagttataaaatagttaatcaaacaattgtactcctgggatggctaagtagacatataaaaccatgctgtggagtaatgtaggaaatctcttattaaaatatcatggctagttttgatccaaaaataagtaagttatggaaggaatgtgggaaaagggtaagtaatgatgccatagaccactttgttctgcttagtgtcattaagactgaagatctgtgtacctctgcctccttgtcagtagtctactttgttgatgttgaaattcttagagggcaatagtctgacttcactctttatcacttcgtatttattcatgtgggaaagactcccacattgtacaggaccttgaagaggggacgcctcaacaaaagatcaaggcttttattttttatttatttatttattttttgagacagagtctagctctgtcaccaggctggagtgcagtggcacaatctcggttcactgcaacctctgcctcccgggttcaagcaattatcctgcctcagcttcccaagtaactgggattacaggcacatgccaccatgcccagctaattttgtatttttagtagagacagggattcaccatattggccaggttggtcttgatctcctgacctcatgatccgcccacctcggccttccaaagtgctgggattacaggcgtgagccaccgtgcccagccaagatcaatacttttaaactggattccaaatggtgaagtgccctaggaaatgcagagattaaggtcttaaaatattctccattaaaaagatcagggaggctgggcgcggtggctcacacctgcaatcccagcactttgggaggcggaggcaggaggatcccttgagcacaggagttcgaggccagcctgggaaacatggtgaaaccccatctctaccaaaaatacaaaaaaattagtggggcatggtggtgtgcacctgtggtccagctgtgtgggagggtgaggtgggaggaacacttgagctggggaggcggaggctgcagtgagtcaccactgcactccagcctgggcaacaaagtgagaccctgtctcaaaaaagaaaaagaaaacaagaattagggatgcttgacgaaatggccgattccaaatctggtgcaaaaaaatgcataaggtatgcctggaacatcttttgagaggaaagaagctctcaatgactcataaggttaagtcataaggactgaagagcccgcctgaaaagactcccactggccaaacatgaatcaatttgagaatcaataaggatgatcactgtattggattgaaacacacctaatatgtttaatccatgagttcataatgatactgaaaaaaaattcatcactatttgaaggtggtgaaagaatgaatatcattttttatttattattgttaatgtatgtaagggatacaagtgtagacttcttttttgttgttttttgaaacagggtcttgctctgttgcccaggctggagtgcagtggcacaatctcagctcactgcaatatctgcctcctaggctcaagcagtcctcccacctcagcctcctgagtagcagggaccacaggcccgcaccaccatgccaggctaatttttttatagttctttagagacagggttttgccatgttgcccagcctggtctcaaactcctgggctcaagcgatccgctcacctcagcctcctaaagtgctgggtctatgggcatgagccactgctgccagccacgtgaatatactgtatagtagtgaagtatgggcttttagtgtactgcatcattattttgaaacttacgataaaagtcttacagctggctacgcatggctcacacctgtaatcctagcactttggcaggctgaggtgggagaatgacttgagctcaggagttcgagaccagcctagtcaacatggtgagaccctgtctttaccaaacatttaaaaattagctgggttgtggtagtgtacacctgtagtcccagataactcaggaagctgaggtgggaggatcacttgagcccaagaggtcgaggctgcagtgagctgtgattgagccagtgtactccagcctgggcaacagatcaagaccctgtctcagaaagaaaacaaacaaacaaaaagtattcctgctaatgagtgaaagaagtaataacagaatcgaaatgtcaccattttggaggtggacttccaaaatggtggagtaaggacctcagggtgtatgtatagctgaaacaatattggatgagttgataattgttgaatctgggtgataggtatgtagggattcattccttccatctacttttttgggggtaataattaagatataattcacatgccagtgtgaattattcaatgtttattaaataactagctatattacctaaagcatgttaaagagggaaaagaagcagaaataattccttctggagaaagtgggacaaaagctgtattatgatcatgcttataaacatgaagatttctcaattggatgtaacttagtttcttctaaattctgattttcactgttatctaaagtcaagatggttgatagatatgggttaatgagtggaacacggcttatgcgaaacttcatatttctagaaatatcatctagtgttaaccctgcctcctaagatatatgctataaaataaaaatagatgtctagtaaaggtagggaaaagggtttatggggttataactatcagctaaagtgaggatttttttaactatgcatggattacagctaggatcttcctttagccccagtaattttaaggtggtttaagctgtttgttatcctgggctatagctcagcgttaccacagcttgttacacagagatataaatgtgcttggtaaacgtattctttcaggttgaaactagatgattatgaagcatagtatcttgctggtaaacctttgctctcattggtggtggtgttcctcctttccccagttctgcccttgtgcagaattcagttattcatttgttctttgggctttccgtgtgctttgatcatttcctcccacctcgctcccttccagctttcatttatccttccaggccaggtcccatttttctaaaagccctttcctaataatcccctccctaatgtcttttgtacttattttagcattgtggaggaagagagggggaacctggttattctgttattcaagtgagccttcagttagttgaagattatatatttcaagtgtcactagttgtaaatgtcaaaacagtctattgaccaaaaaaaaaaaaaaaaaaaaaaaaaagtcctattactctgggcacagttggaacaatgcctgtttgaatcaagtccttcctcccctcaaaaaacattgtgattaatgcaaagtacctaactccactgatttctttttccctcactttttaggattatggctgctgttcctcaaaataatctacaggagcaactagaacgtcactcagccagaacacttaataataaattaagtctttcaaaaccaaaattttcgtaagtgttttgactggtttgctgtcacataggcactaacttaccacattgtacacatgagatatcttctctttaaactcccccattgtacagatgaggaaatgaagctgagagattcattgattttcccactttgccaattaatggtagagtatgttttagcagcaccaggtgagattgtgtctcatctttgcatggttcctggcacataatatttgctcaataaagatttgttgagtaaatgaataattgatcttgtaaatttgggcaaataagtgttttttaagttttggggggtttttttgtttgttttgttttgttttgttttttcttttgagacggagtctcgctctgtcgcacaggctggagtgcagtggcgcgatcttggctcactgcaagctccgcctcctgggttcacgccattctcctgcctcagcctcccgagtagctgggactacaggcacctgccaccacgcctggctaatttttttttgtattttttagagacggtttcaccttgttagccaggatggtctcgatctcctgacctcatgatccacctgcctcggcctcccaaagtgctgggattacatgcatgagccaccgtgcccagcctttttttttttttcttttttgagacggagtttcgctcttcttgcccaggctggagtgccatggcacaatcttagctcaccgcaacctccgtcttccgggttcaagtgattctcctgcctcagcctcccaagtagctgggattacaggcatgcaccaccatgcctggctaattttgtatttttagtagagacaggatttgtccatgttgggcagactggtctcaaactcctgacctcaagtgatccgcccaccttggcctcccaaagtgctgggattacaggcgtgagccaccacgcccggccaattattttaatataattttatatactttcgaagaacagtttataaggaaactacagctctccagttctgcctctcctctaagctatactccagactccttctaatgatatctaataataatttatattataagtgatgcttttaccaggttgtagactttgttctgggtgcctggctttgaagtcaccactgactttgagatcattaaatccagcagatagccacgattcctgcgtcttttacttgtcctgcagattttaacagagttagcagtttttaactctttttcccctttaagttcttatcagagtagcaaaaagtagccatatttgaatctcttccgtttttcttttttctttttttttttttgagacagtctcgctctgtcacccaggctggagtgcggcagtatagtctcggctcactgtaacctccacctcctgggttcaagctattctcctgcctcagccttctgactagctagggcttcaggcatacaccactatgcccggctaattttttgtgtttttattagaggtggggtttcaccatgttggccaggctggtctcgaactcctgacctcaagcattccacctgcctcggcctcccaaagtgctgggattacaggcatgagccactgcacccggcctcttccctttttcatttatgctgtcaccccgctctggagatgctattaactaaggactactagcctgagaaataaagtagtgggaatgacctctcaaagccaaataattagcctctgaatgggaaggaccagagaacgaatacaatttaagttacctgataaatttaaaatcgagagagatggattctttgctcagttgggatacaattaatgtaacctgtgtgaattagtttaaaaaattagttttgtagagttggggggtttcttaaaatggatccatctaatctagtttttccattatttttcagaggtttcacttttaaaaagaaaacatcttcagataacaatgtatctgtaactaatgtgtcagtagcaaaaacacctgtattaagaaataaagatgttaatgttaccgaagacttttccttcagtgaacctctacccaacaccacaaatcagcaaagggtcaaggacttctttaaaaatgctccagcaggacaggaaacacagagaggtggatcaaaatcattattgccagatttcttgcagactccgaaggaagttgtatgcactacccaaaacacaccaactgtaaagaaatcccgggatactgctctcaagaaattagaatttagttcttcaccagattctttaagtaccatcaatgattgggatgatatggatgactttgatacttctgagacttcaaaatcatttgttacaccaccccaaagtcactttgtaagagtaagcactgctcagaaatcaaaaaagggtaagagaaacttttttaaagcacagctttatacaacaaacacagtaaagactgatttgcctccaccctcctctgaaagcgagcaaatagatttgactgaggaacagaaggatgactcagaatggttaagcagcgatgtgatttgcatcgatgatggccccattgctgaagtgcatataaatgaagatgctcaggaaagtgactctctgaaaactcatttggaagatgaaagaggtaac

SEQ ID NO: 180 - DNA, 28613 bp, Homo sapiens
  source 1..28613: mol_type = other DNA
gattgcgcacccgcgacttcagcccgaggggcggggattttcttggagcgacgggacgcgacgccaatcgcgacgaggcttcgccccgtggcgcggtttgaaattttgcggggctcaacggctcgcggagcggctacgcggagtgacatcgccggtgtttgcgggtggttgttgctctcggggccgtgtggagtaggtctggacctggactcacggctgcttggagcgtccgccatgaggagaaggtgcgggttgcggggaaatcgaggggacgcgggagggagcgacgctcgtttcggctgcggggcctgttcaggggtgcgggacccgtgcggggtcccgggcctagatcgtcacggcagtcggcgccgagggaggccgggggcgctgaggggcagggtctggaggcggcgagccagtgcgagggccgcggcggtgagacctgacgcgctgtccgccggcggccgcaggtgcccgcaggctcagacgcccgggtgggagccgagcgccggtgcccggacgcggcagggtagtcgaggcccggggcccggggcggcctccacccaggcggtcagcgctggcgctcggaccccaccctccccgcccgcagcgtctcaggtgccgctgcttggcgcagatgactcgttgtaaaccttctgtggtcgtggcttttctttaaagctgttaagtttatttatcgttgtttttctttgttttattctttttttttatttttgtggaaacgcggtctatgttggccaggctggtctcgaactcctggcttcaagtaatcctgccacctcggcctcccaaagtgttgggattacaggcgtgagccaccgtgcccggcccgttgtttttctttatatctggccagcggtgttaacgttttgtttgaattggaaagatagctttgtttctttgcaagttaagaaacggattatggaattcttttccggtcgttttaataacttcctaggcggtgttggggagggactgtccgacttgaaatcgggaccagacggtgacactgccacttaccaaccttgtgacttccaaatattaactttattttctaaaagttgtggatgcagttttctgatgatacagcgttaaataatgtgtagtttttggtggaactgattgttctaaggctttgtaagattcttcatttcatgatcactaattctgatcagtctttttaaaatgcttgccctcagaataatgagaattgagtgccaacatggtaaaaccttgtcttaactaaaaatacaaaaattatctggccctggtggcgcgcctgtacccccagcttttcaggaggctgaggcaggagaatcgcttcagcctaggaggcagaggttgcatgagccgacatctcgacactgcactccagcctaggcgacagagtgagactacgtctcaaaaaaaaaaaaaaaagtccattaacagtttatgaattatgtaggcatctcctctatcaagggattgaatgaagcaggagaaaacttaccctttaatgttggttccaggctaatggatataattaacttttttttttttttttttttttttttttttgagacggggtctcactctgtcgcccaggctggagtgtagtggcgagattgctcactgcagctttgacctctgaggctcaaacgaaactctggccagaattaattatggttatcgatccccgaaacaggttgaactggagatcaacaaagctccttctctggaatgctaagaaaaaatagggcagtggatcagtgaaggctgcctgaaggtagaaaataatttaaggaccactgtgagataccttccagtccagtgatttatgttcaagactggaaaaactgactcattttacaacctttttgtccttgagtggtagtctttgtatgcactcttgatttttttcagtgaatctaaaaaaaaaactcagacttgctgcttttaggggattatctgaaacaatttagccagggagtatttaagtgtatcatgataattgttcataatgattgctctgaagcatcttaagatcatacaacttttttgaaatgtcacgttattcattcaaaaagacttcttgggcctggcacagtggctcacacctgtaatcccagcactttgggaggccaaggtgggaggatgacttgagcccaggagttcaagaccagcctgggcaacatagcaagaccctgtctctatttaaaaaataataatttatactaaaaaagaaaagaaaaatacttcttgaatgtttgttatatacaaggaaccattgcaagtgttggggatatagcagtgagcaaaagtgacatccctgccctcacagagtttatattctaatagcaaaagaggagtgtaataaataagttagtcttaaatggtggtaagtgctatgtagagaaatcaagaggttaagaagtactgaaggtgtaggaaggggggttgtggttttaaagagatgggtcaggaaaggcctccctgagaaggtgatctctgagcaaagacctaagaaggaaaagggtgaagccatgcagcatgggggaaaagagatctaggtagaggaatcagcaaatccaagtgccctaaggggagatagcgcctggtatgttccagaaagagcaaggaggtcgctgtgacaggaatagaatgagcactgaggtcaaaagaaatggctttcagatggaatggggctccataggtctttggaaagtcagaggcttttccttagagtgagatggcaagtcgttggagggttctgagtagaagattaggacttggggctcctgtgttgacaatggacttaaggaggccagcttcgaagccgggagaccagttaagaggcccctgccatacagcaagaagttggtggtggtgacctggaccagggtgggggtggtagtggtagcagcagaggtcaggaggagtgagattctgcctgtcttgtgtagataatgctaatggcgggcatataagaaagaagtgtcaaggatgatacaagatttaagtttaaaaaaaaaattaagttcagtacaatttgaatgttaggaagagtgagaaatgttagtttttaatttgaaaatgatcctcttacaggaagtgtctctaactagaataataataatgggtgtttggtaattccaaacacccatttccaacaggccaaataaaatacgttatatattagtaaaatttttatttctttttttttttggagacagtcttgctctgttgcccaggctggagtgcaatggcatgatctcagctcactgcaacctccgcctcctgggttcaccgggttcaagtgattctcctgcctcagcctcctgagtatctgggattacaggcacccactaccacgcccagctaatttttgtatttctagtagagatggggtttcaccatgttggccaggctggtctcgagctcctgatctcaggtgatccgcccgccttggcctcccaaagtgctgggattgcacacgagccaccgcgcccggccatagtaaaaatctgtaagtttttcaattaagtcacaaatcaaaaacatttcagattatgggccgggcacagtggctcacgcctgtaatcccagcactttgggaggccgaggcggtcggatcacgaggtcaggagtttgagaccagcctgaccaacatggtgaaaccccgtctctactaaaaatacaaaaattagccgggcgtggtgccgtgtgcctgtagtcccagctactcaggaggctgaggcaggagaatcgcttgatcccagaaggcagaggttgcagtgagctgagatcacaccattgcactccggcctgggtgccagactgagactctgtctcaaaaaaagaaaaaaaaaagaaaccaaaaatgttttagattatgtgccaagatgtttttaataacagctttgaggtataatccacataccatacaatgtacttaaattgtatattataattcagtgatttttagaatattcagagttgtgcaatcatcactgcaatcaattttagaacatttttatcacccctttaaaatcccattagcagtcaatcccctttcaccccatggtccaaattctccccagccgcaactacaaatctacttttcggctaggcaaggtggcgcacacctataattccagcactttgggagcccaaggtgggaggactacttgagcccaggagttcaagaacagcttgggcaacatagagagactctacctcttaaaaaaaaaaaaaaaattatttatttatttatttatttattttattttttattttattttattttattttttgagatggagtctcactctgtcacccaggctggagtgcagtgacgtgatctcaggtcactgcaacctccacctcccggattcaagcaattctcctgcctcagcctcccgagtagctgagattacaggtgcccaccaccacacccagctaatttttgtatttttagtagagacggggtttcaccatattggccaggctggtctcaaactcctgacctcgtgatccgccggtcttggcacccaaagtgctgggattacaggagtgatccaccgcacccggcctaaaaaaaaattttattgtttaagttagctgggtgtggtggctcacatctgtagtcccagctactccggaggctcaggtgggaggatcacctgagcctaggaagttggggctgcagtgagccatgatcatgttactgcactccagcctaggtgaaagagggagaccctgtctcaaaaaaccatacaaaccccaaatctactttttacctattctggatatttcataaaaacggaaccgtagctctggtcttttgtgacttgcttctttgacttaacataatgttttcaaggtttattgccaaataatattccattgtatgcctatatactacattttatttacccattcataagttgatggccatttgtattttttttttcactttttggctattataagtaatgctgctataaacagttgtgtagtttttgtataaatgtgttttcatttcttttgggcaaatacccagtaataaaattgctgagttgtatgaactctgttaaactgaggggccgggtgcagtggctcatgtctgttatcccaacactttgggaggccgaggtgggaggattgcttgggcccaggagttcaagaccagcctgagcaacatggcaaaccttaaaaaaaaaaaaaaaaaaaaaaattagccaagcacgatggcacgtctatggtcccagctacttgggagactaaggtaggagaattgcttgagcccagggcgttgaggctgcgttgagctatgatcacaccactgcactccagcccaggtgacagtgaggccctgtctcaaaaaacaaaaaatcaattgaggaactaccagactattttccaaagaggctgtaccgtcttgcatgcccacaagcagtgtctgagggttctagttcctctagattctcaccaatactttttgctatatatttttttttattataccatcctgttggctatgaagtggttttgatttgcatttccctaatgactaatattgagcatcttttcatgtgcttattggccatttttatatcttctttggagaaatgtctattcagattctttgcccattgtgctagatttttttactcagaaaaacgatcactttaccttctagatgtgttacagagataggcagccctgcttgtaaaccttcgtcaggatccagagtgcataatacctctattaggttaggtaggttaggagcataggaccctttgggaggaattcagggccattcattttatatctattgaacaactactgtgagttagggtgtggtaaaatgaagatgaataagatgtggtggtccttgcccttgagtttatggtctactagggggcttggggggaatggtgagtgacaagtccacagctctccagaggaggtggtggcatatagacggaactgaatgtacaaagcgcggtggcatcagaaaatgagagttgcatgtggtttattgaggggcattgttcaggaaatgcccgggaagttcagctggccagagacctggggagtgtcaagtgggagagattagcagacagactcggagagaggttttagaaggcctttctacagaaggtggttgaactatttcctgagggcagtggagcctttgaaggggagtagttaagcggggatctgatgggatttattatgaacaactagctgttatgtggagattggctgggcaggggtaggtctgtcagactgaggagactgggatacttaagtaatgaccttcagagcagtgcccctggctggcctgtctggaagccagggttttgcatccagatcgaatattggccacagattggatcttaaaagttatttttaataaaatggtaatattaggattttaacttgtgcattcttttgtcttcaaaatgaagtgcaaaaggagtgtttgcctggggaagctctttagttggactttagttgagattatgttaaataaatgccttacttactgttaacatttctctttttttcctttaagttctgttggacttgaactgttaacatttctaaagtgaagggagtaccgtaaattcttttaaacgtttgtcagtatttgggtattggtatggccatctggtataggcaacaggtatttgtgtagaaatgtttcttcaacaaggacgggcaacctctaaactaggatttcgtggctggagatattttggatgtgaatgtattaacagctttggagagacacattgttagagatccaggctggtgacttgtagaaccaccgaaagctctgagacagaaaggggctaatgaaagtctctagttgcagttgggtgtggatggcacacaaagaccttaagtgtttaggtgatttgctgcaggcttctcggccgactggaagcagagcacatctagattgtagtttctctggtgccagggcagtcttagttgtcctgttatacctaagaaaagggagaaaaatttctattctttaaatgttctgtaaagcagactaattgtgataatttttaaagtaagctgttcttaaaagataagatacagaagccagttaaatttgtattttagataaataattttttgttaaaataagcttttggtaattgaagaataacatacattcagaaacgtacagaaatcaagtgtaaactcagtgaattgttcacagttgatgcacctgtgtaagcagcaacccagaagccctctaccagtcactgcctcccctgagccaaaagaactactatcctgacttctgaaagcattgattagtttggcctggttttgtttttgctttttttgttttcgtttttgagatagggtgttgctttggagtgcagtgatcatagctcactgcagcctcatcctctcaggctcaagcaatcctcccacctcagcctcctgagtagctgggactataggcatacgtcaccgtgcccggctaattttttttttttttttttttttaagacgcagagtctcactatgttgcccagaatgatctgaaactcctgggctcaaacagttttcctgcctcggccttgcaaggtgctaggaatacaggcgtgaactaccgtgcctggccagttttgcctgtttttgaactctctgtcaacggaatcacatagtgatacacatttgcatatctagtggcatttgctcagcctaaagtgttttttttttccttcctcttccccttacaactattttttagttgtttattttacttcattaaaaaaatgaaaagatttgaggtataattcatacacagtaaaacagactcgctttacaggtagtttcaattgtatactgttgtataatcgccatcaagatctagaactatttcatcaccccaaaaaagtaaaataaataaataaataaaatagaaatataataatttgagctttatccatatcatgtgtagtgtgttcattttcttttttgacagtttcgctctgtcgcccaagctggagtacagtggtacaatcttggctcactgcaaccttggctcactgcaaaccctgcctcccgggttcaagcgattctcctgcctcagccgccccagtagctgggattacaggcgcaccaccacacccagctaattttttgtgtttttagtagagacagggtttccccatgttggccaggctggtctcctgacctcaagtgatctgctcccctcggcctcccagagtcctggaattacaggtgtgagccactgcacccagccagtttgttcattttcattgctgcattagtgcattgtaggaatgtactattcattctgttgatagacatctaggctgtttctgtttccctgctattatgagtagtgcttctctaaccattctcatatatgtctttggtgaacgtatgtgttcatttctgctaggtatgtatgtagaggtagaactgctgggttcagctttagtagatagactgccaacagtttttaaaatagttgtaccaatttacaccatgccagcagcatatgaaagttctcacttttctatatactcaccaacacttaatgctgtctttttaactttagccattctttgagctgctagttgtaatttaagaagaataggccaggcatggtagctcacgcctgtaatcccagcaatttgggaggccgaggcaggtggatcacttgaggtcaggagttcgagaccagcgtggccaacgtagtgaaaccccatctcaatggctttttaactttagccattctttgagctgccggttgcaatttaagaatactaggcccgggcgcagtggctcatgcctgtaatcccagcactttgggaggccgaggtgggtggatttttgtgtttttgtaaaaatacaaaaattagctgggtgtggtggcacacacctgtaatctgagctacttgggaggctgaagcaggagaatcacttgaacctgggaggcggaggttgcagtgagctgagatctcaccactgcactccagccagggcaacggagcgagactctgtctcaaaaaaaaaaaagaaaataaaaataaataaattaattaaataaaatggcaaggcacagtggctcacatatgtaatcctagcactttgggaggccgaggagggcggatcacttgaggccgggaattcaagacccacctggctaacatggcgaaaccccaactctactaaaaatacaaaaattagctgggtgtggtagcacctgcctatagtcccacctactcgggaggctgagtcaggagaatcatttgaacgcaaaaggtagaggttgcagtgagccaaaattgcaccactgcactccagcctgggcgacagagcaagatgctgtctcaaaaaaaaagaaaaaacaaaaaaaaaacaccaaaaaaatagtaataaattgccaaacattttgcaggagtttctcaccagcaagttcttgtgttagtttattttaccaacatcttttgtccggtttttctttagtaaaagtatttataattctgtattatacttccataggtagatcattgttgaaagtccagaaggttgagcttccatgatgtaatatgatatgaaatcttgtattgctagtggcatttggtaggaaaagggatggggagtggttaaaggtgaattaagctgaatgcttgttttcaatttgtttttttctcgaggccactgagaagctagtctttttagttctcgaaaatagtgcttttagtccagaggctgtgactgatgtaactaacaggccttagtttttggttttcagtgaggtgctggcggaggagtccatagtatgtctgcagaaagccctaaatcaccttcgggaaatatgggagctaattgggattccagaggaccagcggttacaaagaactgaggtggtaaagaagcatatcaaggtgggttgaatagtactggtctctgcattggaccagggtaaggatgttggtgtctcacccgagatagcatacagaagggacatgtgatcatcggcattaggatagcacaggctcttcctgtttggtttggtttggttttgaagtcccttcttgaaatttgaggaggctgggtgcggtggctcatgcctgtaatcccagcactttgggaggccgaggcgcatggattgcttgaggtcaggagttcaagaccagcctgatcaacatggtgaacctccgtctctactaaaaataaaaaaattagccgggcatggtggtgagcacctgtaatcccagctactcaagaggctgagacaggagaatctattgaacccggaaggtagaggttgcagtgagccgaaagcacgccattgcactccagcctgggcaacagagcgagactccatctcaaagaaaaaaagaaaaagaaaaaagaaatttgaggagtttggtattggtgttgggagtttttttcctccattgccccaaacttatggactgttttccctcttgtaggaactcctggatatgatgattgctgaagaggaaagcctgaaggaaagactcatcaaaagcatatccgtctgtcagaaagagctgaacactctgtgcagcgagttacatgttgagccatttcaggtccgtggcagcccacagggtctctggtgatctgtctggggcctgagacttagaaagcaacgttgacttgggcctgcagatggaaggcttcctcgtagggatggagctagacgtaagaagtggggaaaacatgctgtgtagttaattaggcccagcagagtaattctcacctctgtagagagttgccctggtaagaggtgaagcaactaatagatgatcaaaaagaagctgctgcttaccatagttttgctttgtagggaatatgaatttttttttataaacgctgagaaaaaggtaggcatagatggtgctgcagtgttctttctctgaaagaaaatgaaaacaggaacaaaagtaactaatgattaaaaggaatactatgaaaacaccaacctttgtgggttttatcatacccagaagctgcataccactgaaccagccaaaatggcttcttcagaagaaatgtctcaaaagctggaatactgggagtgcatagtccatttcagagcatgccatgacatccatctgggtatggagctgagaagtggctatattgtggtccactgcaagtcagggacttgagtgaggacacagcaaggatgaaatgaataacagatggggtcctgaaaatctctgcttagaaccagtaaaaatagtgccaggatcataaaaattaggacagatgtggagcttggaaagacaatgagtacacccataaggttctcaggtccctcttcctgttacaggaagacctgcctggatatctatttggagttagcttaggagggagatcacctttaaagggcaaaggataattcatacttggtagccaagagcaatcaggcagaagagaacatgaagtggagcttcctggagtcaacataaatgtcataaatataattgattttggacatagtttctctttcttttttcacattccatgtgaaattgggcgagaagtgaggtgtacaacgatcatctcccttaagttacctgatgttcctagttcacaatgttaaatgaaattgtgtaaatgtataggacatttaagaaaaatgtatatgtcctataaaaaaatgccacttttttttttcttgttaaccagttaggagtagagcagggactaccagatgggtttttgttgctaaggtgagacgatgttcataggattagcaggatgagtatttagatatgagctaggcatgccaccctatagctaacccaaagcaagctttccagccaatttacactgttatttctttatttatttagagacagagtctcgctgtgttgtccaggcaggagtgcaatggtgtggtctcggctcactgcaacctccgcctcccgggttcaagcgattttcctgccgtagcctcccgagtagctgggattacaggtgtccgccaccatgcctggctaatttttctatttttagtaaagacggggtttcaccatgttggccaggttggtctcaaactgctgacctcgtgatctgcccaccttggcctcccgaagtgctgggattataggcgtgagccaccgtgcctggctgccaatttacacattctataaaagtgcctggtgcctggagtagtctaatcatagagacaaaaggtagaatggtggttgccaggcttggagaagggaaaaaatggggacttatttgtttgagtatgaagtttcacttttgcaagaggaaatgagttttggaggtgatggttatgattgcacaacaatatgactgtacttaataccaatgaactgtacacgtaatggttaagatggtaaattttatgttatatgtgttctaccacaagttttaaaattggggggaaaagtaccctggtacttactcacttttcctcactgggaccttccttaggagaccctctttgtgccatattctgttgaccatgagttgacttacttgttagtttaactgaaagtctgtcatccacgccttcttatgttgtccttctcttcctctgaaggaattcacttggaatcttataacagtggtacgttgtcttattcaggaagaaggagagacgaccatcttgcaactagaaaaagatttgcgcacccaagtggaattgatgcgaaaacagaaaaaggagagaaaacaggaactgaagctacttcaagagcaagatcaagaactgtgcgaaattctttgtatgccccactatgatattgacagtgcctcagtgcccagcttagaagagctgaaccagttcaggcaacatgtgacaactttgagggaaacaaaggtacactgcctacatttgttcttcctaaaagtcactttggttttcctctaggtatcttgtaattgctttgttttaaaggcttctaggcgtgaggagtttgtcagtataaagagacagatcatactgtgtatggaagcattagaccacaccccagacacaagctttgaaagagatgtggtgtgtgaagacgaagatgccttttgtttgtctttggagaatattgcaacactacaaaagttgctacggcaggtactgtcttctcaaattatgccctaggatctccgtagtatatagcagtttgaacaaaactgacagctgtttcttcagtcttaaataaggagacaatgtaaggtaagagaatgagggaagctaaggatagtaatatatgatatacaaccttgatttttgtttaacagttaaaaaacctttatatggctccaagaaaatgaaattatagatgaaataatattagtcatttgaattagactagtgtttaattaaaatttttttcagttctaaatttgaatgctaattcttggggtctgagatcccgacagccttacagctcgtgtttaggaggcatgaaaacatgctactttgaactctcatgaaagtgcctcctcctctactccagacatttctttgcgggaggctagagggctagcctctgtgctgctgctttgccgtgagtgacactggctttctatgctgtagctggaaatgcagaaatcacaaaatgaagcagtgtgtgaggggctgcgtactcaaatccgagagctctgggacaggttgcaaatacctgaagaagaaagagaagctgtggccaccattatgtctgggtcaaaggccaaggtccggaaagcggtaagaaacccagtgggtactgggtcagcagtcttctcttagcacttctgtgttagtcataaagactgttgttgatttggccaggctcagtggttcatgcctctaatcccagcactttgggaggccgaggcaggtgaatcatttgaggtcaggagttcgagaccagcctggacaacatggcgaaaccctgtatatactagccaggtggtagtggcgtgcgcctgtaatcccagctacttgggaggctgagacaggagaatcgcttgagcctgggaggtggagggttgcagtgagccagaatcgcgccactgcactcctgtctgggcgagagagtgagaccctgtctcaaaaaaaaaaaaaaaaaaaaaaaagtgttgatttataatacctttgtggctttgcattataattttacttaaaagggggggatcttttgcaaacctgagtgaatataaaactatggcagccacccttaacaagtttctttctttcagctgcaattagaagtggatcggttggaagaactgaaaatgcaaaacatgaagaaagtgattgaggcaattcgagtggagctggttcagtactgggaccagtgcttttatagccaggagcagagacaagcttttgcccctttctgtgctggttagtacaagagtgaggtctttggtttgtttgtttggagacaggtcttactctgttgcccagcctagtctcaagttcctaggctcaaacaatcctcccaacttggcctcccaaagtgttgggccaccacacccagccaaaagtggggtcttcatgtggcctgctcactagtttttaagacatccagacattcaacaggaagtatatccttttctgaacagataaagccaccttttcaagacatttagcataattgccattcctgtatgaaaaagcatttgcaaattttattgggaaatattggtctcttgctttctgaagcaatatgtcactgtagcctctagctgtgaagcttaagtttttatcaggtgcttactttttgccaggtgcagtgtcaaacccttaatattatttcacatcctcatgtcaagaggtgaggatactaaagcacataaatgctgagtcatttaacccagagacatataatggtaaatgccagagcctacgtttgagccaaaaggagcttgactcctggagtccagttgaatgctagtctgaactgcactgaatataaagatggagctaccccaactaaattcaacagatgtttttgcacattttctgtgatccacccctctactggctgggcaagacagaaaagcagaatatgaaagaaaccgaagacaaggcaagagatgatgcagatttttgacaacattattttagtctctatcctagtctcttaggccctactcccccaggctgattgtgacaaagctggtttttattaaccactatatatctattacacacacacacacgcctcttcctgtatcagtttactataaggaaagaatctatttccattttagggaatcggggattcgtaaaattggatactaaatactagaggaattgttttaaactactgggcctatattttgcagaggactacacagaaagtctgctccagctccacgatgctgagattgtgcggttaaaaaactactatgaagttcacaaggaactctttgaaggtgtccagaagtgggaagaaacctggaggcttttcttagagtttgaggtattgtcctagtttttgtgtttttaactgttaagaaagcatgccatgtacggaatcaatccagttagctttgttctttgccaggcttttgataccccatctttatcattaagtctctctgaatttctgctgaccgcctctgtttgataagcttatctacagggtcttttaagagaaaagcccaaaattaatggcttaaataaggtaggcatttcttgcatgaatgaggttcagaggtgggcagtgtggggcaggcatggcagatctgcacagtgagcaggaccccaggcttctccggctcagggcgctcccccaccactaagggtggacctcatcttcagggccaggatggctgctagagctcccaccctgatggcactttttttttttttttttttttttttgaggtggagtttcgctcttgttgcccaggctggagtgcaatggtgcgatcttggctcaccacaacctccacctcacaggttgaagtgattctcctacctcagcctcccaagtagctgggattacaggcatgcaccaccacacccggctaattttttgtatttttagtagagatggggtttcaccatgttggccaggctggtctcaaactcctgacttcagctgatctgcccacctcggcctcccacagtgctgggatcacaggcgtgagccaccacgcctggcctgatggcacatgtcatacagtgtggtggaggaaggaacaaagaaggcattgcccctcactccttcaagagctcttcccggctctcttcacagcaccgtggctcacatgctctgtcacctgctggtgaggctgggtgaattgctgccccaggtaaattctggttctgttaaactaaggaaggagagaagaatggatgttggggcaggcaactaacattctctaccattccaacttttgctatacttagaatattgcatgggtattgattccttttcttctgataggcaacatggtgggttccttcagagcattttagagctcagggactgtggtaaagcaagtgaggtgtgtagggcacagatggaaggagaccttgttctcgggttcatgctggccctgttagagctcagagggccttcagagaatctgaattcaactccttcaagtttacaggcagcaaactaggactcagaagtggagagaactatgggatatcttacagctgcttaagaacagatgtctttgtcctcagttattctttacttctggttacaacaagaagagtaaacataaataaggaggccaggtgtgtgtggtggctcacgcctgtaatcccagcactttggaaggccgaggcaggcagatcaggaggtcaagagatcgagaccatcttggctaacacagtgaaaccccgtctctactaaaaaaatacaaaaaaattagccgggcatggtggcgggcacttgtagtcccagctactcgggaggctgaggcaggagaatggcgtgaacccgggaggcagagcttgcagtgagccaagatcgcaccactgcactccagcctgggcgacagagcgagactctgtctcagaaaaaaaaaaaaaaaaaaaaaaacgtaaataaggagctaaggcagcaacctttgttgacatgccaatatttaagaagaaaacaagaaatgaattacctaccatcctctctagtaactattggctgtcaccaatcaagcagtatggaagggaaacaatttaattttctagaatatcttctaaatttttctgcctgtgtgcccctatttttgagtatacacacctaatttataattacaagctatatacttgcattactgttctgatataccttatatgttctaaaagaaaacacatgctggtccgagtgtagtggtgtttataagtcagtgatcacagccagttacagatttgttcctctcccactcccactgcattacttgactagaaagaagacagtaaaaaacagaaaagttaacaaaaagaaaagttaaaaagaatgagaagctttaacaattgactttttttttttttttttttttgagcgtctcgctcattgctcggggtggagcacggtggcgcagtctcggctcactgcacgccacccaggttcaagtgattctcctgtctcagcctcctgagtagctgggactgcacgtgcgcaccgtcatgctcgctaatttttttattattagtagagatggggtttcgccatgttggccaggttggtctggaactgtcgacctcaggtgatccactcgcctcggcctcccaaagtgctgggattacaggtgtgagtcaccacgcctggcgagaacaaagaatcttagcagaagttattggtctcatggtgccaggttttccactaattaaaaatgtatttttcacagagaaaagcttcagatccaaatcgatttacaaaccgaggaggaaatcttctaaaagaagaaaaacaacgagccaagctccagaaaatgctgcccaaggtaataatgttgctaagggtttttgatgcttggttacaaagatacctcactatttgtatgtctttttctttctattgtttagccccaaaactattttcttcaaagcttaggcagagataataagttatatatttagtataagcaactccatatcaaggtgtattcgtttgctaggactgccataataaagcactacaggccaggtgtagtggctcacgcctgtaatcccagcactttgggaggcctaggcaggcatatcgcgaggtcaggagttcaagaccagcctggtcttgatcatgaggtcaggagttcaagaccagcctggtcttgatcatgaggtcaggagttcaagaccagcctggtcttgatcatgaggtcaggagttcaagaccagcctggtctctactaaaaatacaaaaattagccaggcatggtggcgggcacctgtaatcccagctactcaggaggctgaggcaggagaatcacttgaacccaggaggcagaggttgcagtgagccaagaccgcgccactgcactccagcctgggcaacagagtgagactccatctcagagagaaaaacaaacaaaaaaacaaaacactacggactgggcagtttcgacaacagcaacttattttctcacaactctagaagctgtaaatctgagatcaacatgtcgttggcagagttggtttcttctgaggcctttctccttggctttgtaaatggttgtcgtcttctccgtgtgttcacatggttttcccacaatatgtgtggcctaaacactcccagtcgtatgagattagggcccacctaatgacctcattttaacttaattctttcttttttccccccgcaagagatggggtctcgctgtgttgaccaggctggtcttggactcctggcctcaagcattcctcccatctcggtctcaggaatgctagggttacaggaatgagccaccatacctggccttaattctctttttaaagacgctgtctccaaatacagtcacattctgaggtactgggggttaaggcttcaacatttgaatttgggggaaacacaattcagtcagttacatgaggaaagcttttgagagagagtcctgtgggctccattaccattttccactttgataataataataccattttttgagttaagtcagggatatcatttcaaaacgctctcatttagtgattcgtctaatccttacaacatccttatgaggtcggtattctttccatttttacagacgaggaaactgaggtactaagaaattaggtaaatctggccgggcgtggtgtctcactcctgtaatcccagggctttgggaggccgaggcagttcgagaccagcctggccaacatgacgaaaccccatctctactaaaaaatacaaaaattaaccaggtgtggcgtatgcctgtaatcccagctactcgggaggctgaggcacaagaatcgcttgaacccgggaggtggaggttgcagtgagctgagatcgtgccactgcactctagcctgggcgacagagtgagactgtctcaaaaaaaatgtaaatttgctcactgcttcacagccagtaaagagggtgattccagattgaaccccattaagtctgatttcagagtcctgctcctaatgttcaccgcctatttcatattgctgatcttccctgtgctgcctccaacttcaggcaccaaaaccttagtggtcaaactttgggttcttgccattttccactcttgtgtgttgtgtgaatgaaatgtctccgggctttgatttctggtcactctgacctgtacccatgtgggcccagctacctgaaatgaggctaatgatgctctggggaggaggagtcactctctagggaaatcatttcatttgggctttgcactaaagagttgaagtaattaacatgtccttgtttctggtctcagctggaagaagagttgaaggcacgaattgaattgtgggaacaggaacattcaaaggcatttatggtgaatgggcagaaattcatggagtatgtggcagaacaatgggagatgcatcgattggagaaagagagagccaagcaggaaagagtaagtgtgaacgtgaacgcaaattgggaaaagacgaagaaagtaatctgagcagcccatagtctctgccggggaccagggtttgtggaacagggagccggggaccggggcttgtggaacgggaagccggggaccggggcttgtggaacggggagccggggaccggggcttgtggaacggggagccggggaccggggcttgtggaacggggagcccgcggcagctctttagctctggctgtagagacacgggcctagattcccggccctgctgctgttgccatcccagacccgctctcttcctgagatttatcactgttgcttctgactttcacacagcaactgaagaacaaaaaacagacagagacagagatgctgtatggcagcgctcctcgaacacctagcaagcggcgaggactggctcccaatacaccgggcaaagcacgtaaggtaaacacaaggcttagggaaacactgatttcaagggagtgggtgagggtagtcccagccacctctttgaagggggccagcccctccacacctgtgggtatttctcatcaggtgggacaagagacagagaaaagaaataagacacaaagtatagagaaagaacagtgggcccaggggaccagcactcagcatacagaggacctgcaccagcaccggtctcttgagttccctcagtatttattgattactattttcactatcttggcaaggggaatgcggcaggaggacagggtgatagtggggagaaggtcagcaggaaaacgtgagcaaaggaatctgtgtcacaaataagttcaagggaaggtactgtgcctagatgtgcacgtaggccagatttatgcttctccccacccaaacatctcagtgtagtaaagagtaacagagcagcattgccgccagcgtatctcgcctccagccacagggcagttttctcctatctaagaatagaacgaacataggtacgtacgatcgggttttacaccgagatattccgttcccaggggcatgcaggagacggaggccttcctcttttacgaatcctcctgagcacagacgacgggtgtcgggctgggggatggtcaggtctttcccttcccacgaggccatatctcaggctgtctcagtgcggggaaatacctggacaatacccaggctttcttgggcagaggtccctgcggctttccgcagtgcatcgtgcccctggttaatcgagaatggagaatgcagatgacttttaccgagcatactgcctgtaaacatattgttaacaaggcacatgctgcacagccctagatcccttgaaccttgattccatacagcacatgtttctgtgagcacagggttggggctaaagttgcagattaacagcatctcaaggcaaaacaatttttcttagtacagatcaaaatggagtttatgtcttccttttctacatagacacagtaacactctgatctttcttttccctacctcttgccctctgtcctgcagagatgggaaagggtttttctgtccctgcatgtcgagtccacttgagtggatggaaggctgagtagcggcctatagtgacagtcacggagtggccagctttggtgtctgtgcttgttgcgtccttgcattaaattcggggtgcggtgggggaatgattgccaacattctggtaacgatgaaaagaaagcttcagcagttttcctgaaaacctgtaatgccattttccctgtaagaccaagagatggccttgtggtaccatgtgaaaaacaacgttcacgcttactaaatggaagatgtaataattcttcatctctacagcacagtcagagaggactttttttttttttgagatggagtttcgctcttgttgcctaggctggagtgcaatgggtgatctcagctcactacagcctctgcctcctggtttcaagcaattctcctgcctcagcctcccaagtagctgggattacaggcatgtgccaccacacccggctaatattgtatttttagtagagacagggtttctccatgttggctagggtcttgaattcctgacctcaggtgatccacccaccttgacttccaaagtgctgggattacaggcgtgagccactgtgcctggcctacttttttctttttgataaataaaagagtattatttcttctctctactgctattttataacattaaatttattatttttagacagtgtcttgctctatcacccacaccggagtgcagtggcgccatcatggctcactgcagctcagcctcctgggctcaagtgattctctaacctcagcctcccatgtagctgagacttacgggcacatgccaccatacccggctaattttggggtttttttttttgttggtggtgtttttttttttttttttttgagtttcagtagagatgaggtctcactaagttgtccaggctggtctcaaactcctgagctcaagtgatcctcctgcctcagcctcccaaagtgctgggattacaggcatgagccactgtgcctggcctaaaatgtgttttttttggttttgtttttttgagacggagtctcgctctgttgcccaggctggagtgcagtggcgcaatctcagctcactgcaacctacacctcctgggttcaagtgattctcgtgcctcagcctcctgagtagctgggactacaggcccgcgccactatgcccacctaatttttgtatttttagtagagatggggtttcactttgttggccaggatggtctcaatctcttgacctcagaagatctgcccgccccagcctcccaaagtgctgggattacaggcgtgaacctccacctcccgagtagctgggattacaggcatgtgctaccacacctaattttgtatttttagtagagacggggtttctccatgttggtcaggctggtctcatactcccgacctcagatgagccaccgtgcccggccccctagaatttttttaattaaaaaaaaaaaaaaaaagtgttggctgggtacagtggctcaagcctgtaatcccactacttcgggaagccaaggtagggggattgcttgaactcaggagttgggagactaggaaacatgttgaagccccatctctactacaaatacaaaaattagctggttgtggtggcacacgcctgtggtcccagctactcaggaggctggggtgggaggattgcttgagcccaggaggtcgaggctgcagtgaaccaagattgtaccactgtactccagcctgggtgacagagtgagaccccatctcaaaaacatttacagctcttatcattagcatataataagttttgacatatgtaggtttatacaatgaaactgtcaccataatttagataatgaacatttcatggtccccaaagtttcctagtgcctctttgtattacctccctccttccctggctcctagtttgcccccagcctctagctgtggcgagtagggatttagtctttaactaactatagattagttttcattttgaaacattttacatagaatcccgcagtacatattcttttttgtctggcttctttcatttagtgtagattcatctctgttgctgtatgtatcaaaaggtcactcctttttattgtagatcaatattcattccactgtatgaatttaccacagtttgcttgtccacttacctgctgatgggtatttggctgttgccagcttttggctgctgcagggagctgttgtgaacatttacgtctaagtctttgtatggatctatgctttcatttcgtttgggtagaaacatctaagagtggaatggctgggtcatatgctagatgtcttgtgccacagtggttgtaccattgtacacttccatttgctggatagcaataggctttgaaaatttttcacaagttacttcaaatctatgcagtattagacacagcaggcccttcaccatgtaaacccgtcttccctagactgcctcctcccatagtcatttctctgtagggtagacaggttgctagaaatgctgaggatgttactgcacatcagttacccacgtgctcttctccctagctgaacactaccaccatgtccaatgctacggccaatagtagcattcggcctatctttggagggacagtctaccactcccccgtgtctcgacttcctccttctggcagcaaggttagtatgccctgtgtctaagcacatcctcacatgcgtccctagcctgttcacccagaggccccacctacttgttctagattctaagatccctggatttggttcttattgagatgctgagagttgacagatataagctagctcaccattaaataatggtccaaaactaacgtgcaaaaaaagagaacagtcactctgagccccactggtaccatgggaagcactgggatgtgtctgggaaactgaagatcaggcagggtcgctgtagactcaattccaagcccagtcctcagctggtatggagataggtcccctacatgtgggttctagcccagtgaaaccagatcactagacatgccaggtactcagtagagatgtggaaagtatgtggcaaaacacattcagtctttcaaatattttattagactatgctcaagataggtgttctgtaaatcaagaattcatatttaaaaaaaatttttttctagagacagtgttttgctatgttgcccaggctggtctcgaacatgtcgcctcaagcaatcctcctgccttggcctcccaaagtgttgggattataggcatgagccacacccagccccatatatatatatatatatatatatatatatatatatatgttttttttttaactaaaaagtataggattatagacatgaatataaagatagtctcagcctttgaccagtgcaggtattgtgtgtgcgtgtgcacgttcattagaaggatgatacatggatctctttcctttctctgcagccagtcgctgcttccacctgttcagggaagaaaacaccccgtactggcaggcatggagccaacaaggagaacctggagctcaacggcagcatcctgagtggtgggtaccctggctcggcccccctccagcgcaacttcagcattaattctgttgccagcacctattctgagtttgcggtaattcaccttttctaatatctaccagtctctggggagcacacagttggggcagagtgggtatcttcccaggggcacccaggctattagctagggcagctaccttggaggctgagaatccctttcctgctttgaccatggcagggtgggtgtgatttaagggggggttgtgtaggaaggaagttggcagcagcaactagacatttaacctggatccttctgcttaatacataccattccctggctgcaggaggcaacccctctatcactgtcctggtgctctcttggtggagttcttggtaattgtcttaattctttgttcttagaaggatccgtccctctctgacagttccactgttgggcttcaggtctgtatggcaatccctgcatgtcccttttccaaactgatctgtcatctgctggcttcattcatctgggcacagggctacactaactaataatctcagcagtgttacaaaggaagcaggaattcctatcatggactcaaaaaaacacatctgatttacattcacaacagattaattaataaaatttgttcagacttgaattggattctcagcccctaaagtcaggcacagttttaaatcacgtttaacagaaaaccttgaccctccccaattgtgacatcaaaggcctgcaatagctggaaagaatagaggcccccaatcacatggggaagggagccccagctgtgtgctgcctacaatgaggctcttggcctgtgtgctgattatttcctggagtatatgccttcctaacccctcagggcttaaccgccagctctattctcagctagctaatgctgatttcctcacctttgcctctttccatacattgagctactgaagcatagatgaagcactggaagcaagtttttccagaatgctcttcacttcctagtatcctactctatatttgctaacacctaactacactgccttttacttaatctgtgatttcttctctcaatattttactagcaagaggagaggatgttcctcacccttgaggggatattgagttaaacccctagcctgcctcccctcttaattgctgcagggatagagaatggaacagttggccaaggctgcagctagttttgatcactgaaactggcttcctactccagcatgtttttcaaattacgtggctggtggtgcttctacctttaaaagtgggtgtgtgtcactctggctgattgctggacagaggtccagctttctctttttcgcttgttcaaccaaggcccattttatctgaggcttaaatgtacctgcctatctgtgtggctagtcctaggtaggttcgtctggtttgggttgctatggctgatagactccaccaggcagcaccaaagccggtaaactaacctctgctaatatctgtctttctcaatagccattcatgctttatcttttgctgctctaccatgtgctccagcatgagatcaaatcaccagcaggttacaaggcctcagccccagggattggtagatatatgttctggcccattgttttataaagggctcaagagaccaaagcttgttgcctacttaccttgacaactctaaagtagctctgtgaagtagagtcatgcctcgcttaatgacagggatatgttctgagaatgtggggcaatttcattgtgcacatatcagagtgtacttaacagtcctagacagaacagcctacacacctaaactatatggtatggcgttttcctcctaggctacaaacctgggcagcatgttacagaaagaatactgtaggcaattgtgggtttttttgattcaggctattcctgggatactgtaggcaattgtaacgcaatggtaagtatttgtgtatctaaacatagaaaaggtacagtaaaaatatggtataatcttatgggaccaccatagtgtatgtggcctgtcgttaactgaaacatcattatgcagtgcatgactgtatgaaggatttctcttctgtgaggtgtaacagaatggactggctgaggaaaaaggggtcacgggcatgcgtgcacatgcactctgtctgtgactaatagaatggtgctcagagttcctcaccttttactcctaacgcagcctattgcaggctagggatctcagagaaactaccttcaagggaccttttgctgacacttaaccaaacttagaagggtgggccatgtgtaagagaggcagtatggccactgatgttatttatttttcaacagcgagaactttcaaaggcttccaaatctgatgctacttctggaatcctcaattcaaccaacatccagtcctgagaagccctgatcagtcaaccagctgtggcttcctgtgcctagactggacctaattatatgggggtgactttagtttttcttcagcttaggcgtgcttgaaaccttggccaggttccatgaccatgggcctaacttaaagatgtgaatgagtgttacagttgaaagcccatcataggtttagtggtcctaggagacttggttttgacttatatacatgaaaagtttatggcaagaagtgcaaattttagcatatggggcctgacttctctaccacataattctacttgctgaagcatgatcaaagcttgttttatttcaccactgtaggaaaatgattgactatgcccatccctgggggtaattttggcatgtatacctgtaactagtaattaacatcttttttgtttaggcatgttcaattaatgctgtagctatcatagctttgctcttacctgaagccttgtccccaccacacaggacagccttcctcctgaagagaatgtctttgtgtgtccgaagttgagatggcctgccctactgccaaagaggtgacaggaaggctgggagcagctttgttaaattgtgttcagttctgttacacagtgcattgccctttgttgggggtatgcatgtatgaacacacatgcttgtcggaacgctttctcggcgtttgtcccttggctctcatctcccccattcctgtgcctactttgcctgagttcttctacccccgcagttgccagccacattgggagtctgtttgttccaatgggttgagctgtctttgtcgtggagatctggaactttgcacatgtcactactggggaggtgttcctgctctagcttccacgatgaggcgccctctttacctatcctctcaatcactactcttcttgaagcactattatttattcttccgctgtctgcctgcagcagtactactgtcaacatagtgtaaatggttctcaaaagcttaccagtgtggacttggtgttagccacgctgtttactcatacagtacgtgtcctgtttttaaaatatacaattattcttaaaaataaattaaaatctgtatacttacatttcaaaaag

SEQ ID NO: 181 - DNA, 32747 bp, Homo sapiens
  source 1..32747: mol_type = other DNA
ctctctctctctctcacacacacacacacacacacagcccgtctcgcgcctgaggtctcgcccgcaggccggtggcgcggggtcagctgctgcctgcggtccaggacagggtcggttccgccgcgcagcgcccaggcccagctcgtccagagtctgcggacagcgcacgtccaggtaacgcgcttcaaggggccgcggctcggagctgggggaccccgggccgccctgcccatacgagtgcgagcgtggagagcgcgggcgggggcgcggtcccgggggccggccagctggagggggcgggagcgctgggcggggcctgcgctgaccccggcgctgagtccctggggccgccgggcggatggcgtggccggacgcgggggccccgggccttccgggcgtgacctagggctcgggggcggggaggcccctccggcggggcggccctgggtggtccggcagaggcggaggccgctccgagcctgtgagccctgggcgcctgcggaggcggggagagggcggggtgtgccgccctggtggggaccgcggggtcggagaggggacattgccccccccgaggcgaacgtccaaccgcgggtccgggtccccgcccaaggccgccccgcgaggtggcctcggcccggccgtccccgagggtggctcggatcctttcaaccagcgcgctggaggcgaaggggctgcgccattccgggtcaggcagccaacgcgggacacgcgcgtctccgagcttgcggcccgcgaaacccgggtgacctaccgcgccggtgccctcaaagcccccacgcccgggccggtggccgctgcagccactgagccacgcggtctccccggcccggtcggcagaaggagctggtccgttactagaaaagtccagatgcaaagtcgggggtcgtgctgccgcttcctgccagcgcaccgcacccacctggggccgccaccgaccgcacaggacgcgcctcctaccccctgttctggcccggccgagagctggtgcccccagcggccgcccgcccccgtccgcagaccccggggcccttgctgctttgcattgggaacaaccggagccaggcccggagctgagggggccagggcctttggaggaagcattggcctccaggctgaagagcaagggccgtgtcacctgcccggagggcggtctcatctctgcagccaggtcagaggaagcagcggtggggagacggagtgcgcgagttgggaggctccacgcatcgtaggtggagagctggctgccagcctggcctgccctctcttccccgtcccaccatctcgcttggctccggcacctgcctgggaagacccacacctccgtctgcagtgcctcttccccctggaggccctgccctccgctcggggtccccgcatccttccgtggccctcagagcatcgcctggggcgcccgcggaactcatctgttaggcctgggatgcaggcaggcagaagtgggggtttaagtggaagcagtgagggtgggggtccggtccaaactgtgccaccttccaccccctgcccctgggagagcagacatcgcccactcgggctcacagtgccatccgggtgaggacctccgtggagagctctctttgccaaagaaaagcagttgcattaggtctgcgagcaggcagggtggcctcttcctggctccccatccaccaaggaagcttcaagtccctgggacacaggtggggaactccagcacccctggaggaagggagactgaggttggggagtggcatccaggccctgactctggggcacggtggtctgtgcaactgagaccctgcctcaggctccaacagcgcctgctcctttccccaggttgcagtgatcaccaggggaggtgctgggcgtgcaggctgccacaggaggggtggggaggtggggagtctctgtggcggggtggtgggggcctaggccagtcagctgaggacgtgttggtgcactcccgggagggcggtatgtgggtgaggatccccatgcagagtggtgcccacaaaccccccttccagagtcatctctggtccaccttgaagtccccaggaaaatgacctcgtcctccgcgggtgtgagccactaggcctgagaggacgccgggacggagctttcagagagggaggtgtcgggatggcttgagggtcaccaggtattaattaagcacttgctgtgtgccaggcactttcccacacaggatggagccgggccaccctcacagctcctgccctgcagacgctggccttgtggagggaggcaggcagcaggtaactccaaaagcacctctcagaggcggggacttcaggaaggatggtctgggaaagcatctttggtgtcatttaagctgagccctgaagcttctgatctcctgcagggagaggccagcgtgttccctggggaagctagagcagagtgtctgatgacaagagatggacccgggggtggagagtggaggggcagccatcagagccacctctgagtccacctgatgggcccatgtcttcatccaggggggagctgcacacacaccctcctcccctgtctcccatccctgccccaccccttcagctggggcctgctccgccgtgtctgcatggccccacccaccctgacctcaccacctgctagtgggccttgcagtttcagggggagtgtacgtttcaagtataccctgatgggggaatctggaccagggctgtcccctgggccgtgagtgccgggcgtggagagctggtgtagatgacatttgtagctccacatgccctggcctgggcgccaaggacagccgcagagaagaatgtgggtggacaggctctgctgcccatgagatggtgcagggatggcctgggggatgcttccagatgagagaccaccccaccctacccgtggctcctagggatggcgaccccggaggcgcgtgtgttcatgtgtgtgtgtggtgtgtgtttgtatggtatgtaatgtgtgatatgtgtatgggatgtatgtatggggtgtgtttatggtgtgtgtggtgcgtgtatagtgtgtatggtgcgtgtatagtgcgtatggtgtgtatggtgtgtggtgtgtatgtgtatgatgtgtgtgatgtatgtgtgtggggtgcgtgtatggtgtgtggtgtgtgtgtgtgtgtatgatgtatgtgtgtggtgtggtgtgtgtatggtgtgtggtgtgtgtgtgtccgtgtgtgtttggtgtggtgtatgtgtgcagggtgtgggtgtgtttgtgtgtgtgtgatgtgtggtgtgcgtgtgtatgatgtgtgtgtgtggtgtgtgtgtgtgcgtgtatgtgtgtggtggggtgtgtgtatggtgtgtggtgtgtgtgcgtgtgtatgatgtatgtgtgtggtatgtgtgtggtgtgtgtgtttagtgtgtggtgtatgtgtgcagggtgtgggtgtgtttgtgatgtgtggtgtgcatgtgtatggtgtgtgtgtgtgtgtggtgtgtgttgggcccagggcacgaggaggaagcagggctgcccagggaaatgccaccctggagaggcccctgtccctccctctccgtccttccctgtgcccctccgtccctccctgcccgtcctccccgtccccctccatccacccccaacccggccctcctcctgcggcaggcagcccatcttttgtgcggcctctgagaagcacagggagggcccggcgggcgtgaacccgctggcagccggtgtgtgcacagccttggcccgggcctcccagcccctgcatcccgagcacccgtggggcagttggcagcgtcctggcacggcctgggagattaattggtgcttttaatgacggctggtctggcagagacagagtgactacaggctgggccggcgcaggctgtgagcagaggctgggaaaggccccgcccccggacgggtctccaggggagaggaggggttcgcaggacccctctcaagacccccttcgggagtcagcttcttggccacgcacacttggagctctgggctgggttgcagctccctgtacttcactgtctcgggtgctggcagtgccagctggggcacgagttccggtttgggtcaaggctggcctgttggctggggtggcgtctgcctgagaactggccttgtctgtgccttaagcttcctggcgctcacagggcagtggaaaaccactcagtgagtctttcttggcaccttgcaggagcagtgctttctgggcctctgtagccagagctggccctgctgcagcttacgtctgcctgcagcccagacgtcctcctggtcctcctgatgcccccgacctccacggaggacgagcatttccagcccagccctccccatcttcacctcgcactcccctgacacactgggagcctcctgatccatgaacccgcgctggcgggagtagctactgaccgctggggacccctgcccaggctgttcgcatgtggaaaggattcagggagcaggcgatgcccaaagcgtggagaccagcactgctctctccccagtgacaggtgcacgcccagatcacggatgtgtcgggaacagctgtgctcctgctgctcagcgtccgtcactccaggctgggagcgggtccccaagcttctggctgggcctatccgtctccactctcagtgtgggggtggggggcgccaacagcacgcatttgctctctgcacttctcgtctgataatgggcagagggtccttctgcagccccaaaacatccctaggcaggagccctggggccccaagcagccagggaggtgagcaccaaggacctcccagagagcgtcaccttccgtcgagggaggcccagcctgggggcggtgtctgagacttggaatcaacgcttccgttggtggcagtaaatcctgtccctaaccctgcagtacagctgtgccgtgtacaggagggtgctgtctgacgccagacacctggactacagatcgcagcctgattcctggtcattgctccactgaaccccagaccccagcctcgttctgggccctcatcccctagatccagggaccccagccccatttcagcccttgggcccttgtaggatgcgaggccctgggccccagcccccagcccatccgtggcccaggcactggggggctgaggtcctctgagaagggacacagggcctggggggctctctcagcccatcagcaggagaggactgactccagaaaaatcagcgtttgtacccactcaggctgccaagacctgtgtccgtccttccaagctcaaccttcagagttcatgaggccccttgcccagaatgtccacagagttcatgaggccccttgcccggaatgtccacatttgaaacctcccaacaccgagccccatttcaagtataaccaggagggaaaatggtgcttgaaataagcatgccacaaaggaaaacctgctttctcgaaatgggccctggccgcccaggccctgacctccccggccaggatggaacgttccagagacccattagtgccaaaggcaaatgaaaacacaccctgtgaaaatgtctctgctgtctcccaagtatttatttttctgagcgtggggaaggaaggcttaattaagatgccctcaggcgggtacgaggggcaaagtgggagcagggagcgtgcttcctctgtggccttggttcagacaacagccttcagcaaagctttgctctagaggctcataggaagggacagagggcacaggcccagctcagcctttcccctgcctttcttggggcctgggcatggacagcaccgcctggcgacacacaacggtgggctctgaggctgtttgttacgcagcattaatgtggccgtcggtgaccgctacacggtgactgataactgcactgtgggtagagctcagcccgcagggctctggtttgtgacctctgggccaggcaactctcaaggcttcttccagtgcagaatatgattcctagagaaaaaaaaaaaattacacattcgtttcctaacatagggccctgcaaccggagaacaccaccacattgggagctgtgctttccactgtctagaaaccatggcttgccagcttgcagggtcacatggagccgcatctccttctggggtgcaggggtgggaacactcgtgacctgtagccgagggtgcagggagaggacagggtgagccaagcagaacagccgtctgtgagtcatcgtcccaggacaaccagcaaatggcacaacacctgctctctcagcccccacccgcacctgccagcctcacgtggggggtgggggggttggccgctggacagtcacagcaggatctgcccaaactgaccacccttccaggaggaggcaacagatgttagcatccacgggtcctgggccccccttccatacccagacttcaggacatgaaaaattggggtaaatgaagggtgcacgattatcttcgggcccacactggcttcctgcgggtgccagagacagctgccaccgcatgccagggacaatggccccgaggaggcgggagctgccaggccggggtgctgggggacagctggacgaggtgccgacaggggctcattcctccctgaagccggcccgcagctgctgggagcgtggccagccacgggcttgtgtgtgcctgggtcctgggggctgtgctggcgcaggccgggacggcggggacagggtcccacctagggcaggctggtcggtctccggggaggcagcccagtcttcagcctgcgtgctcttggggtgtccgtcccttcctccccattctcctcctcttctcagcgtcttctcccccagcaccgggcagccctggggtggccgagcctcatctccactcccctccctcaggcctctcctgggtcagcctggctttttctcttagagtttttgcttgacagggcactctcaggacgccctcctcctcctcccgcctcgggttggtgtgaggcgctcagggcagggcccacgtgcctgtggtcacaggacactgagctgcagggtgaaaggaccacacctggccgatctcccggccgctgcagctcactctgggtttgcagagaagcctgtttttaagtgaagtgccttcttagagaataagacacacctgtatctaaatgttatttttaaactgctagatgcgccttaatatagacaaagaagtaaggtgagcgtaaatgacatgatgtattccgacaggtgacagcgccttccgggcgattctgaaacaccagtgcagggctgtctgttgtcttttgttttcattttactttttttttttttttttgagacagagtctcgctctgtcgcccaggctggagggcagtggcacgatctcggctcactgcaagctccagcccccgcgttcacgtcattctcctgcctcagcctcccgagtagctgggactacaggcgcccgccaccatgcccggctaattttgttgttgttgttgtatttttagtagagacggggtttcaccgtgttagccaggatggtctcgatctcctgacctcgtgatccacccgcctcggcctcccaaagtgctgggattacaggcgtgagccccggtgcccggcctcattttacttttctaaaattcgaggcgaaattcacatagcatgaaataagccatttgccagtgaacgactcggtgtttagcacctcacagtgctgggcagccatcgcctagttccagaagattctcatcagcccaaaagaaaacgtcctacccccggaccactggctccccactccccgtccccagacctggaccacagagctccctcctttccccgtggctttgcccaccccggacatttcatgtaaatgggctcacgcaactcatgacctccgcgtctgtcctgtcccactgagcttgatgttctgaggttcatctgtgttgtagcacgtgtcagaactggattcctttttattttatgttttattttagtgagacagagtctcgctctgtggcccaggctggagtgcagtggcgcgatctaggctcactgcaacctccacctcccgggttcaagcgattctcctgtcacagtctcccgagtagctgggattacaggtgcccgccaccacacctggctaatttttttgtatttttagtagaggcggggtttcaccatgttggccaggctggtcttgaactcctgacctcaggtgatccacctgcctcggcctcccaaagtgctgggatgacaggcgcccggctcctggattctttttgatggctgaatcataacccagtgcacttttgattaaattcaggctgaaatgggcacgaccagagctgctggtccacctctccccggcccaagccctgcccccggtgacctgctctggagccattctgggcagtggatgggacccctgcggtcagcgtctcaagagagcagaccctgagggaaacttgagctcagagagaacaggagctcccagcagacccttccgctgactgctcccaccctgggcaaatgcagagccggagcccggagcgctggaagctggaacaagaggcccttttctgctctgcacaatgccccattgtgcccttcgcggggagagcagctcggcccagcgaggggaagctgtgcacaaagcctccttgtgagggcagccccacctgaggacagcgcagggccacacctgacgcagggcagtccctctcgccgtccgtcccctagcaggcctggcacccagacagggcccgctctgcaggcgtggtcccagggtgtggggctccctgttccccacagatgaggggaacagtgtgggctgtgccggcccttcctaagctggcccccaggtcacgaggagaggtacgggtcgtgggctctgtggagggacttgggtgccgggcgccagccagggccgatgcctcctgcgatccccaaggctccgagccctcaggcacacaccacgctcccggaggctgggccagcatgcggaggatgtttgtgtgttcgtacccgttgcaacatctttaacagggtcccatttcacagctgggctcctaaggggggtttcatagaaaagaaatggaaactaaaaatgaattaaaccataagatgtacacgtatgctacggccccagcaacacagggaaggtggaggctgagaggaagctcgggccactgctggtcaggcctggatttgggggcccgatgtccacagtcagtccctgcccacacaaggctcacactgcaggtggtgaagatataattaaacaggtaattaaacaagcaataaagacgggtcatttgaccaacccagtggcgataattgatacgccaaaacactaggaaagctagagaggcaaaagagaagaatacatgaaaacaaaaacaaaaaaccaggacaaatatttccaatatacacaaaagaacaggatttttcatacgtaaagagtgctgacaaatgaataaggagaaatctgcacttccacctaagtgccccacagtttattcactaacccctaggtctccaatgcctactctagcctcacgccctttctttcctctaaggaatgcctgtgaccccagcccttcctagcacccgcttcacatcagcctccagaaccccgctccagtcatcagagtgtagagtgctggcgtcctccttcatgttctgtttggggcattgggcagttagcccttccctcctgagtcctgagtccccctcttcccccacagcttgaagtccagtcccaagggcaggcaggagctgggttgtgcaaaggcggaagggtgctcaggctgggagaaaggggagggtcccccgagcattccaggcacagccctgcctactctgtcccttgctggctgcgacgatcgccctagcaccctcctccgcagagagtgagtgtcagctgtgaggcaggggcacgcagtggtagcaccgccagggcctgtgcagcccaccttccccaggaccacagctgggaaggcgcctggctgggggagggcacctggcctctgcaactcggactgacggaaggcacgcgtgcctgccccagtgagctcgggtcgggcgacgcgcaccacctcccaggtacccggccccgcgccctacccgcagcagcgcccagcgagaactgcgaaggaggcaggctccgggcacccgctcccgcgcgtgggcggggccggctggagggggcggtgcctccgggactgtgagcggggcctcccggggtgtgggtggggccttcggccgtgggcagggccggccagggagaggcggggcctccgagaatgggcggggcctccgagaatgggcggggcctccgggagtgcgccctccccgcacatgcgccctgacagcccaacaatggcggcgcccgcggagtcgctgaggaggcggaagactgggtactcggatccggagcctgagtcgccgcccgcgccggggcgtggccccgcaggctctccggcccatctccacacgggcaccttctggctgacccggatcgtgctcctgaaggccctagccttcgtgtactgtgagtgccgggcgggcccgggacatccgccagtgtcacctccgcgcaccacgacccccgccctccctcgagactcctccgcgcggtctcgcggccgcggcgcccccacgcagccctccttcctgctggggcccgggcaaggcggggcgggcagggcaggacaaggcttgctggcgacagcgcacccggccctacccctgtcgccgcctcgagcctccggcctgggctcctgggctcccggttccacccgcagccccgaagttgcacggccgcgcctgccaggaccggctcggggctatgcgaggcggggccggcccgggccctggcccaggagttcccaggagagctgggcaggtggagggtcacccgtccgtgcgcaggtcgggggtctgcgtcctggctgcggggcggggggcggcctggagaggcgaggcgctcctgctgtccccgacacagcgctgtgctgacggtgaaggttcccactgtaactggacgcccgcacgccacatccctgccgcgtgcggcccctgccaaaatccgaggagccggcccgggagcctccttcgcgtctcccaggggctgagggaaggtgactggctggtggccagactggagtttctcctttagtgttctcgactagctcagtctgcgttcgggaagattcccagcggaggtctgggggcagctccggaacctcatctgcaagtgaagcctgcgcctcactgtgggatgtggttggccgggtccactggcggagacccttcaccccacagctgtgcggggcccgcgtgcgcagcctacagagcagagctctgagaaaagtcagttcacgctcaaaacctctggatcccctggccaggggcagctggcgattccaactccctctctccccagtccctacaacccagaactggtttggaagagaacggttctgtgatcacggtgacatgtgatcacacggatacatgtttcataagcccaacgtgtcaggagctacgaacctcaagtgaggctctcaaatgagtatggaagtgaggggagcctgccaggccgagatgcagccagcggggcgcgtgggcagtcaccgtcccagagggctccggagctgctggccccgggcgttgcccacgcgttggttgtaggccgtgggcattggacgtctccctttccttccatcgtctgcttccctcacgtgtggaaggaaagggtcaggttgcagaagttcttctttgcacagcctttgtgccacacacgtcgcgggaagtttggtagcctggttgtgctggagtgatgctcagttcgacgttttgtgtgacatttgtgtgatactttccacctcctggtgcaaagtgatgagacgcgctcatcactacaaggtttcctgtgggattgcagtatcggcttcaactgggtctgtgtctctctctctctttctttaaagcaactattttattttatttatttatttttttcgagacggagtctcactctgttgcccaggctggagcgcaacggcaccatgtcggcccactgcaacctccgtctcctgggttcaagcgattctcctgcctcagccttccgagtagctgggattataggcacgcaccaccatgcctgactaatttttaaaaatatttttagtagagacagggtttcaccatgttggccaggctggtctcgaacttctgacctcagggcctcccaaagtgctgggattacaagcgtgagccactatgcccggcctgcaattattttaaaaagtagttcttcccaggttgcttttccctccacagtattaaacagtcattttaaatgttggtgctgtcacttagcaaacgatgaagtagagataaagtgaagctgtgaggctctaataggccttccacaggggagcccgagatacagcaggaagtcccagcggccttgcctccggagcacagcttcataaaaccagctcagactctttcaaacgagctgaggctcctttgatctccgcagggattctctgttcaattcagaaggaactgcttttaagccactgggtcaagcggatattttaagcctggtgcccagcattgaacatttctccttgacatatgcacgttcttctgtcttgtgagtacatttggggtagaatcagtgtttttctgctgtatcaaggaaccagtttcccatctttcagggacatggttttctggctgagctggcccagggcaagcaggcagtcatcctgcatttatctccttctagaaagttctggattttactgggactgtgcgctactccctgttcctcagaatcccagggtttttccaagttgccataggggctctccaaatatttcacttgatactgaattttacaatgtttatagctattgaaacacttgtaattaaacacataaccaaatgtattctgtggaaactccccttgttaaaagacattgaactgagggaggcttacccttaggcagattgtctcagcagacatgtagtaaagatgtacagatcaggagaacacagaaacgcctgccctgtcggggaagcttcgaagccagacctggagaggccggctgccagcgacaggcctctgcattcaacctgactttgcatccgtcctggggctggctccttcccaccgcgggcctgggcgtttccatgtgctgccaccgaggtgtgtaggtgctaggggtgtgctcactgcacacagacgtgcataccgcgggcgtcctggggtgtcgggcatgccctgctgtgctgtgggagccggagtgtgttagcggaaagcggcattttcacagggctcagagttgaagacacacctgtcttcctgacgtgtggactcgggtccctagtgtgattactgcgttgagcagatgctgaagtagcaccctgcccggtgctgacctcctggtgacaacgccactacccccagtggacagcgaggaagcagggtcagccactggcccggctgtgcagcgattgtccgtaggccctggagttcagccctgcccttcattcacgccactgtgcagcctgcgtatcctggacacccggttcacatctgggcagcggcgttctcgggccgtgacggctcctgggaggaccgaggctgcccgaggtggtcggggatgcctgacactgacactgagcttcccctcagcacagatgtcactcccaggaatggctgaaatctggacgagtaaaagcttatgtgacaggagtttccggcctaagcagcgggacctgggtgccatgttcttggtgtgtaggggcagtgccggccgcccatgggtgccggtgcctcctgcagtcaggcctgctgctgtctgtgtgcgcaataaggaaaccgaacccaagagtgggcaccatgcccaggctcaccggaacagagggcagagcagcctggccagaatccctcactgttttatggcaggaacccccagggtcgtgcgtcgacgttgtggcccggcgttccctgcggaagattgaggccctcactggtcaaccctgcagtacgggggcgtgtgtggcaaacagctggtctggagcctcgtcagccaggccggctccttgatgctttgaaatccccctcccagggggcctggccaggtccgtccatgggcggccacaggcagctggggctggactcctggaatttccagcagccctgtgtctgttacagcgccagtggtagagctggattccctgacaagacgggggaaggacagccttgcaggtgctactgaagacaccctaggctagagctgcccaccctgggtgggttctcctggactgaactgacgttggtttgctattgatgagagtcacatagtatatgtacacaatgcattttaactgcctcagaattaaggtgttatctggaaacagtgtaattacagttggtcagaattgggttgatagcagttcactgcagagaactttctggaagctgtgacaggtggaagtagtggggctcagggttggtgggccacaccttagctgtgtggccttggccaagttgctcatcaagaccttcctgtcactgatgaggtgagagtgaccgctgggccgtcctgaggctgacatgggattccttgcctgtgcacacttcccagaaggcggaccaaggacacacccgcctgggagacggctcgcaggcagccacggagtatatatatctgaacgtcggaaaggacctttcctttgaagctcaaacatttatgagatattgttacaattcggaagggatctgtaggtgaaatgtgacatgaagactgggtaacgttggcatttgcagactgactttatgtgtggcacttttcgtgggtgccatggcgtcggcgcagagacactcctgagggatttcgtctgtcggtccatgtgtttgtgggggccgagtcctggacaggcctaggagggaaccgccccggccagggccggctgctcggcgcctgcacagggcatgagtgctgggggctttgggacacacgctccctgctgcctctggggcagatgtccacctgcactgcttgcagtgagaggctggggccccagtggacgagccgtggtgcctgaactgctcccgctgtgtccccgccacgtgaggcatctcttcctgaccgtggtcctgagaccacctggcctctgccttcccagggttaactgtacttgttctctccgtggctgccgacacccttctggccttcagacttagccctcatcactcgtggactcctgaccccacccagggctgaccaccggagccctgctctctgcttcctttgcggctgatattgtccccattccagtgttgttcttgtgcctgtctcccctctagctccttgcagtcagggagaggactttctttatacctctatcccttgtcttctaggggcatctcctgctcagtgaaatgtgctgacccgtagcaggtggtctctaccagggcttagtgtcagcatgggacacttttccagccattaccccttctttcccctctacccacctccagccccgaggtgcggcccagcaggacagatactgccacagccctcccttggttgtgttcatacttcctgggctgctcatgccttcctgtttgctggtggattctctttttgctggagtgtatccccaagcagcttttccagaaaggaccaacttgcccggatctctaattctccatcaaagccactttccctcagagctttgcagcattgaggaggcatcttcaagcatctgactcttcttctccctggaagcttctaaagtctcagtgccttgccctcctgctctccacctttgctctctgttctggttatttatcgaggagtctctgaggctcttttttttgctctcttgtagtggccttggtgagctcttcagcctcaaggcttgtccttggctctggatgaggctcttctggcctctccccaatctgcccatgtgttccaaacaccgcatgccccagctgggttccaaacagggcgggtgggggccactctcctgtctagcttcgtagcgtgggctgaaacctgggaaagtctctccatgaagctgaatggagaagaacatggcttccgcgaggccctaggagccaagcaccacacagaacccaccgcttggctgtgatcccgagtgacggggacagcctggactgcagaaggaatgcccaacgctggcgggaacggaggggcttttcttgctcgtctttccagttccacattgtcacattggagtcctgggctcactgagattatgttgaaaatccgacctctaggggatctccatgctagttttgtcctttaggcgtggaggcatgcgtgccgcactgtggcgtctgttctgtgcgcctgctcaccgcccttccttcttttccgcgtggggcagttttatcgcgtctccccggcagctgcttcggcgaggtggggccgcggtgccattggtagcgtgtctctgagtctcaccgcagcccttgtagcttggcatcctcgtcagatgacacccgaggcagggttgacgtggcaggcagaatcgtttgcacccgtatttgctaaactctcagctgttcttcagaaaatttgaggagaaaatgaaaccaaaaagaatacttgaaaccctgctcagttggttttgttctgagctttcagtggctctaagagctcatgggaaatgagttctttttcttttctccgggccacttgagttctaatgaaatgcaccacttggttttacaagttcttctataaaatacttgcttgtttaaaaagcaaacagcactgccctacttcggagctctgcagcacatcccttaaagaaaaaatacttgaggtcactgtgctgaggcccagaatttaaccacggccagtaagaaccatcaacagagaacggcatttctgggatgactgttttaatcttacaacaatttatctgaaaggagaaaagagaaagctgattttttttttctgattctttttttttttttttttttgagacagagtttcactttttcgcccaggctgcagtgcagtggtgcaatctcctctcactacaacctccgccttccgatttcaagagattctcctgcctcagcctcccgagtagctggggctacgggcacaggctgccacgcccagctatttctttctgattctgaaacaaagtatttatcggccatgcctgctgttggctgctcgggcgacacggtatttcctcggtatttcctcgttgcagctcccaggtcaggctctgggtccctgtgagaggcgggtggccgccatggctctgctgcctcccgtgtggggtagtgacggggccttccgaagcttgactgcttggttagttttgttttgagagcctgtgatgtttcaagatttttactgcatctttttatgtagctatttttataacatgagtagaggttgaaatagtttttttctctctgaaatctcaattcagtctgtcttcctttttcctgataagcaggaagcatcctatgcttcttgccttagaattactgatttaggctattgctttggtgaggccacatcttgttttcctctgtggtcctggagtttgcgttgtggtgaggggtggagcacatccacccttcagctagcgccaattaggtccctgtgggaaaggggccccagcctagcaccaatgaaggctgggccctggagtgtgcagtggctgaacagtcacaacctgtgtttctcccacctgcatacatgccaggacatacacacatgcatccctgcacacgcacacatacatgtgtacatgtgcacacgtgtacagagacatgcatacacccgtgcacacatggacacagggcatccatgcacaggtgcacatgtatacatgtgcacatgtgtacagacacatacacacagggacacatgggcatgtcatacccatatgcacacacactggcctgagctgtggaagctgctggtgcggtccctgcacgtgtggccgccggggctgagggcctaccgcgaggtgtcctctatgttgctaggaggtcagcgctcacagctcaggtcccttccacccagtggtggaggcagtaggggtgtggggagccttctgctgcagccctgtttcccgccctgcgacccaccccgagtcccctctgtgtcccacctcatgtccaccctgtgtccagccttgtgtccagtctgtgtcccgccctgtgtctgccctttgtttaccctgtgtccatcccgtgcccgcctgtgtccaccctcttcctcctcacttggagctgcccccacccacctgccgtcgcagcccctttagaggtcaccagccctgaccctttcgtcgcccagggccctgcggtgctctgcctgtggccctgctcccactgccttggagggaggctgctcacagcgcttcatgccgggcactgagtggtgcagagtcttcgagaaacctttactttttaaaatttttttattaaaaataaaactattaactgaaactgcagactctatggcttttccacccgtgcctgttccgttctgggacccggttttgtcctggcgtctcctccctccctccctggtctgtgagtctcccagactttcctgtgcaggattccgaccttgacagtgtcaagcaggcctgtcatggcgtctgtagagcgtccctcacgttgggtccgtctggtgtttcctcgcaattagactgggtgatgggttttgggaagacgcccacagaggtgcggggcccttcccgtcacaccgtatcagggtcctgacgtccgcacggctttctgatcacccggccaaggtctgcctgccaggtgtgccctctgacaggtccctgctttcccgcccgctctgtcctctggaagccgctcactgggtccagcccccgcctcctgaagggagtgtctgcggacattatgtggaattcctctgtgaggaagatcttgttacttacttgtttgtggtcactgattttgtcactatggacccacgcccatttattttccctctgggtcgtgatcccgtgctgtcaccgtgagtctgtgtctgggtcgtgatcccatgctgtcaccgtgagtctgtgtctgggtcgtgatcccgtgctgtcaccgtgagtctgtgtctgggtcgtgatcccgtgctgtcaccgtgagtctgtgtctgggtcgtgatcccgtgctgtcaccgtgagtctgtgtctgggtcgtgatcccgtgctgtcaccgtgagtctgtgtctgggtcgtgatcccgtgctgtcaccgtgagtctgtctgggtggtgatcccgtgctgtcaccgtgagtctgtgtctgggtcgtgatcccgtgctgtcaccgtgagtctgtgtctgggtcgtgatcccgtgctgtcaccgtgagtctgtgtctgggtcgtgatcccgtgctgtcaccgtgagtctgtgtctgggtcgtgatcccgtgctgtcaccgtgagtctgtctgggtcgtgatcccgtgctgtcaccgtgagtctgtgtctgggtcgtgatcccgtgctgtcaccgtgagtctgtgtctgggtcgtgatcccgtgctgtcaccgtgagtctgtgtctgggtcgtgatcccgtgctgtcaccgtgagtctgtgtctgggtcgtgatcccgtgctgtcaccgtgagtctgtgtctgggtcgtgatcccgtgctgtcaccgtgagtctgtgtctgggtcgtgatcccgtgctgtcaccgtgagtctgtctgggtcgtgatcccgtgctgtcaccgtgagtctgtgtctgggtcgtgatcccgtgctgtcaccgtgagtctgtgtctgggtcgtgatcccgtgctgtcaccgtgagtctgtgtctgggtcgtgatcccgtgctgtcaccgtgagtctgtgtctgggtcgtgatcccgtgctgtcaccgtgagtctgtgtctgggtcgtgatcccgtgctgtcaccgtgagtctgtgtctgggtcgtgatcccgtgctgtcaccgtgagtctgtctgggtcgtgatcccgtgctgtcaccgtgagtctgtgtctgggtcgtgatcccgtgctgtcaccgtgagtctgtgtctgggtcgtgatcccgtgctgtcaccgtgagtctgtgtctgggtcgtgatcccgtgctgtcaccgtgagtctgtctgggtcgtgatcccgtgctgtcaccgtgagtctgtctgggtcgtgatcccgtgctgtcaccgtgagtctgtgtctgggtcgtgatcccgtgctgtcaccgtgagtctgtgtctgggtcgtgatcccgtgctgtcaccgtgagtctgtctgggtcgtgatcccgtgctgtcaccgtgagtctgtgtctgggtcgtgatcccgtgctgtcaccgtgagtctgtgtctgggtcgtgatcccgtgctgtcaccgtgagtctgtctgggtcgtgatcccgtgttgtcaccgtgagtctgtgtctgggtcgtgatcccgtgctgtcaccgtgagtctgtgtctgggtcgtgatcccgtgctgtcaccgtgagtctgtgtctgggtcgtgatcccgtgctgtcaccgtgagtctgtctgggtcgtgatcccgtgctgtcaccgtgagtctgtgtctgggtcgtgatcccgtgctgtcaccgtgagtctgtgtctgggtcgtgatcccgtgctgtcaccgtgagtctgtctgggtcgtgatcccgtgttgtcaccgtgagtctgtgtctgggtcgtgatcccgtgctgtcaccgtgagtctgtgtctgggtcgtgatcccgtgttgtcaccatgagatggtgtctgggttgtgatccagtgttgtcaccgtgagtctgtgtctgggtcgtgatcccgtgctgtcaccgtgagtctgtgtctgggtcgtgatcccgtgctgtcaccgtgagtctgtgtctgggtcgtgatcccgtgctgtcaccgtgagtctgtgtctgggtcgtgatcccgtgctgtcaccgtgagtctgtgtctgggttgtgatccagtgttgtcactgtgagtctttgtctgggttatgatccagtgctgtcactgtgagtttgctgctcagctcctccagctttgaccactggtgggtttcccctccttccccgcagggatgcttccggcccagcttctgtttctctgccccagccctagaatgagttgtttccaaggagccctggttctttttaggggagcatagaaacttcagtctgggcactgggagggccgttgctcccggggtgtcacagctgctggccctcttcctgggtagagctaggctctgtgtgtcactatctcatttcacacatttgattgcttctctgtcgtatccacctatccatctgtaagtatacgaaggtcaacctggtccatgccgatgactctgactctcacctggcacacggtgtattccagccttccgtcctggaacatggtgtattccatcctcccgtcctggcacacggtgtattccagtcttccctgctggcccatctgaatcctccctctctgctagtgggaacctggctcccctgactcctctagcatctgctcagccctggtgcacgtgcgagaattgtccacccaggcccgggggggaaagccctggagtgcagcgtttgtgtacagctccttctggccttgcggtctccactcagaacattttccggagttgcttaggcggctcctgccctctggccagtgtgtttctgtttcacatccgtgcgtgtggagcctgtattctatctgcatcccccaacctcctggtcgggtcttcccccaatagtttgtgcacattgaagttcatctcgtgtaatgctcagtgctgtgggctttgcctccatcaccccagctccagccccaagtcccccgtgcatgggagtgaccacttcccctgcaccagcccctggcacgcccgggtctgtctcccgtccctctggttttgccttttccagtgtgacatacgaatgaaatcacgcagtatatagcctgttgggtctagattcttttgcttagcaaaatgcacttaagattcatccatgttattgcctgaaccaacagctgcattcttatctctgattatttttctgttgcacaaatgcacctccggttatttatccacttccaccgtgaaggatgtcttccttgtttctagtttttagtggctatgaacagagctgctatgagcatctgcatgaggcttctgtgcgagcacactttcaggttgaaggcctgagaggtgcagtagctgatttgtaaggtaacccttcattatctgggtcagatgccaccgtctgccatccacagtggtaggccacagcatccccggcacagcgagggcactcctgctgtcccgaaccttctgcagcattgggcactgtccatgttcgtgttttttttgttttgtttttttggttttttttttgagacagtcttactctgtcgccgaggctggagtgcagtggcgctgtgtcggctcactccaacctccgcctcctgggttcaagcaattctcctgcctcagccttgcgagtagctgggattccaggtgtgcaccactatgcccagctaatttttgtatttttagtagagacggggtttcaccacattggccaggctggtcttgaactcctgacctcaggtgatctgcccacctcggcctcccaaagcgctgggattacaggcatgagccaccgcgcccggcctgggcactgtccgttttcaagcacttcggccatgtgacgtgtgtgtggtgacagcacgctgtggttttcatgggcatttccgcagtgatgaaggatgttgagcatcttttcacgtgttatttgccatccgtacaccttcctatgtctgttcagaccttgtggcctggttttttcttcccacctttaacattgggttgtttgttttctaattattgaattttaaaagttctttaaatattctagatacaaatcctttatcagatgtgtgatttgccagtattttcttccaatctgcggcttgtgttttcattctgttaaaagtagcttttgcagatcaaaagtttttcagtttgataaagttcaatttacagtttctaatttcatagattatgcttttggtgttgtatctaaaaacttgttgccaaacccaagtcacatagattttcttctatatttccatctggaagtcttatgcttttatgttttacatttaggtctatgatcctttttggttaatttttgtgtaaggtgtgaagtgtgttcaggtccatctttttgcatgtggacatccatctgttccaacatgattgttacagagactcttctttgtttttttatttattttgtagagactgagtctcactatgttgcccaggctgctctggaattcctgggctcaagcgatcctcctgcctcagcctcccaaagtgctgggatgacaggtgtgagccaccacgcccggcccaaggctgctctttgtctgtgtagttgcctttgaacctttgtcagaatttgttcactctgtgtgtcgggtcgggggcaggggggctgtgtctgggccgtctcttccattccattgagttctgcggctcttccttaatcaatactgcgctgtcttgatgtggtcttgattagctttttagtaagtcttgaaattgggtaacatgagtcctccacctctgttcttttccagatgattttggctttttaatccctttgctctcccatgtatattctagaatcagcttgtcagcctcggcggaagcactgactgggtgtttggttcagattgtgccgaatttatggatcaaattgacaccttaatgattttgatttttccaatccatgaacatggtctatctcttcatatagttagatcttgtttcatttttttaatcagtgttttgtagttttccatgtgcagattccgtttatatgtttttagatttataaatgcatggggaaaagtacatgtactagcttcctacatgtctacacagacactcactccaaaccagcatgcacagttacacagacatggaccccaagccagattcctacacgcagtaggaagccgcatgtacttgtggggttgctcttgtgatattgttatcattatgcaatatcttctttcatccctgtgtcattccttgtttgtaaattgatttttttccttttgagatggagtctctgttgcccaggctggagtgcaatggtgccatctcggctcactgcagcctcccgggttcaagtgattctcctgcctcagcctcccaagtaggtgggactaccggggtgcaccaccacatccgactaatttttgtattttttaagtagagacagggttttgccatattggccaggctggtcccaaactcctgacctcaggtgatccacccgcctcagcctcccaaagtgctggaattacaggcgtgagccaccgtgcccgacccttaaatctactttttttttttttttttgagatggagttttgctcttgtcgtccaggctggagtgcagtggcgcaatcttggctcactgcaccctccacctcccaggttcaagccattctcctgcctcagcctcctgagtagcttggattacaggtgcctgccacaacgcccagctaatttttgtatttttagtagagacagggtttttccatgttgcccaggctggtctcaaactcctgatctcaggtgatccgcctgccttggcctcccaaagtgctgggattacaggcgtgagccaccctgcccagcccttaaatctactttttatgatgttaatagagccacttccactttcttttgtttgtattttttatttttatttttaatttttttcagccatgatgaattagatccagctttcttttgattcacatttgaatggtgtatcttttttactttcaactgctttttcattcttcacgtttacacatgggaatgtgcttctctcacctgtcagcatctctgggtaagcattcagtgttctacaaatactgacgtccagaggatgtgagagagctgttgtgggtgggcgccgtgggacatgaactcggagacctgtggatgtgagagagccgtcgtggggtgggcgccgtgggacgtgaactcggagacctgtggatgtgagagagccgtcgtggggtgggcgccgtgagacatgaactcggagacctgtggatgtgacagtgccattgtggggtgggcgccgtgagacatgaactcggagacctgtggatgtgagagagccgtcgtgcggtgggcgccgtgagacgtgaactcagagacctgtggatgtgagagagccgtcgtggggtgggcgccgtgagacgtgaactcggagacctgtggatgtgagagagccgtcgtggggtgggcgccgtgagacgtgaactcggagacctgtggtctgcgtagagggcaagtgtggctcacctataggcagtaagtgtcaagccctgcagcgtgtgctgggagtgatgccgttgaccagagccagggtcctcagggtgtgtttcataatggtgaatgctgagtgcagtccggttggtcagctggctgtctgtgtgtagccaggcacgcaatttatatacacatgtctactttacttctatgtgtgtgcgtgtatacacactgcatctgctgcagacacggaatttatatacaagcatctagtttgcttctatgcgtatgcgtggatgcacacactgcgtctgctgcaggcacccattttatgtaacgtgtctggttcacttagatgtgtgtgcgtgtatgcacacactgcgtctgctgcgggcacgcattttatgtaacgtgtctagtttacttagatgtgtgtgtgtgtgtatgcacacaccgcgtctgctgcaggcacgcattttatgtaacgtgtctggttcacttacatgtgtgtgcgtgtatgcacacaccgcgtctgctgcgggcacgcattttatgtaacgggtcgggttcacttagatgtgtgtgtgtgtatgcacacaccgcgtctgctgcaggcacgccttttatgtaacttgtctagtttacttagatgtgtgtgtgtgtatgcacacaccacgtctgctgcaggcacgccttttatgtaacttgtctagtttacttagatgtgtgtgtgtgtatgcacacactgcgtctgctgcaggcacgcattttatgtaacttgtctagtttacttagatgtgtgtgtgtgtgtgcacacaccgcgtctgctgcgggcacgcattttatgtaacgtgtctagtttacttagatgtgtgtgtgtgtatgcacacaccgcatctgctgcaggcacgcattttatgtaacgtgtctggttcacttagatatgtgtgtgtgtggatgcacacaccgcgtctgctgcgggcacgcattttatgtaacgtgtctagttcacttagatgtgtatgcgtgtatgcacacaccgcgtctgctgcaggttggcttttccagtgtttcccccaaaatcttgagaaagtactcagactcctgagtctagggtttggccccaaaccgtcagccagactctgcctccccttcccgcctgcctcgccccgcattctgagctgcgcccatggtgtccacatgtggtttgttcctagtcatgcttgttttgtcttctttttcttccagtcgtggcattcctggtggctttccatcagaacaagcagctcatcggtgacagggggctgcttccctgcagagtgttcctgaagaacttccagcagtacttccaggacaggacgagctgggaagtcttcagctacatgcccaccatcctctggctgatggactggtcagacatgaactccaacctggacttgctggctcttctcggactgggcatctcgtctttcgtactgatcacgggctgcgccaacatgcttctcatggctgccctgtggggcctctacatgtccctggttaatgtgggccatgtctggtgagtagcaggaatggggcggtcggagcttagggcttgctgtcactcagcacaggcactgcaggtgtcctggcacttggaaagactggacgagcgtttatcttaaattccttcaggagggtattgtcattttacttaggccatggcagagcggccagtgcaccagccacagcagccacccatcttcaggattaaaaccccacctctttgcagtagctcttccttacttaaaggactgcgttgccagcttactggagccagagggatggggaaagggaggcagaagcagtgggtctgtgtctgtgtggacgtgtaggaggctggtttggggtgggtgtctgtgtggacgtgtaggaggctggtttggggtgtctgtgtggacatgtaggaggctggtttggggtgggtgtctgtgtggacgtgtaggaagctggtttggggtgggtgtctgtgtggacgtgtaggaggctggtttggggtgtctgtgtggacgtgtaggaggctggtttggggtgggtgtctgtgtggacatgtaggaggctggtttggggtgggtgtctgtgtggacatgtaggaggctggtttggggtgggtgtctgtgtggacatgtaggaggctggtttggggtgggtgtctgtgtggacatgtaggaggctggtttggggtgggtgtctgtgtggacatgtaggaggctggtttggggtgtctgtgtggacgtgtaggaggctggtttggagtgggtgtctgtgtggacgtgtaggaggctggtttggggtgtctgtgtggatatgtaggaggctggtttggggtgtctgtgtggatatgtaggaggctggtttggggtgtctgtgtggacgtgcaggaggctggtttggggtgggtgtctgtgtggacgtgtaggaggctggtgtggggtccgtgtctgtgtgaacgtgtaggaggctggtttggggtgggtgtctgtgtggacgtgtaggaggctggtttggggtccgtgtctgtgtgaacgtgtaggaagctggtttggggtgggtgtctgtgtggacgtgtaggaggctggtttggggtgtctgtgtggacgtgtaggaggctggtttggggtgggtgtctgtgtggacatgtaggaggctggtttggggtgggtgtctgtgtggacatgtaggaggctggtttggggtgtctgtgtggacgtgcaggaggctggtttggggtgggtgtctgtgtggatatgtaggaggctggtttggggtgtctgtgtggacgtgtaggaggctggtttggagtgggtgtctgtgtggacgtgtaggaggctggtttggggtgtctgtgtggatatgtaggaggctggtttggggtgtctgtgtggatatgtaggaggctggtttggggtgtctgtgtggacgtgcaggaggctggtttggggtgggtgtctgtgtggacgtgtaggaggctggtttggggtgggtgtctgtgtggatgtgtaggaggctggtttggggtgggtgtctgtgtggacgtgtaggaggctggtttggggtgggtgtctgtgtggacatgtaggaggctggtttggggtgggtgtctgtgtggatgtgtaggaagctggggatgcgctggctcttgcatgcccagcttggttccgccctcaatgggacagctgggctttgcatggagactgaggatggctcttgtgtctttcgtggacgggagacaggaggcagctggctcagggctgagtggtcggaaccaggaccctgtcccaggatggaaggctgtggtggtgagttggtgcgggcagggcgcagccttgggctgtggagcctgtgttttccatcctggtcagggcggctgagttgaggttggagtgtctggggccacgtgcacttccgggagcctgaatgctctgcctccagcacagcgcctgtggctccggtgttccctggtcggaggctcagattgctctgatctgggcttggtggcacagcccaggccctgcaggctcatgcagggagggctgcagctggcatcagggcacctgtgggggggggtccccactttgtggctgtgctggagtgggcacttgtaaggggggtccccactgtgtggctgttgctggggtgggcaccgctgccaggtccagttgctggtgtttcctcaggtctcagctacacttgagtgtgtcacctcattcaacaagcaggccagacagtgtcaccagggcagggcaggaggcctggggatgccttgggcacccacaacgtggctccgccccaggacccctccacgcacacatgcctgactttgccgaggcgcccatgagctgtcagcacaggctgaagtggtgtgctggggtcaggcgctctcacgggagtctgcaggcctggggccacgtgcaatgcttgtggctgtttgtggtttgcccccgatgccccaggccctgtgacgcacctcccccgcacatcacgttcacatgagctgtctctgctgacggtggcctggtgggggctgtgcttgttgagtgtctggacggtgaagtggctttttctcccttcaccacatgctcttggtgaggacgtcgctctgcagtcttcactggaggtgtgaggttccgccgcctctgggggtctgcaggagtcatgagcccacctgcgtgggaggcttctctctgctccccatttatcgttcacctgagcgtggtttgtcgcagcgtggacttgcacgtttttgttttggtactttgggggtctgtcttcttggtctagaaatttaaacatctgggggtttggcaacatttatgacggagagagccacagcttaataattgttgcataaaactctaagtgattttagagaggactctgactctgctcagagctggccttcctgttacataaagccacgcagccttgcaggacgctggagccctgagcacagcatctgctatagtatctgaagtcgcttcagcttttccagaacattggctctgactccatcgttggctctgactctgtcgttgtctctgactttgtcgttgtctctgactctgtcattggctctgactctgtccttggctgactctgtcgttggctctgactctgtcgttggctgactctgtcgttggctgactctgtcagctgactctgtcattggctgactctgtcgttggctgactgttgttggctgactctgtcgttggctctgactctgtcgttggctgactctgtcggctgactctgtcattggctgactctgtcattggctctgactctgtcgttggctgactctgtcggctgactctgtcattggctgactctgtcattggctctgactctgtcgttggctgactctgtcattggctgactctgtcattggctgactgttgttggctgattctgtcgttggctctgactctgtcattggctgactctgtcattggctgactctgtcgttggctctgactctgtcgttggctctgactccgtccttggctgactctgtcgttggctctgactctgtcattggctgactctgtcgttggctgactctgtcgtctgactctgtcattggctgactctgtcgttggctctgactctgtcgttggctctgactctgtcgtctctgactctgtcgttggctctgactctgtcattggctctgactctgtcgttggctgactctgtcattgtctctgattctgtcgttggctgactctgtccttggctgactctgtcgttgtctctaactctgtcgttgtctctgactctgtcattggctgactctgtcgttggctctgactctgtcattggctgactctgtcattggctctgactctgtcgtctctgactctgtcatctctgactctgtcgttggctctgactctgtcgttggctgactctgtcgttggctgactctgtcgttgtctctaactctgtcgttgtctctgactctgtcgttggctctgactctgtcattggctgactctgtcgttggcctgactctgtcgttggctgactgttgttggctgactctgtcgttgtctctgactctgtcattggctgactttgtcattgtctctgactctgtcgttggctgactctgtcgttggctgactctgtcattgtctctaactctgtcgctgtctctgactctgtcattggctgactctgtcgttggctctgactctgtcgttggctgactctgtcattggctctgactctgtcattggctctgagtctttcgtctctgactctgtcgttggctctgactctgtcgttgtctctgactctgtcgttggctgactctgtcgttggctctgactctgtcgttggctgactctgtcgttggctctgactctgtcgttggctgactctgtcgttggctctgactctgtcgtctctgactctgtcgttggctctgactctcattggctctgactctgtcgttggctgactctgtcgttgtctctgattctgtcgttggctgacgctgtccttggctgactctgtcgttgtctctaactctgtcgttgtctctgactctgtcattggctgactctgtcgttggctctgactctgtcattggctgactctgtcattggctctgactctgtcgtctctgactctgtcgtctctgactctgtcgttgtctctgactctgtcgttgtctctgactctgtcattggctgactctgtcgttggctctgactctgtcattggctgactctgtcattggctctgactctgtcgtctctgactctgtcgtctctgactctgtcgttgtctctgactctgtcattgtctctgactctgtcgttggctctgactctgtcgttggctgactctgtcattgtctctaactctgtcgttgtctctgactctgtcgttggctctgactctgtcattggctgactctgtcgttggcctgactctgtcgttggctgactgttgttggctgactctgtcgttgtctctgactctgtcattggctgactctgtcattgtctctgactctgtcgttggctgactctgtcgttggctgactctgtcgttgtctctgactctgtcattggctgactctgtcgttgtctctgactctgtcgttggctgactctgttgttggctctgactctgttgttggctgactctgtcgttggctgactgtcattggctgactctgtcgttggctgactctgtcgttggctgactctgtcattgtctctaactctgtcgttggctgactctgtcattggctggctctgtcattgtctctgactctgtcgttggctgactctgtcgttggctctgactctgtcgttggctgactctgtcattgactgactctgtcgttggctctgactctgtcgttggctgactctgtcgttgactgactctgtcgttggctctgactctgtccttggctctgactctgtcgttggctgactctgtcgttggctgactctgtcgttggctgactctgtcattggctctgactctgtcgttggctgactctgtcgttggctctgactctgtcgttggctgactctgtcgttggctgactctgtcgttggctctgactctgtcgttggctgactctgtcgttggctctgactctgtcgtctctgactctgtcattggctgactctgtcgttgtctctgattctgtcgttggctgactctgtcattgtctctgattctgtcgttggctgactctgtcgttgtctctgattctgtcgttggctgactctgtcattgtctttgattctgtcgttggctgactctgtcgttgt

SEQ ID NO: 182 - DNA, 13491 bp, Homo sapiens
  source 1..13491: mol_type = other DNA
tcagcaggtcgcctgggtctctgtctcagtgctcagcagggcgaggacaggacagaacgggccccatcacagactgcgcttagaaggaactcagtaaaacaaagaccattttcttctggaggcaactcaaggaggtaagactgtgagtcaagcgccttggaggataagaagtccaggtaagtagaaggcaggaggaagcttccctaatatcacctgcaaatctgcttccactggggcattctgttccccttttcagacagcgcagagccctcctgcggtgaacagtcgccatagcccttcttgaggggctgctgggtccaagacctcctgggtgggcacacggacctgcgctccctgcagagacgtggacaaggcaggccctgtggaaagttcacccgccagccaggcaccggcacaaagccaaaccccccggcggagtgtgtgggggcagggacaaaacgctccacgcgttctcacagggactcgcccttagaacaagacagctgtatctctgtacaaatgcgggcggtgacgagtggggatgacgggactttctggggtgacggccactccctataccttgatggggctcgtgcaagttctttatggagggaaagacgcagtgtgcggtgagttccagctaatgatgtgggaagcattgacaccagccccaccctgatgtgcgctgaagcaccgacgcagggacgggggacacgggcgaggagacccactacgtaacaacgcagcaaaccccgtgaacagaacctacggcatccaggcggtccccgtgcgggttttactatacaattcttaggagaaaaacaaaggttaaaaggtttgaaatgtaaaaaagattgactacatagaaaatttaaaaacaaaacataagtaagagaatctacagaaataggcttagccgctgagaggtgttagcaaggtctgggcggaacattaaaaatcctgtgagtgggcctggaaaccagcgttcccccacagctgaggagtaaggggagagaagcagctgtttatcccagatgaggtccagagagacgcattccaagcagccaacacgggacagaggcgatgagggagggcggcctggacagaaaacttccaggcagatcggggcaccctgtctcgcaggcccagccatgctccttggcagcaaccacccaggggctttctcacaggcagaccagggcagcctctggtccctgcacaatctcgcctccgatgcaaggtgggagaaggcagccacctcccgaggggggccacagagggggttctgatccagctgtgagctctcacccccagcccacagcgactggtagccaggtaggcagaatggcaggcagagcggccactggggaactgatccagcaggacctgaagcagggagacagcacacgggcgtccacctaacgtggccagcccttgtgtggacaaacagctgagaaaaggcattactaacatggacgtgaagaaagtcgcctcggtttttgggtgtgatgtggtgttggtgtcgtgttgttgcgaaggccctgtctgaaagtcgcctcggttttctggtgtgatgtggtgttggtgcgtgttgttgcgaaggccctgtgtgaaagtcgcctgggttttcgggtgtgatgtggtattggtgtcgtgttgttgcgaaggccctgtgtgaaagtcgcctgggttttcgggtgtgatgtggtgttggcgtcgtgttgttgcgaaggccctgtgtgaaagtcgcctgggttttcgggtgtgatgtggtgttggcgtcgtgttgttgcgaaggccctgtgtgaaagtcgcctcggttttcgggtgtgatgtggtgttggtgtcgtgttgttgcgaaggccctgtgtgaaagtcgccggggttttcgggtgtgatgtggtgttggtgtcgtgttgttgcgaaggccctgtgtgaaggtcgcctgggttttcgggtgtgatgtggtgttggtgtcgtgttgttgcgaaggccctgtgtgaaggtcgcctgggttttcgggtgtgatgtggtgttggtgtcgtgttgttgcgaaggccctgtgtgaaagtcgcctgggttttcgggtgtgatgtggtgttggcgtcgtgttgttgcaaaggcctgtcttcaggtgtacgaggaggcatttccaaatgcaggaatgtgatgcctgggatctgcgtcatggcaaaacagcaggggcaaggagtgtggggcggatgtggcagctgctaacactggcacggtgcactgtggcctacgagggtccccagctgtccacagttcattcctccccattgcgtggcttcctgaacagccatgtatttcctaactctgccggctgaggggctgagaagctgcagcaccccagtagtaacgggcaccccagcacccacgtcttggtctctaaacaccttccccactaaagcatcaggcttctcagggaagccaatagtcccggctactcaggaggctgaggtggcagcacagcttgagcccagtaggttgagactagcctgagcaacagagcaagatcccagctctaaaaaagagaaatcctccctaagagcactgctttagaaggacgtggaggaggggctgtggactctgagccttaccctcaatacaatgaggtcacctgctcctgggaaccatcttaggatccctggaatgggcagagggacaaactcatcagtggcccccaatctggcagagttaacctgccccacaatctccaaatccagaggcctacaaagcatctgctccaagcagtaacaatgaggtcctgagcggaaatcttcacaaagtggagagaaaaaactgatggattgtccaatgtgtttgattctgtaaaaacaacagtattggaaagggttgaccagttgtgctggtaaagttggaacaaatgagtgagatatgatcagagatgaaaaacgaagccaatcaaaatagaaaaggcaactatgaactccaggaaaaatgaagagttattagaaaaaaagttactatagttcactatttggctcagcagtcacaatatttacagagtcaaaataatgtaaagacaatcaaactaataaaaattatacttgtgacacagctatactgatgatgatgagaagaacattagggtgtgtgagggcaatccctgtcgttcataagaggacatgtatacacagtgtctaaccgtggtatgcgaagaataacccatataaacctatcagtcagaaagacagacaaataccagagttaagtgcaggaagtgataaaagggttgtctggagaacagcatgtggctgagaagtggtacggcaagggcttctgtttttattataagtcgtgtaatacaatttgactattcatgcacatgcccatttttttttaataattaaaagaacaatcttcaggccacactggccacagtgtaataaaatcaaagttgagaaacaaaaggccacctgtaaaaccctgagcatgtggcattttcgaagcatttctccaggctgtccttggtctagaggcattagcgctgaaggttataaaaccacaccatcggccactgtcaggggcagccgggggtctcagatgacagggtagggcagggacatacccagaagtgggtagccgccctccagttggctttcattagcagagaagaagagacagaaaatagctgaaccaactccaggcactggaaatgataaaccactttctcccagaaaaagcaagcaactacaagaggcaaaaacgaatgagctagagtatattttaaaattctgatagataaaaccagctctttgaaaagacccataaaggggatgatctatggcggtttaggcaagggagagtgaggaaaaggaggaaacaagtattgaggcccaggcgggagaacggatgcagacctgctagggggtggcaaggccaccgcacagactgtgccctccagccggcagcggggggtggaggggaggagcgggtgcagtcagacccccgtccgcagagtgctgggtgcgagtccccaaatgcctgctgggctgagctgccccctgcggaatgggtggtgacgaaaccgccctcttcagccacacaggaagccccttgctcactgtcactgtcactaatccactaggaatgaagagcagatgccaccaaacatcctgcatccatacagttaaaaacaattaaaaagccacgttgaagattctagattaaagccactcaagtggattcagcactggaagtatgaatcacagcaacaaaacacttcttcagtagtttagaattctgcatagtaaagagaattttttaaaacagaaatggctaacaacgtgatgggagaaattcaaaaccaacaaaatgttaatgatcgtgtgaatgagacaaaatggcctttaaaatctattttctgggagggcgtggtggctcatgcctgtaatcccctaaagcactttgggaggtcaagagaggaggacagtttgagcctaggagttcaagaccagcctggacaacatagcaagaccctgtcactataaaaaagaaaataaaaaaattaatcgggtgtggtggttcatgcctgtggtcctagctacttgggaggctgaggtgggaggatcacttgagtctgcggaggtcgaggctgcaatgagccgtgattgtgccagtgcagtccagcttggacaaatgagcaaggccctgtctctgaagaaaaactatatatatatgcttttcttctaggttcaacttagtaattttcaccagatattagtaagtgaaaaaaagggaatgaaagaaatgtatctaatatggccctgtttgagtaaagcaaacatttacccctaaatcctgtatgtgcatctgcatgtgtgtctgtgtgcatgtgcacgtgtttgcatatgatctgcatatgtgtctgtgtgtgcacgtgtgcacgtttgcatatgatctgcatacgtgtctgtatgcatgcatgcatgtgtgcttgcatatggtctgcatacctgtgtgcgcatgtgtgcacacgtttgcatataatctgcataggtgggtctgtatgcccatgtgtgcacgtttgcatatgatctgaatatgtctgtgtgtgcatgcgtgcacctgtgtttgcatatgtgcatacgcgtgtgcacacatttgcatatgatctgcatacgtgggtctgtgtgcgcgtgtgcacgtttgcatatgatctgcatacgtatgtctgtgtgtgcatgcatgcacctgtttgcatatgatctgcatacgtgtctgtgtgcatgtatgtgcgtgtttgcataagatctgcaggtctgtgcgcatgtgtgcacgtgcttgcatatgatctgcattgtgtcatgtgtgtagtttgcgtatgatctgcatatgcatctgtgtatgtccatgtgtgctcgtgtgtttgcacaggatctgcatacgtgtgtctgtgtgtgcgcatgtgcgcacgtgtgtttgcacgtctgtgtttgggtacaaatctgagttggcatgaagataagaatggacggaaccgggaggttaacacggggtggatgtaaattagatgaaaaaagactaccctcaaaacaagcgccaccaaagaagactaccctaaaaacaagcgccaccaaagctgcgcacgcacatgtgtgaagaaggtggaacccggcaccacggcccacaccctaaggggtcccggcatccacccagaggcttcctctcctccttcactgtgctggctgcatgcaggacccaagggaccctgcaggtcacagccaggatgtcagctgctccccgggtccccatttgccacctctcctctctgtgagtcctccccttctagccataggagtcctccctggacggcaccccgggcctatgctggggtccctgtggcccaagaagacagcctggcaagtagtgacagagaagccaccaggcgagaacaccactcctggagccaagaaacaccccgagaccccagtggagagcactggagggtccagaagggccactgcacccaggcggagactcaggcccagaggcctccagagatggagccgagtctgagggcagcctctccttctctcatggccaaccaagggccgctcatggtgaggaagtggcagaagctgctcaagagccctttctcaccttggaaatggcccgtggagatggctcacagctagcccatgtcacgtggcgggctctaaaagtcacccaagtgggcttccctgtccttcctatgaagaacacgaccagacactgagaccagagacacgcaggaccacagtcattcacgccccaggtgacagggaagggctctgcctcccggtttgagggaaccctctggaaccacgctctacaggatgcttctcccccagggaggggccgtgcaattaaatcaacacaggaatgcaagagaaaggacccagagaggagctggctcggcctaccggttgcagcccggcagctgagcgagctcacggcagaggccgtggaggctgcctctgattagggaataatttaattaaaagaaactgcatccctgaccctgggagctgggaaggggagggaagggccatcagctaaagcagggacaggagggcggggactggggctgcttggtggagcctggtgcagcccaggcggagctcacccggcgatcgcttcccgcaggcaggctctgctccagcactaatagggcttaataaaaacttccagttgggccagtgaacccctcattaagctgtttttaaagcacgaatttaagagccgcaagggtgaagggtcacagggagcatttaattcacaatggctggcgggaggtgctgccgcaatggaaaacaccctagcccagtgtctggggccccgcacacgcacggcgacacttggcctgtgcggggacagcctagaaagcagacctgagaggtggggaagtttcccgcttggcaagagcacagcagcaaaacccaggaggggcctggtacgcttggaaagcctccgaatgtagcgacaaataaccgaattccagcacaacctgcaacgaaacctgggccgcggccccacacaggcacccaacgctgggacagcctggccgtcctgcctccgtggctcacacaggagcgcccgttgctgctgagattcattcctcgcacccgctacgtggatgggcccccccagcctccacgtgttttcagcataaccacagtccaatcccagtgagacccaggccacctgtgtgttggcgctgacacctggcccagcatggaggaaggccccagaccagctggcattggccttccagaagatgaggataaaccaatcattcatcagtggaagataaggataaaccaaccattcatcaaccaagtttcttactccaaggaccccaaattccctcaggccctggcctgtccaactctcccctggatgggactgtagtaagaaacagaacccacttcctacaaaggaatatcctgggaaggtggagacttccagaacccttccctgggtcctgggaccctcactcctctgtatgcccccagctgacaccctcacttcactgccctgagggagcaggggggcaaaggcctccagcccctccccacaggcagtcaccatcaacagcccggttccctgcacgagcccatccccacgcccccacgagcccctccccacatccccacgggcccaccccacacccccacgggcccatccccacgcccccacgggcccatccctacacccccatgggggcccagtggtgcaagatgggggtaggatcgcctggaggtagacacccgtacacacccaagtccatcaggctaaaatcacaaagaaattacaaaacgattttgggggcctaaaacactccaaaggccttgggaacctgttggtcttcctctgggactctatctgggcacaaagacctggcaaagtggcccaggagctgagccagaggaagccctgccctggcgcctgtgcactctgccccctactcacacaaggctgcccctggttccagaacccctcaccacgagtgtctccttcccctggtcacatctcagcggccagtggggtcacaatgctgtcccatcccgcgcctgaaaagcccagccatccctcccagctgccccaggcctgggaggggccagaaagcgtctccagaagcactggggaccggccctggtctcagtcccagaacaacggctgtggcctttgctgtttcaacctcaccaaactctgcagacgggagccccttcccagagcccgctctccatacagaaccaggtgctaggcatggcgccccatgggggacggggaccacgctggaggacagggtccacactcaggggatggggccaaactgggggtcaggcccacacttgggggacggtgcattgtcgggagggtgccggcaaaggcggtctggtcctggagggaaagcaggcagccccacggagccctgccacccgctgctgcgggtcctctcgggttcccgcatcctttccaatgcgcaagggcggctggaagctcgagacactcccagatccaggctcactgaatatcaaaaggtgcactcgctgcagggcggcaggaagcggccacattcggggctgcggaattcattaccgtcaggctccttctttgaagtgaatgttaccaaactcagcagccctcaaagctcagctctatctaaactccagcagaaacacagacggcagaatggggtttaacaaatattgtggttttcctgcgtcctggaaagcgcggccctgacgaacgcagcttcatcctgctcagcagtcacgtccgtctgtgaacgggggcgcacggccctgggacacagagcccaggacagcagtggtcgtgtacgtgtgaacgggggcacagggccctgggacacagagcccaggacagcagcagtcgcctctgtctgaacgggggcgcaggaccctgggacacagagcccaggacagcagtggtcgcgtccgtgtgaacgggggcacagggccctgggacagagcccaggacagcagtggtcacgtccgtctgaacgggggcgcaggaccctgggacacagagcccaggacagcagtggtggcgtccgtctgaacgggggcgcaggaccctgggacacagagcccaggacagcagcggtcgtgttcgtctgaacaggggtgcagggccctgggacacagagcccaggacagcagcagtcgcgtccgtctgaacaggggcgcaggaccctgggacacagagcccaggacagcagcaggcgagctcgctggaggggctcttacaacagtagagagatgtgaacggagacccaaagaccagcctgggcagcacagtgggaccccatctccacaaaaagttaaaaattagctggccatgacagtgcgcctgtagtcccagctaatcgggaggctgaggcgggaggatcgcctgagcccgggaggtcaaggagctgagattgcaccactgcactccagcctgggtgacagagcaagactctgccttgaaaagaaaagaaacgtaaacattctgtggatggtgtggtcatcctgagaaaaaggaagacactagcgacgggggctgtgcggacttcccggccagcggccgtttcactaagagcagccgtgtgtattttcaggcgggtcccgctcacacccacagcattgtgagagcatgtcccggggagcccacgccgagccacgagccctcagaaggcagggtttgctgctggtgaaatgttaggatctttgactggcagcctctgcagactgctgggctgagaatggtctggggccgggcgcaatggctcatgcctgtaatcccagcactttgggaggctgaggtgggcgggttacctgaggtcaggagttggagaccaggctggccaacactgtgaaatcccatctctactaaaaatacaaaaattagccgggcgtggtggcgggcgcctgtaatcccagctactcgggaggctgaggcaggagaatcacttgaacccaggaggtggagcttgcagtgagccaagatcgcaccactgctctccagcctgggcgacagagcgagactccatctcaaaaaaaaaaaaggtctgggaccgcccagtggggaagccacagctacatgcggccacggagcacatgaggtgcagccaacgcaaccaaggactggagctttttatttcatttagttttaattaattttagaaacacatgtgcccagtggccgggctgggtgggggccctggaagcctggcccacctagagccggctggctgctgcctcggggcacgcactgcctgaggatgctgctttgcgggccgcagggtcccagtgaccgaccccgtgccccgccctgaaccacctgatctccactaaagcccattgtgcaaaatgaagacaaggaatgtcactgagatggacacagacgcacacgcggctcggatgagctgaggaacgcacgcacaaactgcattctcccaggccgtcccgaacgaggccacaggaaaggagcctccccagaggtctcagatcaggaagcctgaccttccagtgcctttggtctaggtgttctgaggcccagcacccggagtcatacctcagtaactggcagctctatgttctccaagatcagggaagggaagacagttcaaagacgcatggctgctcggaaggcagggagagcactgccgaagctactacgagtcttctgaatttctgcgcgacagtccaaagtgacgtgctgagccgctgcagggtcagacacaacatgaaactcaggctcacgagggctctcaggcggaaaacattaacattaatgagtcaacaattcgcttctgagtccctacaattaccacctgctaccgaagaatcagttagaatgtatgacgctcacctgaaaacacccagggagacacaaacgcagaagactgacttccctgggctgggagcgcaagcgcagcccccgacggcggccacacaggctcacgtcccaccccccatgcagaccccgttgcttttgcttcagcaagtggttggggacgcgggaggctggctccagagtcacccggctcctcgactgcctctgccgctccagcactgcctctgggagtccactgccccaggcacttcccccccaccctacttagagtagagcctgtgttccccaggaggcctcacaggcgggggcacggggagggtgggctccaggccctctcatcctcagcgatgggtcctgtggccctggtgctgagacacggcagcaccgtggcctcgcaggcccatctctcacagggaacacacaagcctcagccgctgccccccgagcctgccccggcctgcccgctcacagcccccgcggtgctgaccctctgacccgcgcactgggctcttgcctcacggactcgattttgcgatcactgctcagagtccacaacatcagacagcagggacttctcccgctagacacaggtgtcaggacctaaagctttccctcctcataagaactgggaaaaaataatactgttgtgattgtacaattttaattaaaaaaattttttttgtggtgatagggtcttgctatgttgcccaggctggtctggaattcctgggctcaagaggtcctgcttcagcccccaaactgctaagattataggcataagccactgcacccaccctgttgtaattttaaataaataaaatttactaagaaaagatttgtttatctaaatgttgaagaatgtagttttctctgtgggcattttgatactgaatgtatactggcgcactgcgggggaggcccagggactcaggtcaccacacacgcttcctcacgtctactcgctcccacacgcgtgagcactctaggggaggcctggggactcaggccgccgcacacgcttcctcacgtctactcgctcccacacgcgtgagcactctgctcccttgatgcagccacaggactggcaggcaaaaaaccagctggttccaaccaggttgtgtcagatttgcaaacagaaaaggaattcctgaaataattccttgcttcttgctttaagaaaaacatggaaacaatgaacagacgcaagcacgcagagccgcacgccctgacggtgcaccccgagccaggtggcacccagcagccaggaaacccatgagtgacagtggccaaggtggcctggtcgtctgcaattacaggaacctgcctttcaaggtgattaaaatcaggaataaggttcctttgtatttacgttttaacagattctgatgttcttcctttctttgattcgatccagatttccagcatcactggtactcaatattgaaggaatgaaaatacgtgaggaataaaagaatgaagaaagtgacctctaccgcaaggacacaggccctgaaggctgagactgtgaagggggcaggcaaagatccacgcccagacaggccacccctgctctcctgggaaaggggccgagagccagagagttcggggcagagagagcctgagtgcgaggcccaggccagggcctttaccagcaaagaccggcccctctgcctgcgccctgaggtcatggagaaaggcaggggtgggggtatggtcatccttcccaaggtcctggagtcaggtctgcttaccaagccaccgtgtgtcccatgacattctggaggcctccgggcccaatggaggtcacatccaccgtcctcccggccctgtcctgtccactgggtggctgccctcttcccaccctccagtattgactgcgttgtgtgggatggggaagacctccggtcccctccaccaaacaaagcacaagccaaagtgcccaccagcgtgagtgccgtgagcaccgtgaaccttctctatgccgaggggcacacagccttgagcgtccacgggggatgggcctgtgggtgctttccctctgccccagggaagcggtggtaatcacacctgtgagatgccgacaatcatgcgtgcgaccatccgtctctaggtgcccggggcctggaagcccaggagctcccacatccagggaggaggcacggatcagatcacaagcgcccatcactgccctccgtgcatactgggaaggctgatggcagaggctaaggaaggggagaggccaggaaaagtgcgtgaagatacataccaaacacacaacgctcaactctcgcagagctttctctaaatgcatctcacttaccgaaagagtacctgaaaaacaaaagaagaaacgagtattaacactttggcttgtttcaaccaaaaacccactgtttccccactgagtgaagcccaccctggcacccagcacggtgtggggtcagggaagccctgcgaggaggacctgcccgctgggcattaggggaacaggagcccctccccacggctcacacacaggcaggcccagaacaggcaaccaaaacatattccaagatacacctactaagtacccatagaaataaaaaaatatgtattttgcga

SEQ ID NO: 183 - DNA, 12158 bp, Homo sapiens
  source 1..12158: mol_type = other DNA
gagcccgagccggatcccgaggcgacgggagccgaacaggagccgccgctgaagccaccgccgggtgcccagcgccgccgccgcccccgagctcccccgcgcccctgcccgcgggcggccggtgggcagcgggcgccatggccgcgccggagccgctgcggccgcgcctgtgccgcttggtgcgcggagagcagggctacggcttccacctgcacggcgagaagggccgccgcgggcagttcatccggcgcgtggaacccggttcccccgccgaggccgccgcgctgcgcgctggggaccgcctggtcgaggtcaacggcgtcaacgtggagggcgagacgcaccaccaggtgggggccagcgctcgcccccggcccgccgccccctccccgagcgcgtccccctggggcgagcaggggtcgcacgggggcccgagggggctcccgcggggaggacgcggacgttgtcgggaggcagcggcccggcgccttcggagtcccggcgcaggaagctcagtcctgcacgggggtgggggggggcatcctggcagggaggggcccgcactgcggctcctggccgctggcctcgccctttggtcgcgttttggcctcagtgtgccgtgaaggagggtgttgggccgcctggagcccctccggaaaggtgaagacctgggtgcttttgcctgggtgtgtgtgtacacgtgtgcgtgtgaacacagctgggcgtgtgtatgcaggtccctttggggtcagccatgtgtgcatgcgcctgcctgtgcgtacccaggaggggtcgcagtaaaggcatcagtgtgtctgcacctgtgtgtgctgtagtgtgtgtgtgagtatacaggtctgcacgtgtgcctgtgtgtgtgcaggtctggactcctgggcgtatgggagctgggctctgtgtgtgtgcacgcctggctagtgtactcatcactgtctgcaggccggtgagtctttgtgtctgtactctagtgtgtcccagctggtgtgtctgggaccgggctgagttggtcattgctggcaaccacattccttagctacaaaggcactactcctcctcagaggctgcctagcctggctggggttactggccgaagcctcctgcctcctggctaaggagaacagagccttttctctgtgggttctgacccctgaggtgtgtctgtctcccacaggccagggactccctccagaccctggttggggtccagcgtccacacaccccttttcctccaggtcccctgtccctcacagcaccgatgaatccataacctgtctacatggctggtcctggaacctagagattagcaggttggttcagctggacctggagctggtctcctgtttacctggtgccttgtctgtcactctgtcggccggccccatgccttccacccagagtgtctgctgtgtaaggttgtttgctgaagaatgtggggatcaggccaggggcctggacctgagggattgagggtagggctgccagggctggggccaggctgctgttggatagtcactgccaccctcgccctgggaacacctgcttttccaaggccctgtggggctggtctctgaggactggacacacagaccatggtggactctccccactgccccaggagggcaagaggggcagttactgccccatttgacagttgaggaaactgatgccagagattgagggtaacttgtctgggacacatagtcaagaagcagctgggcactgggttcctcttgtctcactctgggtcatggggagagaggagggctgggggaagatgggcctggctcagtccctcctatctgttcaccacccctgctgagcccggcagctggtggggagccttgtccaccctcccccaggccgcaggtgggagtagggctgcccctcttcctgcccacttcccagtgggcactgctttctctccgcgggtgtgcgctggccccccgcgtggtccagacacttcacaggcacctgcacgcacacaccgacggccaccaagccacagctgtccacaggtgcacctgcctctccccctcgccggctgcacctgaatcctgcttccctggctgtgtgtgggtgcccgagccaggagcccagcccttcccctctctgcagatccagagggaatgggcccatggccatggcctggaggtagatataaggcctagggtcaggagtttagactcccacactgcacggcagagaatgacgggaatgggcacagacacactcaaactggggcccagggagacacacctctccttcaaacctggacggagacacagactttgaaacagatggatgcatgcgcgcacagggacaggcagactgaaaacctgaaggtccactgtgcaccatttttgtcacttccagacaggacttacccagcggccctatcctgcagccccttcccagccccgcctggagaagaccctgggctaagggcaaggctctgggagcaccctgaagccctcacagcctgggcctcagtgtccggagcctgagtgcagagggagggagccgctggagtccgggggtggggggcggggccggcaggcctcttggtgcagccacccgcccatgcagaccagccgcctgtccgcacgcctgggccagcccagagtggtgccactgcccatgtgctgcccggaatgtgggccactgacccgctcctatcgcccattcgccccaggtggtgcaaaggatcaaggctgtggaggggcagactcggctgctggtggtggaccaggagacagatgaggagctccgccggcggcagctgacctgtaccgaggagatggcccagcgagggctcccacccgcccacgacccctgggagccgaagccagactgggcacacaccggcagccacagctccgaagctggcaagaaggtatggcgggcttggcccacagggaccaccctagcctctcccagaggctctctcagcttttgacgacgatctttgcctttggtcacctccagaagtcttggtctcttctgccttttggggctccttttctgccccagggaccatcttgttggccactgggggccactgtttctaccctcagcctgtgttttaaactgggtagggtcagggcagcctggcctgttcctcttctccaggatgctccagagccacttgccctatcgaggggtcactctgacaagctgccgcctccccagcccccagcctcgtggctgaggaaccctgggaagaggcattccaggtctgcgtgtgcgcagctctgtgcctgtgctgggtgtcatccgtggctctgtctttgtctctgttgaaggcgcctgcatgctgggaaggcctgggagagggccggccttctccacaggcagcgccgtggttggggaagcctaggaggccactctgccaggcctggcgtaggtggggctgggagcatgggagtggagttgggggtccaggaggctccagggtgagcccactcctccccctagatacaagggagggccctgggaccctgtctgctgttcctcctggactcctgctgggtagtacttcctccttcccctgcccttgctcccagccaggagacccagaaaagtacaggggcggcctgctccacctcctgctaggtggccgactgggaggggcggcctggcaggccttggggaccaggaggaacagcctgaagctgtctgtcttatcttcctggaggccctgatggcattatctccatgttctctcctacctttttttttttttttttttcattttcaaagagaaccctggccgggtgcggtggctcacgcctgtaatcccaacacttcgggaggctgagatgggtggatcacctgaggtcaggaattttgagaccagcttgactaatgtggtgaaacccccgtctctactaaaaatacaaaaatcagttgggcatggtggggcacgcctatagtcccagctacttgggaggctgaggcaggagagtcgcttgaacccggcaggcggaggtttcagtgagccgagatcccgccatagcactccagcctaggcgacagagtgagactgtctcaaaaaaaaacaaaaaaaggaaaagaaagaaatcccttcaggggatatgagtccaggggttggccagaccccactgtgagaaccgcgcttggggcaggggtgtgggatctggagttctgagggtgcaggggatatacacattcactttctccctttcccagacgtcactgctgaagctggctgcccctaggagctgagcccggggggagcggcttggcagggagacagcattccctgtggggagcccagcctgggcgcaggcctgcccgtgggacctgtgggacccgttttgttcctggggcttgagggcgggccacagtggtgctcagggccaaggtgcccagcccagggctggtgggggggctggccttgcaggggggctggctggtcctaagcccctgtctccaggctgagggttggggcctccctctttcccagccaccttccctcccccaggaggaagctccccctctgcctcaggcgtttgtccattgatttggacacaaacgcatggttcaccttcctgtggaaaaatccggccctcggactttatctggagggtgcagtggcccaggcaccttgccttgggtgggaccttccccctctgctatttcaggctctgggggctgcaggaagccctaggaggggcttcctctgggtgtatttttagaggaacaaagggtggcctgagtggcaggtccctttgtgcatgagtctggctggggacaggggctccaggaggtcagggggcacccaaggaacagggtctccccttctctcttctggcatcaagacctgaggtttctttttctttttctttcttggctcactacaacctccgctgtctgggttcaagcgattctcttgcctcaccctccccagtagctgggattacaggcgcgcaccaccacacctgactaatttttgtgtttttagtagagacggggtttcaccatgttgctcaagctggtctcgaactcctgatctcaggtgatctgccctcctcgacctcccaaagttctgggattacaggtgtgagccactgtacccggcccctgaggtctgaggtttcatttctttctttctttttttttttttttgagacggagtttcactctgtcgcccaggctggagtgctgtggtgcgatctcggctcactgcaagctccgcctcctgggttcaagcaattcttatgtctcagcctgctgagtagctgggattacaggcgtgtaccaccacacctggctaatttttgtgtttttggtagagacagggtttcaccgtgttggccaggctggtctcaaactcttgggctcaagtgatccgcctgcctcagcctcccaaagtgctgggattacaggtgtgagcccctgcgcctggctcaggacctgaggtttcttcacctgagctcccagcatgggcaggaagaggtgggcctcacctgacctccacagagcaggctcagatcctgcccttctcagcctgggttcagggcatgcctcagatggtcagggagcccaggagggcaaagcttaccttgcggggatggctccagtgggggcactggtggcagagaggcagagctctggaagggatgtgtgtagtttgtctttggtgaaggatggagagggcccaactttgggtgccccctgggagctaagggtggctctcagtgtcctctgtcctggctggggataggggaggtgggcaggggaggacactgatgtggttggcccctccttttgggggccgtgaaggcctagttagtgatgactcagccctgggccacaccaggctgggggtggccgcagctgcagtgcagctgatcctagtagtgacgacaggggacagcccccaaacagagacggggtggccagcggtgccaggccctggaggtggtggcagaccctgagccctctgccccctgcccctagcccatgtctccacccccatctggagggccttgggggctaagagcaggtgtgaggggtgacagttctgcgggaggcggctgtgtggttggggcgcggtgcctgcgggggcttccgggcttccctggctcttgctcctctggagcctcaacaggaccgtcctgtgttctggggccgggactcctccctgtcccctcagccctgggtcctggggcagggcagggccttccagcagcttccttccttcctttcttgggacggaagcctagctgggtggggggcgccaggctggagccttcgcaggggagcgggctcagtcatcaccctgctccccagagtgactcagcccccacgtccccacccatccccggggagccagggccgcagagggaggtagataagtggggtggcagcctgggtcggccagagagttcaggccaccccggccggacgcctgccacttgctgtcactgtgccgctgtcatggcacgctccgggagtgccacgccacctgcccgggctccgggagcccctccacggagcccaccccagaggctggtacaggtcaggtggggtgggaggaagggagggctaggaggaaccggcagccgctcagcctcccggggtggaaggaggggactccgggaccttgatgtaagcaggctggtcgctgagcaacaatgaaggcctttctctgccagggctggtgcgtcaccatctgggggggtgcccagggtacccccatgccagcctctttgtccggacacaggcatggctgggggaccagggatggtccagctctgtgctggccgccggcagggagggagcctggagcccgtgggagcccgagggcctggcgggaggcggcaggaagtgtgtgctgagccagggcagggaggaggaatgtgagctatgaacgccgcccgagctcctcggctctctgggccccccttccccacgagcccatgtgctgccagcagcccaccctggcccctccattgcagcccctccacctgaggttttagtgctgtgcctggcgccactgggaccctgctgacaatgaaggggtttaggtttgataggcagaacttcttgccttgtagagtgaaagacggctgcttctggacagaggcagaggggtggccagaatgaccctgagaacactgaggggtccttggcctggcctcagggccccagacacccaccagatcctgcttcctgtctggtgccctgagaaaccctgccccgcaggccgctgtgcaggcgtgggaagggctgccgggccagcactgtggggctggccgcatgtgtgggctgctgtgcgtgtttgcaggtgtgtgtggacgtcttgtgtctgtggctgtgtgatgtgtctttgcggactgggcccatatcacgctcccacctcctccactgaattgggctcctgtccccacgccttccctgcgtcccaggccagcctgggggccgtgctccacctcccctcccgaactggactcctgtccccacgccttccctccgtcccaggccagcctgggggccgtgctccacctcccctcccgaactggactcctgtccccacgccttccctccgtcccaggccagcctgggggccgtgctccacctcccctcccgaactggactcctgtccccacgccttccctccgtcccaggccagcctgggggccgtgctccacctcccctcccgaactgggctcctgtccccacgccttccctccgtcccaggccagcctgggggccgtgctccacctcccctcccgaactggactcctgtccccacgccttccctccgtcccaggccagcctgggggccgtgctccacctcccctcccgaactgggctcctgtccccacgccttccctccgtcccaggccagcctgggggctgtgctccacttcccctcccgaactggactcctgtccccacgccttccctgcgtcccaggccagcctgggggccgtgctgtgactgcatccctgaggggcactttggtgggcaggtgtcagggtcagccttgaagccccacgcctgtgccaccaggtgtgtctgggggaggagtgagtctatgtggtggggccctggagattttgggggtcttgcaccctctaattcagcccatgtggcccagctgagcccctgtggggccagggagccacaggcttgtccctggagtttctggtgtgacgggctgggtggtggccatgcagagagggttcagagggtgggcaggaggcttcagatgaggcatctggcaggctggacaggagaagggtgttccagaccaagggcaggtcctgagcccaggggacagagcactagctgtgtggagaaggacccccttgctcccttggcggggcggtcccccccgctgacatggccgtttctggtccattggggtttggagcgagcttgaaggtgggtggctggaggggttgggggtgtctgaggcctggagacctgccctcctgaggtctgagcgcccccttgccatgccgccccagccctggcctggcctggcctgtggtccctcagggacacacagggaggtaggaggtgagggaagggccctggcagcccccagcccgcctgcacagtctcccctgcgcacgccctcaagcttggcgctccctggaaacctgagctgcctcctgcctgctccggccaccgccatgtttaactgagcacgggcagccgctggccaccgccgccgcaccctggcccaccccctggctgggaggtggtcattgggcctggccttgcctgcatggtcccctggcccagagccctaccgcaggatgccagaggtaacatggggcagggcctgggatggtagcggggggtccttccgggcaccaggaggccctctgtgccctgtccacactaagctcctgccccagcccctgcttgctgggcccacgggggtggggcggctcattttcctggaatgtgaaagcaaacagagccgccaccgcagccagccccacggaggcctctggagagaaaacaaaactgctggcctaggagcgcctgccccacgctctggaggagagcccggggcagggggacgcacaggcagagccctcagggacaaccgccccaggaggccaacggcgacagttcatcccacctggtgcttcctcccaccctgcctgtgcgccacgctggcctcgagccaaaggaattctcccagcaacccgggaaggcggctgggcccgtcggggaggcttctgggtttgaaaacaggctttgcccaagttcccacagctaaagctctgtcacaggcagcctgggtgcccggagtgtttgccactgagacctgggcctgcccgtggggggcacggtaccgagtttgggcagtggcggcaccaccggggagtggcctctggaggcgggaggctggagcaagagactgaccctgtccgttgggcctgcaggatgtcagtgggcccctgagggagctgcgccctcggctctgccacctgcgaaagggacctcagggctatgggttcaacctgcatagtgacaagtcccggcccggccagtacatccgctctgtggacccgggctcacctgccgcccgctctggcctccgcgcccaggaccggctcattgaggtaccggcccaccagggctgcggggtgccgagtgccccgcacctgtccacactggggccctgggtccttgcagggaggagggagacgctgggaacctgagctggtgcgcctcctgctgcctcggtgggcggtggctgtgatgaatatttgatgccacacctggccacgcggcgttgggggctgtctgggcccatggcggggctgatacatgctggtggcggcaggtgaacgggcagaatgtggagggactgcgccatgctgaggtggtggccagcatcaaggcacgggaggacgaggcccggctgctggtcgtggaccccgagacagatgaacacttcaagcggcttcgggtcacacccaccgaggagcacgtggaaggtgggccacggcccagggcacagggtgggtgcggtgtggtggctgagcagccactgacacgctgtccccacaggtcctctgccgtcacccgtcaccaatggaaccagccctgcccaggtaagagggtggggtgcccatgagacacagggtgcctctgggggtacccaggcccgacagaggcccccttctccctggagatccgtcctcgaggtgtgctagtgacacccgattttagccctgtcacctccctttaatgcccctgtgggtctcatcctgggtcgtgccacacacaagccacgtggggcccctggggtcggggccactgccttctgtcctctcctgggcaccacctggtaaggagttgccctccagtctctgcctcctcagggagctggcggtggcctcaccccaggcgttgctcacgccggccattcctgcacctgaaccccctctgcaccatgagccggccaggccacctgcctgtcactgccaggcgcccggtgcctgccccgccgcatctggagtccaccagaggcccgaggccccctgccgagtggaggagcacacactgggggggggtgtgcctctgtgcacatgtgtgcgtgtgcaggtgttgtgtgtgtctgtgaaaccacaatctgcccttggtttcccagctcaatggtggctctgcgtgctcgtcccgaagtgacctgcctggttccgacaaggacactgaggtatggatgttctccactcctgagctcacacgtggggttgctagaggccttggggtaggcgtctgtggagatgtcagcccgggcagtggggtctctgttcaggaagtcctcgtgagccccagccccagcaggcagcctctgttggttgctccctaggaggggccaccgtctggggtgtgggactagggctcactccagacaccccacccaccgtgctcaccccaggatggcagtgcctggaagcaagatcccttccaggagagcggcctccacctgagccccacggcggccgaggccaaggagaaggctcgagccatgcgagtcaacaagcgcgcgccacagatggactggaacaggaagcgtgaaatcttcagcaacttctgagccccttcctgcctgtctcgggaccctgggacccctcccgcacggaccttgggcctcagcctgccccgagctcccccagcctcagtggactggagggtggtcctgccattgcccagaaatcagccccagccccggtgagcccccatcctgcccctgcccaccaggtactgggggcctgtggcagcaagatagggggagagagacccagagatgtgagagagagtcagagacagagacagagagagagagagagagacacagagagagacagagagagagcgagcgagcgcgcggcagccgcggggcgagggcctttgctgctctgccggggcctgctgactgaaaggaatttgtgtttttgctttttttccaaaaagatctccagctccacacatgtttccacttaataccagagacccccccccttcccctcccccttcccctcccccttgggacgcgctctaaataattgcaataaaacaaacctttctctgcaaaccatttcctccccgccccctcccctcagcagcggccgtcctgagtgggagtccctgggacttcccagtggccaagttggggcgcccagcctcttcgtggggaccttgggtaaggccagggaggcctgatgtggccgtaggagctgcccctgcccacctgccctggtgtgggggtccctaggccacaccctgctccccacccagctaccctgtgcgcctgtgccctgctgggggcctgggctctccgaggggcctgaggatggaggccccacgtccccgaggagggcggcctctggacaggcccctcattccgcgcggcagctcccaggcctggggaacgtaggtgtgtgagagcggcacccgggaaggacgcctggcctctggctcagccctgcttggcgggctcccccgtggacaccctgttgactttgcacttccctcccgggccccgcacccccgaaccgaccaccgatcgaccggcaccgctgttgcctcgtaagccatagcgcatgcgcgctctcaggataaacaggccctgcctggga

SEQ ID NO: 184 - DNA, 29464 bp, Homo sapiens
  source 1..29464: mol_type = other DNA
tgcgcctgcgcgagggctacgcgcgctccggccggggcgcgggcgcgctctcaggcgggctccggcggcagcgacgcgagcgcggcgatggggagcggcggcggtgagtgcggggcgatgtccgctggtttctgccccacaccccttctgcctgccctgcggggcggacggtgggtcccgcgggaggggaggccctggcggcctgaagagggctggctcgagctctttaacccggggcggatgtcgcgtcccgcgcagggagccccggcggccgggcgcgcggtttaaatgcccggcgggcgcccgagcccctcggagccttcccccgcggcgacgttttccggccctttcctggggcaacgatcgggtcccggggcagcgatccggcgatcgggtcccggggcggcgatcgggtctcggggagccaaacaccagcgcctcctggtcggggaaagggctgcggagcgcgtgggggcgaagcgatcccgcagcccggccgggccctgaccgagcctcagtccagcggggccgtggacctagctctgtggaaagcagcgttcggccccgcgcgcgttgaggcacaggaaacacgaactgtggtttcagctattatcatagtatctgtcctggagccggagaatgaggaatattttatggagaggtctatagaatctttgagaattcgtcgccctggaatacgtttggcttttgcagctgatttaattgctaacaggaagaccccggtcaagagaggggagccgggagcaatcgctaggaagtcctagcaaggcggggagggatttgggcccacagaggggagtggcgcttcctttcaggactggaaggaaggatggatagaaaggtagatttgtagatggggaggcaggatcctgaggttcctgtctgagggcttctgtttccctgtgaaataagggctaaggtcatctgcttagagtgaggaaggggttgctggagtaggagttggaaaatccggctgtgggaagaggagagagcacatctgagaagcatgtccgggctgcctgcctggtgggtggaatgcccgtctcacctttaatgattgcatctgtacacaaacctacaggtctaggtttgtgttgggacctgagcaacaaccttactgcgtagctgtcaactccgcattctacaatagagggcacactgagactctgcagagctgagacttggacgcacactgccccggcctccaagtctgtggcttctctccagggccgacccttctaatttggacttgaaaaccagactcttcaagcccacagatctttattgaacattatgcaccttggtcacgtgtgcaaaaagcaaagctatccagcaaaggccccaggagttttcctgagagtgaaatagaaggaaaaccgtcctcagcttcggcagctttttccccttcctgcctgtcatgtgggctctggatcagaaagtttcccaatagccaagttacatgacatgcgctatttgccataaatatttgttgaatatttgaaaatgaatgatctcttctgtaatttgtgcaatgccactcctttacataatctttgtttgggacaagaagcatagttccatcttttgtggcacagggaatagtaaccattagatcatcttcagatgtaacttttatcctttttttttcccttcaagggtgtgtatatagaataatttttcatcttatcaaggcttctgtctttttttccttcagtggtccactgtaggtgtgccaagtgtttctgttatcctacaaagcgaagaataaggaggaggccccgaaacctgaccatcttgagtctccccgaagatgtgctctttcacatcctgaaatggctttctgtagaggacatcctggccgtccgagctgtaagtccctgcatgaaaacactatgagccctagcattgttgattataccatcaggccttgtgttcttaactgtcagaacaaaactttggctaaaaaagaggttggggcagaggccaggcacggtggctcatgccttaatcctagcactttgggaggccgaaggggggtggatcacctgaggtcaggagttccagaccagcctggccaacttggcaaaacccccatctctactaaaaatacaaaaattagccgggcgtggtgtctcacgcctgtaatcccagctactagggaggctgaggcgggaaaattgcttgaacctgggaggcagagcttgcagtgagccgagatcacatcattgcactccagcctgggcgacagagcgagactctgtctcaaaaaaaaaaaaaaaaaaaggagggcaaaaaggaaacaaggatgatatcattaccagatgctttctttaagacattctgattacagaaattcctactgctgtctcctagcacactaaaattgcctctgttcattgcagtgtcaacaaagaaagtaccttttttttttttgagacagagtctcgctctgccacccaggctggagtgcagtagcgcaatctcggctcactgcaagttccgcctcccaggttcatgccattctcctacctcagccttccgagtagctgggactacaggcacccgccaccacgcccggctaatttattgtatttttagtagagttggggtttcactgtgttagccaggatggtctctatctcttgacctcgtgatccgcccgcctcggcctcccaaagtgctgggattacaggcatgagccactgcacccggctgaaagtacccttttatggcagtgaaatttgcatcccttaaaaaataggatagtgtttaaaagaataagaatacattcttgaggacaaattccatgtaacatttaacactgaaatggactctaggagttattttctagatattggaaccataggcttactttgagtgacttaacctagagtatatagtggattcatggggaaatgccagcaagaacccattttctgactcccaaagccacctccattgcaggtgcgacacactttatggaccccagggggtgctgaatttccaatggcagtggaaactttggtgcttaaagtgttcacctgtgctccaggtcctggcctggacactcctgcgttggcccagcgcttaggctccgggttctacctgagacctccatcatgggtgttgttctttgccctgagtccctgtgacctgtttccacactcccactagcaaggcctccagcggggaagcacaaaacacatttccgtcctgcctgcccccttttagagtgtttcccctgtctttgggggtgatacctttgcagggatgttgaaccctctttctcagcctaggtgtttgtttcctccttcccagatcattgtcctctgccctgctttagaacctcagagaaactcgtttctgggctcttttatctgctcaaagtgacagttactttcacacagagattggggacctcaactacttgggatggcgagggagacaggagaccctacatctgcctctcgtcctcaagagcctccaggtgtggggcttttgggtggtgcctccatcacccagccccggcccccgttgttctgcaggtacactcccagctgaaggacctggtggacaaccacgccagtgtgtgggcatgtgccagcttccaggagctgtggccgtctccagggaacctgaagctctttgaaaggtatctctgcaccctgagaatggctcagtcttctcctgccttggcctccctatgtgccagtctgtgtctcacggcctgattcagcaacgattttcctgttgctgtctcccatgacattgcctcataccctggggagtgactgagggtggcagacctcacgcatcaggccgcacaagccacacaccttccagcaggctatgcagtcagtcatccctcacgccactgacacgggcccgtggtgcctccagagggctgtgatccattcccacatgacccagacaagagtcaccttcctgtggaaacttcactcagccttccttccctttggtcaaaaccatctgaattctatcctatagcgtttcactcactggctgatcccaccccaacctgcaccccgcaccctggcccctgttcacatgtgctcatggtcccaggtacccgccgccctcagaacaaaccaaggaaccacagctcaggcggggatttttcttttttgttgttgttttttgttttttgttttcgtttttgtttttttcttgagacggagtctcgctctgtcaccaggctggagtgcagtggtgcaatctcagctcactgcaaccaccaactcctggttcaagcgattctcctgcctcagcctcctgagtagctaggattacaggcacgcgctaccacgcccatctaatttttgtattcttagtagagatggggtttcgccatgttggccaggatggtctcgatctcctgacctcctgatctcaggcgggcatttttctgacagggattcgctgtgagcctcgtccatctgagttgccagaaatccagatcgacagccaaccagggcaggcagccatgttgccgcggccatgcttgggctgcttccagggggaatgtatatatttcttattgagacattatccacacatcacacaattcatccatttaaagtgtataactcagccgggtgtggcgtcacacctgtattcccagcactttgggaggccaaggcgggtggatcacttgaggtcgggagttcgagaccagcccggccaacatggcaaaaccctgtctctattaaaaatacaaaaattagctggatgcggtgatgggcacttgtagtcccagctactctggaggctgaagcatgagaattgcttaaacccagcaggtggaggttgcagtgagccaagattgcgccattgcactccagcctgggtgatggggtaagactgtctcaaaaaaataataataaaataataaaatatggctgggcacagtggctcacgcctgtaatcccagcactttgggagaccaaggcgggcggatcacgaggtcaagagtttgagaccagcctgagcaacatggtgaaaccctgtctctactaaaaatacaaaaattagctgggtggtggcacatgcctgtaatgccagctattcaggaggctgaggcaggagaattgcttgaacccaggaggcagaggttgcagtgagccgagatcgcaccactgcactccagcctgagcaacagagcgagactccgtctcaaaataaataaataagtaaataaataaataaaatgtataactcattggtttttagtatactgagagttgtacagacatcaccagtacttaactttagaacgttctccttaccccaagaagaaagcttgtccccatcagcagtcacttcccattttccccacaatcctggaaactctagacaacccctaattgattttctgtctctccggatttgccttttgtgaggatttcacatggaatcatgcaacacgtggtctttcgtggctggcttctttcacggaccctgatgttttcaaggttcatctgtgtcatagcatgtaatggataattcgtatttgattacatgttattaagaaatgttcgaccgagcgtggtggctcacgcttgtaatcccagcactttgggaggccgaggcgggtggatcatgagatcagatcgagaccatcctggctaacatggtgaaaccccgtctctactaaaaatagaaaaaattagacaggcgtggtggcgggcacctgtggtcccagctactcgggaggctgaggcaggagaatggtgtgaacctgggaggcggagcttgtagtgagccgagattgcgccactgcactccagcctgggcaacagagcagactccgtctcaaaaaaaaaaaagaaaagaaaagaaaaaaaaaaagaaatgttctagagccgggcatgatggctcaagcctataatcccagcactttatgaggccaaggcaggaggatcacttgggtctggaattcaagactagcctgggcaacatagcaagaccctgtctctagaaaagaaaatatttttttttgactagctgagcatggtggcacatgcctgtagtcctagctacttgggatgccggggtgggagaatggcttaagcccaggaggttgaggctgcagtgagctgtgatcgcaccactgcactccagcctgggcaacagagcaagaccctgtctcagagagagagagatatatatatatatatgcacacacacacacacatatatatgcacacacatatatatatgcacacacacacatatatatatatatatatatatatatatatatatatattcaattcagggaacaagtattctgacttcttcaagtgctgtagtagttcataacgtttgtggcataaaatattgtgatgctttatgttcttaatgtttcagggctgctgaaaaggggaatttcgaagctgctgtgaagctgggcatagcctacctctacaatgaaggccgtaagtcctcaccccacctgcatgttggcgcttcagataagtgtgagcctttggccctatgaagaagtggtccccgtgttagcagttcagttgctgtccttgctctatccgatggcctgcctccccattccctctcaggagctcgtgcccagatgtaccctgctgagggacctgctaatgatactctgactttgcaggttacgaaagtcgcctcttgttttagcaaaccctttaatttcagttggcaaagagtgactgagccagagcctcagcacgggggctgtttgggctccctgccctgtgcgccatgagcacgcagacctgcctgtggatgctggccctctccttggccatcctcttagaactctcgagacagagttcagcgtgccctgtaacacagagccaggcttctaaacgggaagcaggtacaggcaggttagaactggcctggtgcctggatcccttcatccccagaggccaggtgctccttgaaagaaacttgcgcagccttttcttctaccagttaactgcttatctgctcagcaccccaaggaacgagcccatgatctgtcccagctctcaaaacaagtaaacactgggatgtagcctcccacatttgtacttctaaacgatctggtgtcttgctgggagagagtccctacctggccggctggcagaattgtgactgacagggaccatgagcaacaccctcctccagaatcaggggagccgaggtcctacccctaccctcccatcaaagagcagttcccagacataaaattcacacaccatacagttcacccctctaaagcctgcaattctgtggttttttaggatattcacagggttgtgcagccattgccactgtctaattttagaatattctcctcgtcccaaaaagaacccccacccctgccctggacccattaccaggggtcaggcggtggttcccagctggagggagggtgggacatgaagcgtcgcggggtctccttcccctgaccttcagaatccaggcttccgggaggaccacagcaggggcattgatcacaatgacccacctgttctagacattaatgaagtagggggagaaaagacaggtgcccccatcctggagggctctactctcctgaaacacagctgctttgcactatggtgggcttcaggcattacactttccaccaagaccatggagagctttccacattccgtccctaagagacatccctgggctctgtcctgtctgtccccgcagtgtctgtgtctgatgaggcccgcgcagaagtgaatggcctgaaggcctctcgcttcttcagtctcgctgagcggctgaatgtgggtgccgcacctttcatctggctcttcatccgccctccgtggtcggtgagcggaagctgctgcaaggccgtggttcacgagagcctcagggcagagtgccagctgcagagggtgagtctgggcgaggggcagcacctgcgaggccacctgcagggtcccaggacacaggaagaccccgagggtagatcctggaccctggaaagtcaggagcctaagggaagtgaagatgcagaaaactgagagtgcagatatggggaacgcatctggaaatcagctggcacagaggaggaagcctgagagccagggtgggctgtggagttctgggtacacgtgctgacagctggaaacatggggctgaggctgcatggggcagtgggagctcaagacacaaatctggccaggtgtggtggctcacgcctgtcatcctagcactttgggaggccgaggctggagaattgcttgtggccaggtgttcgagaccagtctgggcaacatgatgaaatctcgaaacctcgtctctacaaaaaatacaaaaaagttagccaggggtggtggtgcatacctatagtcccagctactcaggaggctgcggtgggaggatcgcttgagcctgggaggttgagcttgcaatgagccgtgactatgccaatgcactccagcctgggtgacagagcaagaccctgtttccctttaaaaaaaaaaaaaaaaaaagactgaaatctgggagtggccctctgcaggggagggagggccagacagcagggccatgggcatgggacccaaagacagacaagggagtggtggcccccgggcagttctctgtgctggaaatcacacttctttctcctttttttaaagactcacaaagcatccatattgcactgcttgggcagagtgctgagtctgttcgaggtgagtcaagttgttctctgcactgggactttgtgttcgatacatccctagccgagatcctggaactgaaaagcagcagaagggggtgtccaaggcccaaaacaaaaggcaagccttgcccagaaaggcctagctggagaagccaggggacacatgtgggcctggccacgggctccgatcctggctccatgacccgcctggcaggggagtgggggacggtgagaacagcagagcagatctcaaggaggcatcgaacctcgatgctcactcgtctgctggccctgctcctcgtgggcctctcctgctcgtgtggacctctctgcctggccaaaatggtgaaaccacgtctttactaaaaaacacaaaaattagctgggcgtggtggcgggtgcccataatcccagctactcaggaggctgaggcagggagaattgcttgaacctgggaagcggaggttgcagtgagccgagattgcaccactgcactccagcctggcaacagagtgagactcagtctcagaaaaaaaaaaaaaaagtatggaaaaggaggaagatggtgagtagagtgattgaacatcaagtaaagaataagggccggtcatggtggctcattcctgtaatcccagcaccttgggaggccgaggcgggtggatcacctgaggtcaggagtttgagaccaacctggccaatgtgttgaaaccacgtctttactaaaaaacacaaaaattagccgggcatggtggtgggcacctgtaatcctagctacttgggaggctgaggcatgagagttgcttgaacccgggaagctgaggttttagttagccaagatcgtgccactatactttggcctgggtgacagagggagactctgcctcaacaacaacaaaaaaaccagccaggcacagtggctcatgcctgtaatcccagcactttgggagactgaggtgggtggatcacctgaggccaggattttgagaccagcctggccaacatggtgaaaccccgtctctactaaaaatacaaaaattagccgggcatgatggtgggctcctgtaatcccagctactcaggaggctgaggcaggagaattggttgaacccaggaggcggaggttgcagtgagccaggatggcgccattgcactccaacctgggcgacgagtgaaactgtctcaaaaaataaaaatgaaaaagaataagggaacaatgaactctgctgggatttattctaggatgaggagaagcagcagcaggcccatgacctgtttgaggaggctgctcatcagggatgtctgaccagctcctacctcctctgggaaagcgacaggaggacagatgtgagtggtgcctgctctgggtcggggggagttatgctggacaaaggcgtagttgatgctggtccttggatgcgtttctgtccacaaaagggaggtggctcttgctgctcccggtctctcagcctccgggaaccactggtcagtcggctattcttggtacccccaaaaatgactccaccatttgagagagaagaggtgggaagttagcgtagtgtcggcccttctgggtcttggttctgagttcctcccaagacacagttgtacaaaggctcggtgatctcccattgacaggtgtcagatcctgggcgatgcctccacagcttccgaaaactcagggactacgctgccaaaggctgctgggaagcgcaggtgaggtgcggggctgggatgacgtggggagctggcctttctccctccagccttggggcaggactatctgggctcccacattggggggcaggactatctgggctcccacatgggaggccaggattgagggacaccctaagatcggttcagcactggaactggtcctaaaggacaggtacactgtgagaagagctgggaaatgcgttattcatctctgcctatccactcttgcctctcagccagccaacctcttaattttcaaatgcttgtgagctatagctgctgtcaaaatttgtgccattcttgaaagttgtcccataggtagaactgatcttgacaacaaaacttgaggctacttgagagcagaggggcgtggagagtcccttcctgcttcctcttcctgttagcgccttgcttgtcatgtcacctggtcaccaagtcatccagggctacaggcaggaaatcaagcattggtagactctcccctcacagctataaataagttgttagggccaggtgcggtggctcacgcctgaaatcccagcactctgggaggccaaggtgggcggatgacctgaggtcaggagttcgagaccagcctggccaacatggtgaaaccatcgctactaaaaatacaaaaattagctgggcgtggtggcaggcacctgatactcaggaagttgaggcaggagaatcgcttgaacccgggaggcagaggttgcagtaccactacactccagcctgggcgacagagcaagactctgtctgaaggaaaaaaaaagttgtcaggacgaatcaaagaaagctcctatttgccaaatggatagaagcttgttcttgtcaccccaccaagtgggtggcagagtgatctgcgctcaaatgctagggacaaaattacaaattgataatggcccagcccgaggtgtcatagcacattgtggtgttcacgtccaaaaagccagtctacagatttacaagaaggccagacgtgatggctcacgcctgcaatcccagcgctgtaggaggttgagttgggaggatcgcttgagcccaggagttcaagaccagctctggcaacatagtgagactccatctcgacaaaaaattttaaaattagctggatgggctgggtgcaagtggctcatgcctgtaatgccagcactttgggaggctgaggcgggcggatcacgaggtcaagaggtcgagaccaccctggccaatgtggtgaaaccccgtctttactaaaaatacaaaaaaattagctgggcctggtggcatgtgcctagagtcccagctacgcgggaggctgaggcaggagaattgcttgaacccaggaggaggaagttgcagtgagccgagattgtgccactgcactccagcctggcaacagagcgatactccatctcaaaaaaaaaaaaaattagctggatgtggtggcgtgtgccttgtagtgcagctactcaggaggctgaggcaggaggatcacttgagcctgcgaggtcaaagctgcagagagccgtgatcgcaacattgcacttcagcctgggctacagagggagaccctatctcaacaaaaacattgtttacaagaaatgcaacaacgtagttctcgtggaagttcaaggggcctcagtcaattctcacaaaagaggaaatagggccgggcgcagtggctcacatttataatcccaacactttgggaggctgaggcgggaggatcacttgaagccaggagttctctctgttgcccaggctagagcacagtggtgcgatctcagctcactgcaacctctgacgcctgggttcaagccttctgagtagctgggactataggtgcctgccaccacgcccagctaatttttgtatttttagtagaggtggggtttcaccatgttggccaggctggtctaaaactcctgacctcaagtaatctgccctcctcggcctcccaaagtgttgggattacaggagtgagccactgcacctggccaaaaaaaattaataataaataaataaactcaagtggttagaaattggaatgttcaaccttactactagtcataagagtgcacttttaaatgagatattttgggctcatgatattagcaaattatatatatatatatatatatatatatatatatatatatatatatgtttttgtttttgttttgttttgttttgttttgttttgtttttgatggagtcttgctctgttgcccaggctggagcgcagtggcacaatctcggctcaccacaagctccgcctcctgggttcatgccattctcctgcctcagcctcccaagtagctgggactacaggcattgcaccaccacgcccagctaaattttttgtatttttagtagagacagggtttcaccatgttagccaggatggtctggatctcctgacttcgtgatctgcccgcctcggcctcctaaagtgctgggattacaggcttgagccaccgcacccagcccttaattatatatatataatatccataattagatatatttataatatctattattatattataacataattatatttagtctgccagctatttataatatataatattatataatataatattattatatataatatataatattatataatataatattattatatataatatataatattatataatataatattattatatataatatataatattatataatataatattattatatataatatataatattatataatataatattattatatataatatataatattatataatataatattatatataatatataatattatataatataatattattatatataatatataatattatatataatatcatattattatataataattatatataaatatgtatttatatattgtataacatataattatataataattataataatataatatatatcatatataatattatatattatattctataatatataatatattctataatatatgtaatattatattctattatatataatatatattatattatatatattatattataattatatattatatattatataatatataaatatatattaatatatatgattattatatattattatattatatatttttatatatttatatattatatattatttatgttaattatatattatataattatattatatgttctataatatataatataatattatgttataatatctataatatatattatagatatattatatataatagatatttttatatataatatattacatattatatattatatgttttatattgtatataatatatattatatataatatatatataatatataatatatatatatttctctgtttttgggtggctagctggtaacttctgaaaatagctgtttttaataatcacagtgtttgctgggatgaagctgtgatgaggcaggtgctcctattcctgggtgtaaacattggcagaagcctttcggagagcactggggcgtatggccagagacttaacacagcttccccaggcattagccatgtaagaaactgagacctgagccacggtggaaaggccactgacatttcattatatatcttttctcatgtcatctattacttatacaaaaaggaataataattaaaacctgagccatccttgttcccgaagcttgtgaaggtttaagttaagtagggcagtgtgtccacatgcatttggtgcctgaatgggcctttgcttcagaaatggaaaactgcaacatggctgctgtctcacgctcatgtttgtcttttcttcctcagctgtctttagccaaagcctgtgcaaatgcaaaccagcttggactggaggtgagagcttccagtgagatcgtctgccagctatttcaggcttcccaggctgtcagtaaacaacaagtcttctccgtgcagaagggactcaatgacacaatgaggtgaggcattcaggccggggcttctaatcagagcggcgcggaagccagcctccaggggaagggagccctttccacttaaccccagttacctgtgacagggcggcatagagttcccttatcaccctttttttttttttgaagtggagtctcgctctgtcgcccaggctggagtgcagtggcgcgatctcagctcactgcaagctccgcctcctgggttcgagcaattctcctgcctcagcctcccgagtagctgggactacaggcacccaccaccatgcccggctaattttttgtatttttagtagagatggggtttcaccatgttagccaggatggtctcaatctcctgacctcgtgatccgcccgctttggcctcccaaagtgctgggattacaggcgtgagccaccgcgcccagccttgggtgttttttaaaaccagtaatgccaaagttatcgtggactttttggaagaaaatatcctactctgctttcttcagttacttttttttttttttttgagacggagtcttgctctgtcacccaggctggagtgcagtggcgtgatctcggctcactgcaagctccacctcccgggttcacaccattctcctgcctcagcctcctcaggagctgggactacaggtgcctgccaccacgcccagctaatttttttgtatttttagtagagatggggtttcatcgtattagccaggatggtctcaatctcctgacctcgtgatccgcctgcctccgcctcccaaagtgctgggattacaggcgtgagccaccacgcccagccaccttttttttttttgagacagggtctggctctgtcacccaggccagagtgcagtggcatgatttcagctcactgcagcctccgcctcccaagctcaagagatcctcccaccttaccctcctgagtagctgggactacagatgcacaccaccatgcacagctaattgttgtatttttagtagagacagggtatcactatgttgcccaggctagtcttgaactcctgggctcaagcgaacctcctgccccagcctcccacagtgcagtgatcttttttaagccacagaacacattgaacatcttttttttttttttgaggcaggctgtctgtcacccagggtggagtgcagtggtgtgttctcggcttgctgtaacctctgcctcgggctcaagcctttctcctgcctcagtcccccaagtaggactacaagtgtctccactctattcagaaaggcatttaccatattggggcatcatttaccgtattggggcattcccttgcgactgtccaccttctcccgctccctgcacgccccgagggtcagggttcatccactgtgggcagaccaacggctgtgggctgacttttcactttgcgtcaggtcgaggtctcaaagcgcttgtgtttgggagcaccaggaacacagtcgaaggatgtggggcctgctttggggctgggacccacggagcctcccgggcttcctgtgacatggcctctccagccttggttccagggtaaacccatgattccagagctagccagcttatttggtcgggcccaacaggtggggttgaaatcgcagacagggacacatggagaacgcccccaccagttcccacgtgcttctctttccgcaggtacattctgatcgactggctggtggaagttgccaccatgaaggacttcacaagcctgtgcctgcacctgaccgtggagtgtgtggaccggtacctgcggaggaggctggtgccgcggtacaggctccagctgctgggcatcgcctgcatggtcatctgcacccggtgagaagcccccttggcccagctggcagggacgtgctggcctttcccgggttcagggtcacctgcccttcatgtgctcctcactggtttggttttgttttgtgttgtttttttttttttcccgagaccaagtctcgctctgtcacccaggctggagtgcagtggtgcgatcttggctcaccgcaacctctgcctcccaggttcaagtgattcttctgcctcagcctccagagtagctgggactgcaggcgtgcgccaccatgcccgactaatttttttgtatttttagtagagacggggtttcatcatgttggtcaggctggtctcaaactcttgatttcaaatgatccgcccgcctcaacctcccaaaatgctgggattacaggcacaagccactgcgcctggccctcactggttcttgactcatgagccacgagtgtcccacctggtcagacatggagtgccacgctgagggccttttgcaggcaggggtggcagaacagccttcagcgtgtgggggccgctgtgtggggtgcctgcatccaggcaattcatcctggcatgcagtctcaggacccaaagtgtggcctcgctctggcaggcacaggctggactgccctgtcccctggctcctgagggcagcaggatgactgatcagggagggtggcagttggctgcccttctctgaagttgggttctaaagtctgttgccagagtttcctacactcttggagttagagagtttttcgtcccccactggtgccctgcagagcccactccagccacgtgggtgtctctcagcagcagcgtgcgtccttacacggcagcctgtccttttcaaatcagaccactgctttcctttaactaatgctggatcccctagttccgcctttggaaataacgtggaaatgattctcacaatacgatttgcatttcctaaaccagctgtccccagcatggtctacatttcccgaggaagtgctttccagaccgactcctctgtagagcctggtgggtgaggataggcttggctgcacacagcatatgtgtaagctacagagacttgtttctttcttgcacaggtaacccagaggcagaggttccaggctcaggtcattggcatgttttttgtttcatgaggaagcagaggagccccatctcccatcttaatctctgccaccaactagggtgctgcccttgtccctgtgacacctgtacctgccacattcacctttgcactgagcttagtcttgtgaccacatctcaccagacgggaactgggaggtgtagtctcttcgggcctgtgtgtgccagctcgatgcagtgtcattcccatggaaggagggagcaaaccctgccacaagcatccagagctgtcttcagatgcgctcttgggcctgaatccagcgtcccaggtcttccgaccagagacgactgaggaggtcgggcggccgcctccctggatctgactgcacatccatcactgcaacctacgacaaagctcctgggccacaaccggctggcagtgagagaataactgctaaaaacgtttcagggagctgagtccaatttcttccccaaccacaagacctgattgcagtggtccatataactatcaccacagctccctcaaatcaactctgccttattatcttttttttttttttttttaaatccggggaccaggcacggtggctcacgcctgtaatcccagcactttgggaggctgatgtgggcggatcgtgaggtcaggagttcaagaccagcctggccaacatggtgaaaccctgtctctactaaagatacaaaaaattagctgggcgtggtggtgcatgcctgtaatcccagctactcaggaggctgaggcaggagaattgcttgaacccgagaggcagaggttgcagtgagccaagattacaccattgcactgcagcctgggcaatggcgcaagactctgtctcaaaaaaatacaaacaaaattagccagacgtggtagtgggcgcctgtagtcccatctacttgggaggctgaggcatgagaatcacttgaacctgggaggcggaggttgcagtgagctgagatagcgccactgcactaatccagcctgggtgacagagggaaactctgtctcaaaaaaaaaaagattttaaaggctgagctgccccccacctctgctctcagaggtgccctgcccccaccagccatctcacaccccacgctgggctctcattggccactgacatcttgtctttttggcgtctgcagcccccacgctggcaggtgtagtccctgcgcctcttgtcctcttggtcaagtgaatgacgcatgcaacctgcagagtccccaggacagagcagccaagggacttggcctcagtccaaggggaaggtgccttgcggggggccgctggagcagcgtgttccctgatagttggcgctggttgacaacagagaacagggtgaccatcgcctagagacagtcaggattcctgcggccacacagtgccgggcacagactttccaacaacccttgggccctttgcctccaattcctagatctggtgactcacccaccttctgggtctataacatttctaccccactgatagagctgtcacgtgacaggcaaatctctgtccttggtgtcttttagcaaactgaatgctcagggcacttgggccttttgcagacatttgtgagtctgcctaacagccttgctgctttctgtctgccttgtggctctcatccctctttccagcactttctgacctcccctttgttattattatgatgattattttttgagacagtgtcttgctctgtcacccaggttggaatgcagtggtgtaatcaaagctcactgcagcctcaacttcctgggcttaagcaatcctcccaccttagcgtcccaagtaactgagactataggcacgtgccaccatgctctgctaattttttattttttaactttttgaagagatagggtcttgctttgttgcccagggtggtctcgaactcctggctgagctgtcctcctgcctgggcctccccttttttaaatgccccttgtcagccacaggcagctggctccattatgaagcctctgtttgtcaccaaagcccaacgccatggctccctccctaccttgaggcctcctaaagccttgggtccctccgccccacccctgccccaggaagtgggctccaccctgagaccccttctcggcgttgcaggtttatcagtaaagagatcctgaccatccgggaggccgtatggctcacggacaacacttacaagtacgaggacctggtgagaatgatgggcgagatcgtctccgccttggaagggaagattcgagtaagcagcggttccattttccttattaatcttcgttgtcgctgtgctggagggtgggggtgggcattcagctttcctgctgtgggagggcctcatggactcagagagcagctgtctctgctgtgcccaaagccatggagcaggaggccacggttgcaccacgtcgccatctgcgctggtgcgctacgcgtgcagcatcggcgtgaacatcatccgggccagaccctgcgctgggcctgcatgcggcactgcaccaaggagcccccgagcgctgagagcccacaccccgtcccggctgtctaggtccccactgtggtggattacaaggaggtcctgctgacgctagtccctgtggagctgagaacccagcacctgtgcagcttcctctgcgagctctccctgctgcacaccagcctgtccgcctacgccccagcccgcctggctgccgcagccctgctcctggccagactgacgcacgggcagagtaaggagtggcccttcccagggatgcctgtgtcggggaaggtgctgacataggaggaggctgtggggaggaaaagagtccagcatccatttgtcctggttacttcttggggggtgagatacagcacggctcctaccttcagtgatgtcccagatttctgaccatgagcctgcacgccctatgtatgggtttttttcaaaactattttaaaaggattgcaaccctgagctccaagaaactccacagcagagcccacagagctatagagcgggagtgttcaggcggctgtcaccacagcccctccgtcccctccatcccctccgtcccctccatcccctccacccctggcctgctttcctccccagcacagccctggaccactcagctgtgggacctcaccggattctcctatgaagacctcattccctgcgtcttgagcctccataagaagtggtgagttttggccgggcgcagaggctcatgcctgtaaccccagcactttgggaggccgaggcgggcagatcatttgaggtcaggagtttgagaccagcctggccaacatggtgaaaccccacctctactaaaaatacaaaaattagccaggcgtggtggtgcacgcctataattccagctactcaggaggctgaggcaggagaatcgcttgaacccaggaagcagaggttgcagtgagttgatatcacgtcactggactccagcctgggtgacagagcaagactctgtctctaaaaacaactggccaggcatggtggctcacacctgtaatcccagcactttgggaggccaaagcgggcggatcaccgaggtcaggagttcaagaccaacctggtcaacgtggcaaaaccctgtctctactaaaaaaaaaaaaaaaaaaaaaaaaattagctgggcgtggtggcatgcgcctgcaatcccagctactcaggaggctgagacaggagaatcacttgaacccgggaggcagaggttgcggtgagccgagattgcgccattgcactccagcccaggcaacgagtgaaactccatctcaaaaaaaaaaaaaaaagttccagtagtttcttatctcacacatttttcacattgagagcagctgctcccaacccaagctcattgcacaggcagcagaacatactagaaaaaatgagggcatctccctgacccgtggtaacttgtgcgtgttgtcaagttgtcatctagctcaggcactggcacaccgtggccctcaggcggcatctggctgcttttgcgaatggggttttcttggcagcagccaccctcactggtttccacattgtctgctgctgcttttgctctggcggtggctgagctcatagtgcagcggacaccacgtggcccccagtcaggaaaatactccccttcccttgagagaacagcttctgccctgatgcagctgctgggatagagctatcctctgtctcactgagaagatggagactgcgggtgggtcccttgcgccgtcgtgcccggatgtgaccccctgtctgccccagccccactgggcttccctccacctgccccggcccctccgcccttctctctggtgagcctggcccggccctcgccacatctaagccccttcactcgccctggcagcttcccttcagcccacgttggtttgttccatgcagttcatgaagtccctaccgtggtccaggcgctgggggagagggcaggacagagagttcagaggtcaggtcgtgacgagagaaacagcaggcaggcgcgcggggcaggtggcgcgggcgggggcgactcccttcagggagcgtagccggggtcacctgggcatctgagtccagggcaaagggggcagccatgccagggcccagtgcagaccagtggggctgggggccatgagtggagtcatggcagtgaggggtgagggggacaagcacggggctgaatttgtacccggccagccatctccgtctcccctcctcagctgtgctcacagacttgctcctcccacctctcggcacccccactccctggtctcccacttccccgcttctgccatggcttccttttcctcagccaaatccagcagactcagcggtgtgggcttttttttccttttttgagttgggggcccaggctggagtgcagtggcaccatcctagctcactgcagccctgacctcccgggctcaagggattcttttgtgtcagcctcccgagtagcagaaaccacaggcaccagcacagcaggcctgggtgcttttctccagccagcattacgctgaccctccctccctcgggggcttcggcttcctgccctaggccatgcggcctaggtgttggtctcccttcccacccaccccaaggggccccggaattctggctttctgccactcctcagactccttcctgggagacttcaccacttccagaattcaggccacatctcaaccttgacctgccacccccctgccagcgtgactcagccaacggcctgttgcctgttctggccctggtgggtcgtggtgcatgaagccctgtgtgcccagctgaggcctccaccagccgctgctgcttctccatccctgcatcctcgtcagtgcagtttcctcgtgcgctcacagcttggggactggagctatccgtggcggctgcccggcctcctggaacactgtggcagccgccccgcacatgtcccgtgtacgtcacccagggcctcgctgtccggcttccaggatgagatcagaactccctgggggtctcgatgcccttgagcagccccttctgtggcccatctgctttttctcccaccatgctgtgctccagccacaggggacctggtggcatctcccgggctttggcatgtgctgctgctcatgctgctttctcctgcagtgcccggaccctgtgccttctgggcaaggaacgaggctgacagtagaagggttcgcatgggtctcgtcccacccacctttgcttatggggagcacagatcgtcccaaccctggccaccaaaagctgtttctgggctgcgtttattctcttcctcctgaagaagttaattttttttccaaacaagataaattagaaacgttatttagaaactacacttcctttgattgtgtgatttaacgggcttttattcacacagttgtgcttgtcatcacaacaatcaaattgatgacattttcactttccccaaagggacaacacacccctcagctgtcaccctcccgttccccccaacttcctcagcgctagatgacccccagtagtctactttctgtccatggatgtttcccattctgtacattccatataaatggcgtcatcggacaagtggccttctgtgtctaggtgatttccctcgcggtaacgtttgctgggtttgtccatgtggtgtgtgtccctgctttgttctttttcatggctgaataatattcccctgcatggaccacatgtgtttatccatcccgcagctggtggacattttgcctattgtgaacagtcctgccatgaacattctagtacaggtttctgtgtggacatagtttttcctttttcctgggtctttacctagagaggaattgctaggtcctgtggtgactgagtttaaccattcggggaactgccaggtcagattccagagtgactgcaccattttgcattctcattgctcacttcagtgaactgaagctaaaaatggggtgggggtgcctcacatgtccactccacgtgactctgtttccagcttccatgatgacgcccccaaggactacaggcaagtctctctgaccgccgtgaagcagcggtttgaggacaagcgctatggagaaatcagccaggaagaggtgcctccctcccgccacctgggcgtctcatggggtgctggggtgtgggcgggcctcaccctcggggcctctgcaccccctaactctagcttcccctcaggtgctgagctacagccagttgtgtgctgcattaggagtgacacaagacagccccgaccccccgactttcctcagcacaggggagatccacgccttcctcagctctccctcggggcggagaaccaaacggttagttaccctgcgttctggctgcgccatacaatgctggcatcctcgtgccggcccagttccctcagcgcttcctcacacagagaggcccccaaggcttgtcaggggagcagcagatcccaggacagtgaccctgggacggagccctgcagtcatgcctcgggcccctgcgtaacctccactgtctccagcccaggtctccttcctcagaggctattgcctctcgctctgactgggctccctgtggaggaagatggtttcgagcacgcgggagcctagcctggctctagccctgcccgtgcctgtcatgcgcgtcctggacttctctgctccatgatgctgctgtcactcccggcactcgagctgtgacctgagtcacatccccagcacttccctcgccacccgtgtggacctgtttacccgcctctcctatctcagcaccttggctgttcctcctggagttaacttcctctttctacctcacccgcctggagaactcctactgattccacaaggccccgatgaacagggccctccctgtgctgctggccctgcgccgtgacccctcagcaccatgtgcaccagtaaccttcccaagggcaggcactgggtggctgggtctttcctgtcaatataggaccaggcagggctgcctccagaagcgttgtgtcgggagtgggctcctggcaggagacctcaactcctggggagccctggggaagcagccaaagcccctgctgctgcttcctccccaagaagcgtgacagcactttccattgtgtggaaggcaggagacctgaccctcctgtgtcactccacacacgcaccgactccctggggccagggtcatcacgaggaaagtccatgcagatacgcacggctactccaggagggggcctggccctggccctgtgctcagcctcgctgtgttaaacccgcttctcagaggccccccacagccccatcagtcttctgagacagacccccacgggtgacactgggatagctctctccaccccccgccctccaccaggccctggggtcaggaagtggaaaggctcagctggtgtggcggcttttcccaggctcacgcccacacactggcctctagccccatcctgagcaagacttgaccccagttgggtgtgggtgtcagcaccgcccaaggccaggccattccatgcaatctgcctggcgccgggctaagcactgcctgcaccttattaatcaacaccagaggggccgggtgcggttgctcatgcctgtaatcccagcactttgggaggccgaggtgggcggatcacctgaagttaggagttcgagaccaacctgcccatcatggtgaaaccccgtttctactaaaaatataaaaattagctgggtgtgatggcgggcacctgtagtcccagctactcaggagcctgaggcaggagactcacttgaacccgggaggtggaggttgcagtgagccaagatcacaccactgcactctagcctgggcgacagagcaagaacacctcaaaaaaaaaaaaaaaaaaaaaaaaacactggaaggtggcatcatcctagaggtttccaggggaccagatggttggcccacgccccacagctgagccgggtgggctgggcttcacacccagacctggggcctgagtttgcctgagctgtcctccaggttggccctgcctgaagggcttatacctgttctagcttcaccggcatcttcttcgtagcagaacctttgggagcacgtggtgacaggctggggcacgcgggtgttagaggcaggtgtggagggcctggcctcccagcgccgccgtccatgactgggtctcctgggctctctccaccttgcaggaagcgggagaacagcctccaggaagacagaggcagcttcgttaccacccccactgcggagctgtccagccaggaggagacgctgctgggcagcttcctcgactggagcctggactgctgctctggctatgaaggcgaccaggagagtgagggcgagaaggagggcgacggtgagtgtggggccagggtgcaccagaagggacatcacacagagggtggctctcaccgagggcctctgggcacccggccctgtgcgagcgctgtgggaggaagatgtgcacagagtgcggggtggggccagctcctgccccgccggggagtgtgtccagacatggggagagaggaggggagagcccccaaaagaccacagctgctcccaccacacagggatgagaggacttaggccacacctatccggctcctgctcattccgtgttgggaggacctcactaggatgagggaggcagagaccctgtctggagttcatggagatccttctaggcctgtagtctcatgcctgtaatcccagcaatttgagaggctgaggcaggaggatcacttcaggctagaagttcaagaccagcctgggtgacacagcaagacaaaaaatttaaaaattagctgggcatcgtggcgtgcgcctgtggtcccagctactcaggaggctgaggtgggaggatctcttgagcacaggaggtgggagctgcagtgagccgtgatcatgccactgcactgtagcctgggcgttctttctagaatgttgtttgaggtgtgcccacgtggtatacgtgacactcctcactgccctgctgggatcactgccctgtgcaaaccccaggcagactgcggggtccttgccagaagcccagttagtgtgagtcctgtcagtttcccggttgcttgcttctgcgtccacttggcttgagctagatggccaacttgtcatctccacatttgttggagtcatggcgggcagctgtccaacttggaagaggcatgtcacccacgcttctcaccacaggagggtaacacaggggaccgtagcaaggtagaagattcttgacctggacttcagggtcctgacctggcagggggtctcccctgatgcttgggtgtgacatgacttccctccccaccaaccttcctgcagtgacagctcccagcggcatcctcgatgtcaccgtggtctacctgaacccagaacagcattgctgccaggaatccagtgatgaggaggcttgtccagaggacaagggaccccaggacccacaggcactggcgctggacacccagatccctgcaacccctggacccaaacccctggtccgcaccagccgggagccagggaaggacgtcacgacctcagggtactcctccgtcagcaccgcaagtcccacaagctccgtggacggtggcttgggggccctgccccaacctacctcagtgctgtccctggacagtgactcgcacacacagccctgccaccatcaggccaggaagtcatgtttacagtgtcgtcccccaagtcccccggagagcagtgttccccagcaacaggtgaagcggataaacctatgcatacacagtgaggaggaggacatgaacctgggccttgtgaggctgtaagtgtgtcagcacatttgccgcagtggatgtgtactgagggggctggaggcgaagggtgggagcatagcataggaacgctgcatagaccatggaggcctttgcgcagagagcagagaggatgacttgcggccaccaagtttctgtctccgcgggagtcccgtgcaagccatcagaatgttgaaatgagggtgaagagctcagatccctctctttggaaagtttagcctggaagcagttggccacactgtgtggagggcacctctctgtcccttccgtgtctcactgtctctggaagcttcagcccatgtgtgtcctggtgttcccagccccaccagagccccgtgccgggagctgacagctttcacgcttaaggcacgtgtgacctgggtagtcagacaccacttgagcccctgcccacatctgctggtttggggcttcagtggggagctgacagctgtgagcacaccactgtcccctcatccacctcggcctgcatggggcacccacttccttctgggtggggcttccatggtaagggggcctgcgtccctgcacactgcgaggactgccttggccacaggcccactccctacgacacgtgactcgttttagagctctgtcccagaggcgttcgtatgtgacccacagatggcgtcaatgtgaacacctctctttgtgctgaatttctgggccattcttttcctgtcttatttctaaatttccttcttccaagatgaaaacaaaagaaaaacttaaaacagaaggtattaaaaaaacaagagattcccaccattatttaggttcacctgcaaaacaaaaatcttactccagcccctcaatgccatcctgacacactttatgcaaaaagaattttcccagataggctagccagaaaaaacttcaagtcctctgtaacatctgaggtgaccaagaggcagaagagcagagcagtcgggggccgtgtcctggctgatcccaactgcagctctgctgtgggggcccgtgggagggaggcagacccctgggctttcctgctggccacggagactctgctcctgcatggaaagggagcctgggagccagcagcccacgcctggggagcctgcctggggccatgtgaccatggcctctccctgggaacgggctgaccacaacacaccctgctgccatccacttctgtttactctgcaaatgtaagaaagaaccacttggccagaagtgtcccccagatgcttttttttttttttttttggagacagttttgctcttgtctccccggctggagtgcagtggcatgatctcaactctcaactcactgtaacctccgcctcccggatactcctgcctcagcctcctgggtagctgggattacaagcacccaaccacgcccagctaatttttgtattttcggtagagacgggatttcaccatgttggccaggctagtctcgaactcatgacctcaagtgatccgcccacttcggtctcccaaagtgctgggattacaggcatgagccacggcgcctggcccccaaatgctcttgaaccggaaacccagggatgggagatgctcactgagctgctgcttttatgtgtgctggtgctatgtgtgttcatgtccgcggcagctgtctttttgctactataagggaattctggccaccctgggtggggtgtggtcggggtgagaacccaagcgttggaactgtagacccgtcctgtcgactgtgtgcccctgggcatgtgtgagcctcagtttcctcatctgtaaggggggcaatgatacctacctcacaggggtgttgtgaggattaaatgtgaggaggatagtggcagatg

SEQ ID NO: 185 - DNA, 6325 bp, Homo sapiens
  source 1..6325: mol_type = other DNA
cggaggcggggcggaagggtgcggcgaggcggaatggcggcggctgcggactcgttctcaggcggccccgcgggggtgcggcttccgaggtcgccgccactcaaggtgctggcggagcagctgcggcgcgacgcggagggcggcccgggcgcgtggcggctgtcacgggcggcggcgggccgcgggccgctggacctggcggccgtgtggatgcagggcagggtagtgatggcggaccgcggcgaggctcggctgagggacccgagcggggacttctcggtccgcggcctggagcgggtgccgcgcgggcggccctgtctagtcccaggtaatgcccgggccttaccgggcgccctcttccctgctgcccgccgagaagttgccgaggccagattcgatcttgttgttgacactcgaacgggggcggggcgggtctggccctcctccgggcctctgcccctgcgggtccccgcttgggtacccttgctccggtccctccttggtgaagttgatctgatgataagcatcacctgccgtcccttttacaaatacagattcctgggactctcccacccctagtgggaatcttctggggagggactccggcaccttcgtttgtcacaagccccctctcccagttgatatccttgttttgggaaatactgtcctgggaaacttctgctcatccttaacgtctcagctcaaatgtgcctttctcagggaagtcctccctagcccctaggaacgggagaccctcctgtacttctccttaattgaactgtcttgggctgtagctcactcatgtttgcctcctctcttttttttttttttttttttttgagacggagtctcactctgtcgcccaggatggggtgcagtggcgcgacctcagcttactgcagcctccacctcccgaattcaagcgattctcatgcttcagcctcccgagtagctgggattacaggcatgtgccaccacacccggctaatttttgtattttttagcagagactgggttttgccatgttggccaggctggtctcgaactcctggcctcaagtgatctgctcatctcggcctcccaaagtgctgggattacagacatgagccgctgcgccctgcctgcttcctctcttaaaccactgatgctcaaacttgagccagcatcagtctctcctggagggcttggtaaagctgggatggctggggctccaccctcagggtttgtgagtcaggaggtccaggtggggctggaaatttgcatttctaaccagctcccaggtgatgctgatgctgctggtctggggaccatactttcgactttttaaatgttttatttatttgagataggggactcaccgtgttgcccaggctggccctgagctcaagcaatcctcctgcgtcagcctccttgggtagctgggactacaggcctgtaccaccacgcctggtttgggggccatactttgagaaccactgggccagcccaagctactggagggccagagctgtgtggtcctgacaactgtatcctcagcatctggcccagttcctgacacataagtgctccaagaaccaatagtcttgagtgataggcaatgggcatccatctcacttgttccctgggatgtcagttgagcacgtgttgtacatcagcccctcatgtgcagtgttgggctgcagccgagacctagatagagtctgctgggagacaggcagtgagcaagtgtcgcagaggatcgctgatctttggggagccatgaggatgtgcaaggtgctgagtggcccggggaggcttctagaggatgtgaggtctaagctgaggagctctgaggctccatgggccttccctcacctcagctccctctcctgggaaatcaggccaagatcacttcattcctaagggcccttcctgctcagtcttggagtctaactagaggcagatagggctgtggtctggcctgagctgctgtggactcggaaaggcttaggtcgaatttctggttccaccccttcccaactgagctgcctggagcactcttgttaacttttctggacttgtactattttgtaaaaaggagctaatcattcctgcgtgttgtgtggattcaataagtaaacaactgccttagtactgcacctggctcacagtgaggatgcaaaatatcaggactcgtttactgccacatgctcctgttccgtcttcccactgccttacccatcagccttccctctgtctgcctgccctcagccgcagcgttggtctaggacagggtcagcaaactacaggcctcctcttttcatgtgtcctgcgaactaaaaatgcttttaaaatttttatgtattactattattatttttgagacagaatctcgctctgtctctcaggctggagtacagtgacgcagtcatggcttgctgcaacctccacctcctgggttcaagcgattctcatgcctcagcctcccgagtagctgggattacaggtgtgcaccaccacacccggctaatttttgtagttctagtagagatggggtttcaacatgttggctagactggttggtctggagctcctggccaccttggcctcccaaagtgctgggactgcaggtgtgagtcattgcacctggcaggatttcacatttttaaatggttgaaaagaaaatcgtgatatgtgaaaagtatatgaaattcaagcatcagtgttcataagttaagttttattggaatacattggtaatttacagaatgtctcgggccgctgtcccaccccagctagaattttatctgggacagagaccctatggcgggaaaagcccaaaatatttgtctcgccctttacagaaaaagtttgccaacccttggccttagccttggcccagcaagtaacccatgctgcttggtgtgttggtttgcaggcaaagcaccttgcaggcaggctggggcagtctcctatctggtctcagccctggcataagcctggcatctagtaaataagtgtttgaacccatgggcattggtgaacctgtctgacatacccactggcctgaatgccagctggcaggggccatgtcatttcttcttgttaattaatactgagtccagcttgacaaaattgagtcactgccatcagggaggcagggaggtaagcgggccactaaaacacaaagtaacattgcaggcaagagtgaggtggcgcagaggagggacagctgatctaggtttgagggctcagggaaggcttcctggaagaggcagccctgaaggatgcattggagttatctgtaaggaccaaccctcctgggttgcctgggactgagagggtcctgggacgtgggactttcagtgttaaaactgggacacttgggcaccctctgtctgtgtgcagtggcaggagattgtgcagctccatggagcagcctgtgcaaaggcttgaaggggatagagccgcgtgcctttggggagcctggggcagtggtggaaggtaggagggctctatcctgatgagcctcattggctgtctggaaggacctgcctgcttcaagatggccttgaactctgctcactgcactgctgctgtagtgctgttcctccaccgcctcttcctctggaacatccaggagtttgtttccataaacctaaggtgctgaagaggcagagttgaaggagaagctcttcctgccctcaagctgctctctgtctgcaggagaatcagagaaaccatgcttacctagatcgcgcttggatcaactgagttctggaggcaggaggtggatttgacaatgttgactgcagcagtggggtggggatggtttcgaagaggaggaagctggcaggagatgggctggagccattggaatggtcatggcaaccgcggggtggggatgcaggaaggagagggagagacagcggagagctgctttggagtgggagagggtgtgggtagaacctacaaggtcaatttgtcccatcgcgtgccttcgagttcatccggctggctgtgtgtgccttctcagtagagctcctgttcccctctcccggttggaatgcccttgggcttgtttttctcttcgtgggccttcagtcattctacttctgtgtgttccaaccctaccagcactttaggccccttcagaggggatggcaagtgcattttcagaactagcctctgtcacggagggacccaggtggaatgtggggttggagttctgagatacttgagcacatcctgcctggggttgaacagcaggatcaggggtcagcttgcctggggcttcagtcaaagccccaggccccacgtgcagtgcaatgaaagcctcacggggcaggcagcagggctggcaccgggcctgtccttcctgcagcatttggagttttcttttacacaatcgggttttatgtggttgagactggccaagttttgctttcaaggagagtcacttccccaagggaatgggaagagagtcacagttaatacgtcattagatcatgccggtggcagccggcccttgtgtggatttgcttgtatgtgctggaggaggtggcagggataggtcccagcagttggaacaatggggcggggggctgcctgcccagccttttcggcaatgtggagggaaaattggattgcttagtaactgtcagagggtgtctgcagaaagaggatgtgtcctgtgcacagaaaccagtcacatactctgtagcattgagcaaggaacaggattagaggaaagctgaggttttctgcccctacctcagagccgcctaattataactcgctctgatgggagcgtctcctccattccttgggcgtggttacattttacatgacagttttgtttggcctagtaaaatcagaaaccaaagaagatggctgggtacagtggctcatgcctataatcccagcactttgggataccaaggtgggtggatcacctgaggtcaggagttcaagaccagcctggccaacatgtgaaaccctatctctactaaacatacaaaaattagccaggcatagtggcaggcacctgtaatcccagctactcagaaggctgaggcacaagaatcacttaaactcaggaggtggaggctgcaatgagccgagattgtgccactgcactccagcctgggcgacatagcaagactctgtctcaaaagaagaaaaaaaaaaagaacattactatgggcttttcttctttttctaggaaagtatgtgatggtgatgggagtggttcaggcctgcagccctgagccctgcctgcaggctgtgaagatgacagacctttctgataatcccatccatgaaagtatgtgggaactggaggtagaagatttacacaggaatattccttagagtatgttggaactgtcgttaaaaacaaccaaaatcccgaaactatttagaagcttataatgatgtggatttcatggacacttttcaatgcgtatttttcaaatgcttctcagagagccttgctttggttgaccaaggagtccggatgtaggaatgtttaaatcctcggatacttcagtgacacagcctctgctgccccttgctttgcctgtgtttgctgatgaaaagcagatgcttgtgtttcattttccttcctggtttgtgtgtgttaattctctctctctctctcagacacagaagtctcatgttgcattttccaaattttatgagtgatgatactttttccattactgctgcgtccctgttttacaatgcaaaatttaagtacggtcgttgcccatggtgattaaagtgtggttatgggcaggaagacagactgtgtaaaaaaggaatgacatcctggctcctcatcttcttcatcagcaactaccataaccagtttgcgagtcaaatggcatttcctaacggcaggcatggcggcccctgaaagacaacagctccctttctgcttcggacaccactcaaacatttagacgcagctctatcccttttcctagctagagaaggtgatgccttcttccattactcagagatgttgagacgttttcagaatttcttgttgaaatgaaaaacatcaagataaaggacgcctttcaggcattagctaaacttccacttcataactttcggcgagacatggtgagcctcctggtgtagagttcttttgtctttgtatggaatgactttttgctgtgatggttttgaatgttgggtttctgctgtctgcttagtacccatgcctgaattttttgagattgtaaatatcaaaggagttagattgtgttctgacatggttgtagactttcacctggattattgatattctacctctaataaatttttaataggctgt

SEQ ID NO: 186 - DNA, 11545 bp, Homo sapiens
  source 1..11545: mol_type = other DNA
gtggcgcgcaggcttttgtaacgttcccagcgccgcgtttgaattcggggaggagcggagcggtgcggaggctctgctcggatcgaggtctgcagcgcagcttcgggagcatgagtgctgcagtgactgcagggaagctggcacgggcaccggccgaccctgggaaagccggggtccccggagttgcagctcccggagctccggcggcggctccaccggcgaaagagatcccggaggtcctagtggacccacgcagccggcggcgctatgtgcggggccgctttttgggcaagggcggctttgccaagtgcttcgagatctcggacgcggacaccaaggaggtgttcgcgggcaagattgtgcctaagtctctgctgctcaagccgcaccagagggagaagatgtccatggaaatatccattcaccgcagcctcgcccaccagcacgtcgtaggattccacggctttttcgaggacaacgacttcgtgttcgtggtgttggagctctgccgccggagggtgagtgtcgctgctggggaactggaactgcctgcggggcagttggagcgcccagacctggagctgctggaaagagtacccagcaagggagagcctgggacttggagctgctagagaagggtgctgggagcctcccgcttacgtatggaaagtgtctttggtaagggcttcttggctctgggagctgctagaggagggggttccagtgaagtggagtctgagtcatgttgctgatagggaagtcagcttctggacgcgaggtgctggggggaggggtgctggtaatggacgctagggccctggagtacccagggaggagtcccaggttagtgatgccgcgccctgggagcttctggggtggagctgggtcagtgggggggtagttggagccagacttcgggccttccgggggagatacgagtcaggaaagggatctggtgctggggactcggagcttccggagtggggctgagagaggacccccaggtaaggggggaagctagtaggagaaggggtgctgcgaatggttgtggacagtgttaaggcagggtccagatgccgctgtgctggagaaggaatggggtgggggcatagggaaggagagaaacccaccaagacccctctttcatcccttgggagtccagagtccagtcctgtgcttcctttgcctggtaaccctctcccttccccaccggcctcaatccacctccccatccctcctgccctctccttcccacccacagtctctcctggagctgcacaagaggaggaaagccctgactgagcctgaggcccgatactacctacggcaaattgtgcttggctgccagtacctgcaccgaaaccgagttattcatcgagacctcaagctgggcaaccttttcctgaatgaagatctggaggtgaaaataggtgagttgctgagcctgcaggggtgcttgacatcactacaagaggctggaatttggaggaggctgggagaaaggaaggagacaacccacaagtcagtatcttgcctacagatgcattatttttttgtgccccaatgcaatattttttttttacaaagaatttgaatttgtttttattttttaaattggaaggtttgattgaacaaaaagtttgattcagaactccttttaaacaggtgaaagcttcagtaatacgaggacagcattttcttagggcagccctttgctgggctggaaaacagctgtccccttcagacttctttgccacagtctctactcctccctattcttcacagacttgccaagtcttggaggttaacttgcttgatccttgaaggcattggagttttactatccctgtcagttcctgtttcaaagcatagcccctttctaaaaggaggggtgagaagtgtcactggaggcacctccctggtgtcagcatgggaggaagattcctgggcaagccttgctacatacaaggagcagaggcttgtgggatcagatggccctggttctggatggtcaaaccttaactagccttctgcattgacagatgtcagaggctggcatctaagtaccaactcttcctccctctgtcccaggggattttggactggcaaccaaagtcgaatatgacggggagaggaagaagaccctgtgtgggactcctaattacatagctcccgaggtgctgagcaagaaagggcacagtttcgaggtggatgtgtggtccattgggtgtatcatgtaagttgggagttgtctctggaccaacctggtctcagcaggggcaactttgggacatcctacctggctgaccttttctgtggacctttcggcctgctttacagaaagcctactccaagggacaagtcatccccaaacaaagcctaattgtcatatctttccctgtcactggtgtatcctgtcggatttctgcagcctaggtcatgggtacagcggaggaggaggagggagagtctccacaaccttactgtagtcctttgctagagttgtccacagggcagcatcaccatcatctgggaacttgtatacacaatctcaggacccagactacttactggatcagaatctggatttttaacaaggtcccttggtgattcccttgcacaataaggtcttaaacaccgatgagcattagcatggtgggggaaattaggccaggagttacagatggaaagatgatgtgccagtggtctgtctggattaagaccatcagcagcggttggtggcaggcagaggcttgggccttttcaggtgttatctttcttgttttgggcctaggtactggagagttagaaatgagttgtagcaatggctttcatacgtctttgcagtggggttttttcaaatgaaaacttgaagacttaagtacagaactgctaaaggtggagctgcttctgtaagcgcaggtagccctttgacctgttttgcatgacaggcagcatctgaggcccttgcacagagtcctagatgaccacaggctatagctaaaaaatcactggcccttaagaatcctggtctcaccatgtgtattctgctgagggcttattctagccaatgtcatggcttctggggctgctcagtggacttagggattgtcttcaggggccccagagttagagtgagtgtccagaggatgcctgacctttgttctgaccctgagatgatttctctcatgtctgggttgtggctgggagactggtgccaaatcctaccttgtgcttacaggtataccttgttagtgggcaaaccaccttttgagacttcttgcctaaaagagacctacctccggatcaagaagaatgaatacagtattcccaaggtgactaatgatgctttaagtttacatttattttgttttccccagaagctgtttatggagcccagcaatatcctaggaccagaaataggtctatcccacctctaaggtagccacagagcttgagagggcctgtgtctgaaattgcatacagaacttgacatgtatgtgcacataagcattttttctagggggagagagttggcagattctcaagagattgggtaacccaaaagttgtgtaaaaagcaaaaaacaaaggaggtaggaaggagtaggaggcaaaagtgcttaatctttagaaatggtttatcttaattcaaatggattctgccacttagcgagatcacattgggcaaatggcctgcatcttttttttttttttttttatttgaggtggagttttgctcttgttgcccagtgcagtggcatgatcttgactcactgcaacctccacctcccaggttcaagcgattctcctgcctcagcctcccaagtagctgggattacaggcacccaccacctcgcctggctttttttttttttttttgtatttttagtagagacggggtttcaccatgttggccaggctggtctcgaactcctgacctcaggtgatccacccgccttggcctcccaaagtgctgggattacaggcgtgagccaccatacccagcctggcctgcatcttctgaaccatagtttccatatataaagtggagttcctgccttggagcacctcacagagtgccttgcatgtggtgagtgctctcagaattatgaatcactgtgaatcccagggcttcctaatggcatagttgtgtgcattttctttttttttttttttttttttttgagatggagtctcgctctgtcgcccaggctggaatgcagtggtacaatctcggctcactgcaagctctgcctcccaggttcatggcattctcccgcctcagcctcctgagtagctggaactacaggcaccagccaccatgcccggcttcttttttctgtatttgtggtagagacagggtttgaccgtgttagccaggatggtctcgatctcctgaccttgtgatccacctgcttcggactccctaagtgctgagattacaggcgtgagccaccgcgcccggccatggtgtgcattttcacaaccaccaacagaaatacatttaaaggaatagctggttcctgcagaagcctagcacacagccagtttgaagtgtagtgtccttgtgtgaagccaggaggcctgtcaccataaggacagacatagtaaatccatcacaaagtgtcagttcactgtcagagacagcatggaatcaagccagctagacaaggccttcaccctctctgtgcctcactttcctcctctgtgaaaaagggatgataatagatccccaccccttagatgagttggtgagggctaagtgagctaaacacaggagtgcttagaatgctttcctggcacatagtgagtgctaggaaagtgagttggtgttcggccacagtccattgacccttctgtcaatggtgctcagtaaagctgacagtggagaacttggcattgaaccaagttgtgaaccactgacctgtggtgtatttgagactgggggctgcatgtgggctggggacctgcagctcctttgaggccgtactgtactccaggtccccttcacattctgcttatggctgtccctctctctgccccagcacatcaaccccgtggccgcctccctcatccagaagatgcttcagacagatcccactgcccgcccaaccattaacgagctgcttaatgacgagttctttacttctggctatatccctgcccgtctccccatcacctgcctgaccattccaccaaggttttcgattgctcccagcagcctggaccccagcaaccggaagcccctcacagtcctcaataaaggtacaacaagggtctgggtaagagagcagaccccccagagaaagcccaggttgtaggggtgtgtgcagcttagtccctggccctgagagctcaggtgtggagtaggacaggcctctgtccttcaatccgtggttccaatgcccatctgcttctcggccctgccaggaaagactgaccttaccatggctggataaacgtaccatgcccaagaagaagaaaatggattgaatgccaagcctgaaaaattctttcaaatcactttaattaatttaattttttggagacagggtctctcctctattttccaggttggagtgcagaggcacaatcacagctcactgcagctttcaactctagggctcaattgatcctcccatctcagcctcccaagtagctgggactgtcaggcatgcaccaccatgcctggctgacttttctaatttttgtagagacagtgttttgccatgttgcccaggctggtcttggaactcctgggctcaagcgatcctttcacctccaccaaagtgttgggatgacaggcatgagctgctacatctggcctttaaaaaaatttctaacactttttcatgattcattgaaaaacataaaaatttccttttttttgtggcgtgatcccggctcactgcaagctctgcctcccgggttcacgccgttctcctgcctcagcctcctgagtagctgggactacaggcgcccaccaccatgcccggctgtttttttgtatcttttagtagagacggggtttcactgtgttagccaggatggtctcaatctcctgacctcgtgatccgcctgcctcggcctcccaaagggctgagattacaggcgtgaaccaccaggcccggccttttttttttttttttttttttttttttttttttttttttttgagacagggtctggctctgtctcctaggctggaggggagtggtatgatctcgatttcactaaggatacatagttttaaaaagtcacttgaaatactttttttctctgtggatatatcaccaatttgatgtacaacttcagttcatttttcagttttcaatttttaggtattggtttttcttaaacttcattttggaataattttaggcttatacagaaaagttgcaacaacaacaaaaaactccccagagttcctacataccttgcagcaattattacagtggaattttttttgagacaggtctcaggacttgctgtcacccaggctggaatgcagtggctcactcatagcttactgcagccccaacatcctgggctcaaacagtccccctgccttaccctccagagtagctaggactacaggcatgtgccaccatacccagctaattaaaaaatttttttctttgggaggccgaggtgggtggattgcccgagctcaggagttcgagatcagcctgggcaacatggcgaaacgctgtctctactaaaaatacaaaagactagccgggcgtggtggtgtgcacctgtaatctcagctactcgggacactgaggcacaagaatcacttgaacctggaaggcggaggttgcagtgagccgaggtctcaccactgcactccagcctgggcaacagagcgagactctgtctcaaaaaaaaaaaaaaattttttttttgtaaagacaagatctcactatgtcgaccaggcttatctcaaactcctgccctcaagtgatcctcctcggcctcccaaagtgttaggatttacaggtgtgagccactgtgccctgcctagaatgatgttctaatggtaatttttcttttcctcactttttttgcatttaataattggaattcttctgtaaggaagagctgttccttctctccgattgatttatttatttggttatgtctgaaatagactcatggatatttttattctttgggctatattttaaaggattacttatttctctgcttttatttatttttttaaatttgagacagggtcttgctctgtctcccgggctggagtgcagtggcacagtcgtacctcacagtagctttgatctcctgggctcaagtgatcctccagcctcagcctcccaagtagttgagactttaggcatgtgccaccgcgtctgaccaatttttaaatttttggtagagatgaggtcttgcccacactggtctcaaactcctgagctcaagtgatcctcctgcctcagactcctactttttttctttcagttttaattttttatatagcattttaaaaacttaaggaaattttcagttacccgaaggtggagagaactgtatgatgagtcccatgtttcatctatttttactagttatcaacatttggacagactgttttatttattccagcctcctgccttttttgttaccggtgttttaaaaaattattatttactatttattattatttatttgagacattcttgctttgttgcccaggctggagtgctgtggcaagatcatggctcactgcagcctccacctcctgcgttcaagtgactctcccacctcagcctcccaagtagctaggactacaggtgtgccaccatgtccagctagtttctgtatttttagtaaagacagggttttgccatgttgctcaggctggtctcaaactcctgagctcaaacaatctacctgcctcggtctctcatagtgttgggattacaagtgtgagccactgggcctggccttgctggagtgtttaaagcaaatccctaatatcttattatttcatacccaagtccctatcatgacatcgttttttaattgaaaacttaaacattttatattatacaaggagaattagcacatggtggtgggggaataaataaataaggaaaaagacaataagaataatctgtgtttctactgcccagatataatcagcgttaaaatttcatgttatcttttcaagcttttttggttataaataagcatataaagcaaattttggggtggaaaaaaatttcttgtgtttttatttaaatgcctactgaatccattctgtggatgaactgaactactcagcccttccatctgcctggatgctgaagatgctttccattctttgctcaaagctgggcagctctgagctgctggtgccttcaagctgtttgcctgagtggcaggtcatcctgcagggccacaccgttgggtcagaggccacggcttctgaagatctgttgcctcacagtgagcactatgtgcctgtcacctgagcatggcagctgctgctctagtaaccaggcactgattcagtttccccaaagcagtggtagctaagagaatttttctttcggaagagtttcagctgtggcaggggagtcccgtgcccttcccaacgcccctgtttttgtcaccttcctaggcttggagaaccccctgcctgagcgtccccgggaaaaagaagaaccagtggttcgagagacaggtgaggtggtcgactgccacctcagtgacatgctgcagcagctgcacagtgtcaatgcctccaagccctcggagcgtgggctggtcaggcaaggtgggtactgcggggccctgggcggggcaggattgcttggggcatctggaaaaggcaggaggaggcttggccaacaaagcactggtgacttgttcaggccctgtctgcataggaccattggtttccccatttcctgatatccaaggccctgcttccgtggctcctgccgccttttctgatccgtcttttttactctagcacctcgatgtgccaccttcatacgctgtttcttttgctcagtaagttcctattgtatcttcaagacccttgaaataacagacccagatgtactgcagcctcagggctttctccctggtcctggcacgaaagcacttcttccagacaccacatggctcacactgtggcctccttcaagtgtctgctccagtgtcagctctgtgagcatctccctggcccctctgctggtgcttctcatcctcttgcccactgcatagttctccataacacttctcacccaacatagtccaacatgtccttctttgtttattggatttaaattaaggggtttgttgcatgcactgaacgtaacattttgatgtgtttgcaactggcttctgtcttcacagtttcttaattactccaaactggaaaactagatgcctctgactcttaccatgatagaagtcactgatattttgcccatacttaaattgattagtctttgcccctacaaccacagtgtaagctccgtggaggctggggttttgtctgttgctcactgaacctgcaacagtgcctggcacggtaggccttcagtaaatgggtcagtggaatgaaggagtgagtggaacttggtgcgctgtgctgagactttctctgcagagatatctgtgctgctgcttgtctgagcctgctggcagcagaggccctgctttgctcttctctggggccctaggcctctcaactgagcccaggtggggtgcccagcaggcttccctgttccctggtgtgggccacatgtgtggagcagaggggaagaggctggtcctgaccaactaactgtctgtctgtttctgtctcagaggaggctgaggatcctgcctgcatccccatcttctgggtcagcaagtgggtggactattcggacaagtacggccttggtaggtttcttccagaacaggtgggtgactcaggcacagccaggtgaccttttcagttgttacagactctggcctttttgagctcccaggtactgttctcagtgccctcctctctccatcccaggcctcccagttccagctcccagtgctccctgactccccagctttttttttttccagagacagggtcctgctctgtagcccaggctggagtgcagtggcacaatcatggctcactgcagcctcaaactcccaggcccctaagtagctgtgactacaggcgtgcaccattatgctcagctaatttttaaaatattttgtagagatggggtctcattacgttgcccaggctggtctcaaactcctgggctcaaacaatcctcctccctcagcctcccaaagtgctggaatcacaggcatgtgccaccacgcccggtcccactccccactttctattccccctttctgagacctctctccaccgatccctagggtatcagctctgtgataacagcgtgggggtgctcttcaatgactcaacacgcctcatcctctacaatgatggtgacagcctgcagtacatagagcgtgacggcactgagtcctacctcaccgtgagttcccatcccaactccttgatgaagaaggtgagtgccgtccggcccatggggggtggtgttgcagaagtgggacctgtgctggaggatcagactctaattctggaaccccttacctacttttcatccagatcaccctccttaaatatttccgcaattacatgagcgagcacttgctgaaggcaggtgccaacatcacgccgcgcgaaggtgatgagctcgcccggctgccctacctacggacctggttccgcacccgcagcgccatcatcctgcacctcagcaacggcagcgtgcagatcaacttcttccaggtgagctggaggtcaccaggcgcaggagagagctggggtaggctccgcatgcctggcagtggcccatgtgggttgaatgtggagtgagcggctcaggtacctataacctgttgtgtcttccctctactccctaacatacactggcctctgggatcgccaacccctgctgctcttctcttgcaggatcacaccaagctcatcttgtgcccactgatggcagccgtgacctacatcgacgagaagcgggacttccgcacataccgcctgagtctcctggaggagtacggctgctgcaaggagctggccagccggctccgctacgcccgcactatggtggacaagctgctgagctcacgctcggccagcaaccgtctcaaggcctcctaatagctgccctcccctccggactggtgccctcctcactcccacctgcatctggggcccatactggttggctcccgcggtgccatgtctgcagtgtgccccccagccccggtggctgggcagagctgcatcatccttgcaggtgggggttgctgtataagttatttttgtacatgttcgggtgtgggttctacagccttgtccccctccccctcaaccccaccatatgaattgtacagaatatttctattgaattcggaactgtcctttccttggctttatgcacattaaacagatgtgaatattc

SEQ ID NO: 187 - DNA, 32744 bp, Homo sapiens
  source 1..32744: mol_type = other DNA
atcacgtcgttgcctgggctgccgtccgcggaaatttgaaatggctgacgggtcgctgacgggcggcggtctggaggcagcggccatggcgccggagcgcatgggctgggcggtggagcaggagctggcgtctctggagaaaggtgagctctccatgccggggccgaggagccgcctctgagcggaggcctggggcgtcgggaccctaggagggcgcctgggtcgcgggccttccggacccgtctgtccagggtggcgggaacggcggtgcgcggccgggacccagtgacgggacctcaaagtcgggcggtacccaggggtgggggactccctctcttccctatccgcatctcccactctccctgcactctctggcctccgcccgccccgaggttggagggagctggattgggccaggaattccctatctggatgggttttgcgggaactgtgcatttactgttgctcaaggggccattttttcatctgcatctcaaaggagatcacgaaccacacttcccttttccgaagaagagaaaagcttgaacccttggcttagatggctgtcctgtgcacggagggtagtgacgtgtccaaagtgaggagcgccaacttgggccggagtccagaaatagaaccggggtcttctagttctctgccctttcttcctcctcatagagtttcattactattttttttttctgatattttaagctggttcatgtttttacgttaacactttcggttgtattgtgtagcagagagtcccaacaaagtgagaaaacataagtgtgacaattccactattaacccacctatccaactggcaaaagtcacttggcttcagttttcccatctggaagactatgccaatggttgtacttgtggtgaagttgaagtgaaataaagtttttaaagtggctgcaaaaataaatactgcatggcatcgcttatattgggaatctaaaaaagaggaagtttcagaaagagagtagagtggtagttgccagtgggttgggggaatggggagatgctgggcaaagggtccaaagtttcagttatgcagtgtgaatagttctggggatctgatgtacatacagcatggtgactatagttaataatactgtattattattacagtattaataggcaatgacgtgatggtgcaatgcgacacaaattttgtacttgaaatttgctaacagagtagatcataagtgttcacaccacacacacacaaaaggtaactatgcgaggtgatggaaatattaattcactttactgtggtaatcatttcataatgtataggtatatcaaaacatcatgttacacactttattttttattttattttattttttttgaggcagagtctcactctgttgcccaggctggagtgcagtggcacacaatgtcagctcactgcaacctctgcctcccgggttcaaatgattctcctgcctcagcctcccaagtagctgggattataggcgcccgccaccacacccagctaatttttgtatttttagtagagacggggtttcaccctgttggccaggctggtgtcgagctcctaacctcaggtgatccgcccatctcggcctcccaaagtgctgagattacaggtgtgagccaccgtgcctggccatcaggttatacactttaaatgtatataacttctatatgttaattatacctccataaagctataaagaatggtgctggaaaaaaaaagaatggtgctgaagtactactatttctttaacaaacatatacattatgtaataggcactgttgtaaattattaacaattaatcttcttaattgaagtggatgtactattatcttccctttataggtgaggaagctgaggcattgtcacataaccagtaaggtactgatgccttctaaggttcatgtgcatcagtgtttgtgagcagtagacccttgagtacactttggtcatctgtgggtcaagtacttctggtggcctgaacagggacaaagaaatggaaggaagggggaaagggaaggagaaaatcaagggggagggagaaaaaaggtatctgctaacagctcagataccttccctgaaaccacttctggagactactctacattctaaatgctaccctttttagcattgcttatttagtagttgtttcatttattaaaaacattacatagaattagatatgccactggctgaatcataccttatgaaacattatatacagcccaaacctaatgtgatttgcattttctgatcttttccttagacacagtcattgaaattagtgaggaggaatctaataaccttactgaagtaaaccttatggattattaagactctcgtccctgtttattgaggggcgattgacagactgatattgtaggaaataaagggagggcttaacccatctgagaggaagtcagctccctttcttaaaggagctttatggaattgctttggaaaataaataactaagatacttgattattatcactggctaactgtagtataaatcacaggctgtatgctttgtaggagatcttgagtgatttccactgaattaaaaatcaactgtcttccagctggatgtggtggtgcatgtctgtagtcctagttactcaggaggctgagacaggagggtagcttgagtccaggagtttgaggttgcggtgagctatgatcgcaccactgcactccagcctaggtgacagagtgagaccgtttctaaaacaaaaacaaaaacagccttctacttctccccaaaacctcacagaacaacaacaaaaatctaactgtgaaagatcttaagcgcttattgttttgaagtagaatttggattttgaaatatttttaagtttggaaaactagtttcttctcacaatggtagaggtaagtagactattcatattcaaattcttgtttgtattttgtttgggatttctatgcaaggatatgaaaatagaagcattcaaataaggcactggagcttgcttatttttgctttttttttttaggtttgttccaagatgaagattcatgcagtgattgtagctaccgtgataaaccaggttctagtttacaaagttttatgccagaaggaaaaacctttttcccagaaattttccaaacaaatcaacttttgttctatgagcgattcagagcctatcaagattacattttaggtgagtaggttttttgctttttttttttgagatggagtttcgctcttgttgtccaggctggagtgcgatggtgcgatctcggctcaccgcaacctccgcctcccaggttcaggtgattctcctgcctcagcctccctagtagctgggattacaggcatgcgccataccaccagataattttgtgtttttactagagacggggtttctccattttcgtcaggctggtcttgaactcccgacctcaggtgatccccctgcctcggcctcccaaagtgctgggattataggcatgagccactgcctggctggttttttgcatcttttatctttttagtttgcaagtagattatctatttcagtccctcagattgccagttgtttctgagaaagtggatttattaacttccctctgctttatgcattctcaattcttcctgtgtttaatttgtttgtagctgactgcaaggcctctgaggtacaggaattcacagctgagttcttggagaaggtccttgagccatctggatggcgggcagtctggcacactaatgtgttcaaggtgctggttgaggtaaggttaattttgttattagacctttgtctctagctttaagcactttacttcagactgttatatccaaagtgcttatttttaattaaagtttatgagctgattcaaatagcatgtttttcacatctaattgccatgttgtaggaagtgttctgcaaattttaaaggcaactgaggagttgttaccagggaattaaactggttcaaattaattaaaagaaggtatttgagatcacttaaaaaattaggcctaattatgaagttaatggtttcaaaaaagtgtttaacttcttaattgtaattcgttaagcagctcaaacctaagaggcatttttatttatttattttttttaagatgaagtctcactgtgttgctcaggctggagtgcagtgggacgatctcggctcactgcaacctctgctaagaggcatttttaaactagcccagtttttgcctagcaaatttgtttatatgtggttaatctcttgacagtgtgtcccattgcagaatgtaaaaacagtcttattcttcttctcactaggccttttagattacatttgcattctaattacagctttgaatttttctcagtgtttgttaactgaccacaaaaagccctagtaaactaaaatgtcaaaccagggagtgtgaatacaagttgttgctgcagctcccttagaaaatggcatcacatactacagtgattatgtacaaggcagtggattgcagctattgcttgtgagttttaaaattttggattgtgctaatattttttggttgaagttcaggcctattcatttggttatgataagtgcccccccgccaatcagttctccgaaaacaatgaaagtcattgttttaaaacagaagcatgccatttctctgcttaaaactcctaagatattgtctttaccaagggcttagtgttggctttatggcttctcattgtatagaaaacacttaaaatccaagctccttcagatgtccttcatgtcctggtctcgttgcctctctttctcacctcatatcttgctgctccactgcacaccgcccccctcctccatttcctccctttggctccagcaagaaggactgcctttccgctcctccagctgccaagcctgtctctgccacaggccttctgtgctttcccagctcttcagatggccgcttccttctcatcctcctcagcctggctcagagctgacttccttgcccatctcagcagaacaagatccccacccctgctagttattctctgtcacctactggttatcattgtgtttgttgatctccctgattacagtgtaagctccatgagggtaagaggcagcctgtcttgttcatcctttatattatgggtaaagcctccccacccatgttgtatgcttttaaaaaaatcaggttgtcagtagtgtcttataggtgtatcttcattttgatttccatgtgttaagtcacattattttaaatttcagatcacagatgtggactttgcagccttgaaggcagtggtgaggcttgctgaaccatacctctgtgactctcaagtgagcacttttaccatggagtgcatgaaggagctccttgatctgaaggagcatcggttgcccctgcaggagctgtgggtggtgtttgatgattcaggagtgtttgaccagacagcccttgcaattgagcatgtcaggtaggaaaagaagttgagaaaaataaccttgtggccagaaactttggatgaaatgaagtaattctggtctgtgttagacccagatttaaaactcaactgtaaacttggtcattgcaatatttaaaaatatccaaagataggataatcttttttaaattaaaaaaaattaaaaatgttttaaatctttttttttattttttaattttgagacatagtcttgctctgttgtccaggctggagtgcagtggcatgatctcggctcactgcaacctccgcctcctgggttcaagcaattctcctgcctcagcctctcgagtagctgggattacaggtgtgcaccaccatgtcctgctaatttttgtatttttagtagagatgaggtttcactatgttggccaggtcagtctcgaactcttgacctcaggtgatccacctgccttggcctcccaaagtgctgggattacaggtgtgacccaccgtgcacctggtctaaaaatgttttaaatcattttatgataatttcaaacttatagaaaagctgacaaaactagtatagttgactcttgaatgatgtgggggttaggggtgcctatctccccccacccctacatagtcaaaaatctgagtataacatttgactcccccaaaacttaactactaataacttactgttgaccagaaaagaagccttaccattaacataaatagttgattaggacatattttctatgttatgtgtattatcttataataaagtgctagaaaaaaggaaatgttaagaaattcataaggaagagaaaatgtatttactactcattaagtggaagtggatcatcataaaggtctttatcctcatcatcttcaccagaggaggaagaggaagaagagggattggtcttgctgcctcaggggcggcagaggcaaaacaggtggaggagaggtggaaagggaggcaggagatgctggcacactcagtgtaaattatcagtggaccccacaaaattcagacctgtgttcttcaagggtcaagtgtataaagaattcctgtttatcttttacttggttttcacaaatgttaacaaaagtaggggattcttaattgggtttgtatatatttataaactgacttaaaagttgtggatgttaaggcttatggtcggtatatttcaatacaagagtacagaaagtagaagaagagaaagacagtgaagaaggttatatactatggtgtgtgtactgctaaaagacgaatacacatttttttcaagcatatgtctggtcaaagcaagtgttttcttaggctgcttctaggatccttaggggatgtattcctgcctgtgagtcttttttgccatagttatttccactgcacaagtggaccccttgtcccttccttgggaaagaaagcccatacctggatcagtgggtatgatttcaacaatttttcagatcaatcttttattggatagttcctgatatagatagttattttgtatcttcgccaaagaaggcttacttgtagctatttaaaaatagacccatattccttcaggaactagaagactgagcaatatataatgaccataatgtaaataacattgcttggtgttttgtagtataaaaagtactttctattttctataccattagtgagttaacgtggttttgctgagcttaactcgaatgctctgcaaagaagcagagtgtttcaggccctgctgccaacatcttacggacagtttctaattgtatgcaagaacatttaaccctagatgttcagtattgggccaagcagaatgaatctaaagaaccggtttctgtccagaaccaaaataactcccttctatttttctcattaaaaaaaatctgtcaattgaagcatttgaagataaagtgataactgataagtttaggaaattaggaatcagggagctaatctctatgggcatagaagttcgtggaaaaataagtatctggaatgttatttggtagtattatttgaggaggagcctggttaaatttacacttcatttggagggctgagatttggatcagtgcccagtgaaggtcaaattatgagggatttcatttgttcgttgattcaatgaatatttgagtgccaggtccttagtcaaggatggggtatgtctggtgcatgagacacaccatcatcagggagctgtcagtctaaaggtgggagatgagccttgatgaaataatcacgcacagatgtctgcatgattggaaatagcagtgagtgctgtgatgaattacagagtgtcctaaaattaggtcaagttgctgttctagggttatttactggaataatgacatttgaacttgggttagctgtgtgaaaggggaggcaggggtggggaagggaaaagatttgggagctcagtgtgtttaaggagctgaaaggccagcatggctggaacacagacagtgctgagagagacctaggaaatgagattagagaggctggcaggggccagacagtgcggggatttgttagctggttagtcatttttgtctttaagagcagtgggaagccactgaaggatttttattcttgggtgaatatgactagttttgtgttttgtgtttttgtttttttggaaacacggtattattctgttgcctaggctggagtacagtggtgcaatcatgtgattcaatgcaggctcgaactgtggggctcaaggcatcctcttgcctcagcctctggatcagctgggattataggcatgtgccaccactagccagctagttttttaacaacatttttctgtagagatgggggtctcgttgtgttgcccaagctggtctcgaactcctgggctcaagcagtcctcccacctcagtcccctaaagtgctgctttgtgttttcaggggttcattgtggcttctgtgtagaaaacaaatggtgggagatggaattggtagaccagttaagacgcaagagagaggactagagtggggatatagagaggacggatggaggcttactgagaaagtacaatggctggacttggtggtcgagtggatatcagagatgagaagatgtaagtgaggtgagagaagtcaaggctgacttccacatttctggcttgaaagaatcaacactgcgggaggtacagaagggaatgatgtgtaaatgcttggcatggtactggtgaggatgatattggagccgagtcatggaatagaactataagcttaccaggtggaaaaggtggaaggcacttctggcagcttgactaacaagttacatggaggtttgaaagagcttgtgaaattgagagtttaggtacaacggctctgaggcaggagaggcgcaatagggccagattatgaatctatttatagtaccacgttcaggacttctttttgagggctaaaagggagccagcagaggttttttcaatcgagtagaggcatgcttaagttcattacaacaacaacaacaacaacaacaaaagactccactagagggtgaagggactaacagcccaatctacaataattaggagatggctggtttcattttcagtgcttccttttcacagcagaacttcttgaaagagttatatataatcacagtctatacttcctggtgtctcagtaactcttctaccctgacctcatctctgaaattatgctcaaagacttccatgttcttgtattcagtcaacgtttcactgatctcatcctgcctctgatctcatcttgcttaacgtcttgacattctaggtatttgatcattcccatcttcttcacaccctctcctctcagcttctgggacaccactgttcagctggtgtcttactggcttgctttctcagtcatcttggccagcttttcctctcatgctcaaactttagaatgtcagagttacccagggatcagtcctaggccatctactgttttttccctaatcaaccttggaaccactttggaatcacctgaggaatttctttataaaagtattccaaccaatacatgaagaaagtgatagaatatcagtattttgtaaccactaatgaaataaaggttctagacagtgaacatcgatgactgctgcaaccattagggaaagagaactttatagagggtggatcaggttgacaacctgtatctgttgatcaatctgaacctcacaaaaagacatggccaggcattgtaataaagtcctcagttactgttgttggtaggttcttagaaactgtgatgttaatgaaaccaattttaccataggctgactgatataaacaaaagttaaagtttctacagcatatttctggtcatgaaaacatcatcaaacttctaaataaagaccccaaacaattctaatcttaaacattgaaataaatgtgaactatatatacattaagaaatattaatgcaaacaagataattattgacccaatttccaatttttggtgaaacagtgagtgacagtggtcattgtggtgacgagtaaatcaaggaataaatgtttgcaaagcggaaattataaggagcacctcctgccatcacccacttcaaaacaatgacaaacatagtgggctcactgagcgatttcatgccacagcattcattgttgtgcatttgtatgattattgtatactttatgaatttttgtttgacagtaatttgtattcattcactttccaacctgcttattccagttcagggttgcaggtggccaaagcctattcccgtagttcagggtgcaaggcaggaaccagctgtggacaggagcccatttcatcacagagtgcactcacacacccacactcagactgggacaaggtagacacagaattcacctcatgtgcgcatctttgggatgtgggaggaaatcagagtacctggagaaaacccatgcggacatgggaaaaatgtacatactccacacagacagtggctttggccaggaatgaggctctgctcttcctgcttcttgactgaagtacattacacctcccttgaagtattcttgcaaaaaatccttcctgaaggcctgcaggtctgtagatcttactgtcagtttactagaaataacataaagtacatgttaaatgacccatggggactgggtgcacctgtaattgtagcactctgggaggccaaggtgggcggatcattttagcccaggagttcgagaccagcctagacaacatggcgaaaccccatctctactgaaaatacaaaaaatagcagggcgtggtagcgcgtgcctgtaatcccagctactcgggaggctgaggcaggagaatcgcttgaacccaggaggcggaggctgcagtgagccgaggtcatgctactactgcactccatcctgggcaacagagcaccacactgtctcaaaaaaaaaaaaaaaaaaaaaaaaaaaaattgaccccatggggatgtaatcaccaaaatttagagtgggggaaattagtcaataaattgcaagggaaaaaagagggagaggtaatgtgtaggctaacagcgatttaagaaatgtgtcagtcaaagggcagaagcggaccctcatttggtgcctgattggaacaagtcaactgtgaaagagcagcaggagacaattaggggaatttgaacactggatatttggtaatattaaggaattaaaacttttggtataaagatttattttagagatacatactaaaaatttgtgaatgatttgatgtgtgtgagattggttcaaaataatccagtatatttgggagactgaagtgggtgggttgcctgaggtcagtttgagaccagcctggccaacatagtgaaaccctatctctacgaaaaatacaaaaaattagctgggcgtggtggcgggtgcctgtaatctgagctactagggaggctgaggcaggagaattacttgaacccaggagctggaggttccagtgagacgagatcgcaccgttgcactccagcctgggcaacaagagcaaaactccatctgaaaaaaaaaaaaatccaatatcaagatggtgggggaggagagcagagggtgcctgggtgaggcagagatgaaataagactgtgagttggtaattgttgaagctgcctcatgatacatggtattcatcatactattttctctgttgttgtatatgtttaggattttccataataaatttgttaaatcacttggagagctttaaaaaaatatggatacaactgggcacggtggctcatgcctgtaatcccagcactttgggagaccgaggcaggggggatcacctaaggtcaggagttcaagaccagcctggccaacatggcaaaatgcctctctactaaaagtacaaaaataagccaggcgtggtggcggttgcctgtaatcccagctgctcaggaggctgaggcaggagaattgctcgaacccaggaggcagaggttgcagtgagccaagatggcgccactgcactccagcctgggccacaagagcgagactccatctcaaaaaaaaaaaaaaaaaaaaaaaaaagaaaagaaaagtgtggatgctgatgattcccttgcaccttccccaccccaccagattctgattgcttggtctgggagagggaactaattgttcttgtttttaaatttatttattttgagaaagaatctcactgtgttgcccaggctggagtgcagtggtgcgatctcgcttcactgcagccccggcctcccagttcaagcgattcttgtgccttggcttcttgagtagctggaattgcaggggaatcaatttttaaaagtgtcccagggaactccaatgtacaatgagggttgagaaccactgccttatgattatgtccttacgtgatcttatacattgctttaacaccatcaatgtgttgatagctaccaggtttatgtttccagccctgacctttccctggagctttgggctgtatattcctctgttattttcaatcccaaacctgtttctctctcagtgttttttgtctcaacaaatggcactaccatccagccaggtactggtggtcaataaataattcttccaataaaaagaaagtcctggctgggcgcggtggctcatgcctgtaatcccagcactttgggagtccgaggcgggtgaatcatgaggtcaggagtttgagaccagcctggccaacatggtgaatccccatctctactaaaaatacaaaaaattagctgggtgtggtggtgggtgccatctcagctactcgggaggctgaggcaggagaatcacttgaacccaggaggcggaggttgcagtgagccaagatcacgccattgcactccagccccagagacagagtgagactgtgtctcaaaaaaaaaaaaaaaaaagtcctaacaaaaccagtgtggagaaacttctcttctttagctgatccaaaaaaggtctctatgttgtgtgactcatgactatcaaccatagcaaatatgcagcattctctaagatatgagaattgttttgatttactctttagctctcacccctccaaaatcctaatgttttgagccagtgatagaatttgaatgatactaagttccatttcagatttttctaccaaaacatttggaggagttgggatgaagaagaggaggatgaatacgattattttgtcagatgtgttgaacctcgattaagattgtaagtatttattgctgaccttgttgtacatgttggaaaaatagttacccatggtttaattttgcctgtgtgagatacacacacacacacacacccacactcactcactcactctctctctctgattttctttccaggatctcatagacagaaataaactgatgtacaaattgtaccaccccttgacaagtcattaaatgaaacttgtacaagtgcagagaaacttgcttttagtgtttataaattgagtctaaaagcaggaagttcaagaacatctaaattagtagctcactgttttgttaatttgaataaaattcaattgaacattgaactagtgggttaagaagccctttgttaaattcgattgtttgaaaaacagtgacattatttgaattatagaagactttttggctttaattttgtaaagaatactttaaaggtatatggctttactctaagtttctgcagtgaaacacagcaggctgaactagcagatctaccttaggatattttgtcagcctcctgccttaaatcttaatgaccttattaaatgtggcatttatctccccactagatggtgctttaagaccagtaattttttcttgtattcataagcagtaacttcataggcaatgctgcaataataataaaattataaattgcactccaaaaaaataattgtagaaggtaattttttccctgggtgaaagatgatttttttccccccgtttgaaagatgatttttttcccctgtgtgaaagatgagatgagaagataaggcagtaagcctttacatttttgtggaactcaagtcgatttagtgagtttctcttggcttaaatagtaaataataataaaataaaaaatgtgtgaggcccggcatggtgactcacacctgtaatcccagtaatttgggaggctgaaggaggaagacaacttttttgagacaagctctcactctgttgcccaggctggagtgcagcagtgtgatgtcactcactgcagcctcaatctcctgggctcaagtgtccctcccacctcagcctcctgactagctgtgaatacaggtgcatgccaccacaccgagctaatttttgtatttttagtagagacagggtttcaccatgttggccaggctggtctcgaactcctgacctcaagtgatttgcctgcctccgcctcccaaagtgctgggattacaggactgcgccaccgtgcccagcccgggaagacctcttgaccttaggagtttgagaccagcctgggcaacatagtgagaccccacctctacgaaacctaaaaaaaaaaattagctgggtgtgttagggcatgcctctagtcccagctgctggggaggctgaggcaggaagattgcttgagtccaggagtttgaagctgcaatgagctgtgattgaaccactgcactccagcctaggtgacagagcaagactttgtctcaaaaaaaaaaaaaaagtttgaaagtctgattaatagttctacctggtttagaattatgtatgtgtgattttagctcttcgtaaatgggctatgatttctatttaggctttccagtttttccattgtgcatttcctatttttccatagcatattcaataaaatcccaaaatttcaataagcttgagtattttctaggtttgatacctttgctcttaaaaagaaatgattgattttgattgacatgaaatatgataagggaacataacgtatatcggacaaattcaatctttacttggaaaaaaattgtattctgatttgatagccttgcatgtgctaacgacaagcaatgacttacatgcatagcttgtacatcactggcagatgggatggcataagggaggaatcgtgtgtagttttgcagaagacacggtggtacttgatggagagactggaatgttatcaaatgtaggcagacttaaaaaaggtctctgggctaagataggagtggggctatcaacaggcaagatcaaaccagagtgtctggattttgtactgtgcagtaaatttttcctttctgcttcaaaacacactgcttatatgtgactaaaggaggtctgaaaaaaaccaacactgcttcagaacttcgggatctgtgacacaaatgttacttcattgcttttagactatgaagtatcaatataatgaaaagaaatgaaaagaaataagctaacgggcatggatactggaagtgctaagagacttattttaaaatttgagtcttaatcttcacaacttagtagaacatggtttcatcctcaatttcttttttttatttttaaaatttttaaatttttttgtttttccctttttttttcacagctgttcactcagtttctttcggattaaccaaagtagacaaaatccttgcttttcaagcttcacctaattcacttacttgaaaagcgggaaaagtttcttttttattcattcaaaatgtttaagtgttcatagtctgatgtaaatttgtttaagatatggttctatcttgcatttgtttttccctatcttatttagagcatgactaaattaaaaaaaaacaacatcatttaaggcaatcgttctcactcttggctacacattagcatccccagggaacttaaaaaaatacccttgtatgtccagagacccatttaattggtctggatggggccctgagcatctgtttgtttgtttgtttgttttttgagacagggtcttgctctgttgcccaggctggagtacggagtacagtggcataattagatctcacagcagccttgacccctggggctcaagccatcctcccacctcagcctcccaagtagctgagactacaagtgcatgccatcacaccaggctcatttttgtatttttgtagtgacagggttttgccatgttgcccaggctggcctcaaactcctgggctcaagtgatctgcctgccttggcctcccaaagtgctgggattacaggtgtgagccactgtgcctggcctattttactttatttttaaacccattaattttatatctgttaacttgattgtgcatttacaaattattttattgcatctagaaatactctgtattctgtttttatatttgagaaagtttataaattaatacatttgaagtgccagtatggttgtccagtacaaggtcattttgtttcagtcactctctagattagtaatggcacctttttttccccctcggaatctcaagggcttattttttgaaattctttaataatcttccttagggaatattcagcataattttgtgccatagtgctttaaatggaaggagggactagattgtttgagtcatttctactttttgatcctataaatatgataaccttaaaaaaatttttaaagtcgtattcagatccatgaaaaatatagtaatcttaaacattgttgtgaaacaatttgagaaactgctctccctacccctactcccaaattgccccctgccaccttcttattaagcttttgaatctaatatatgagaagaaaataatttcttattaaataataaaattgtgtaacctgaactttcagtgtttctaaagcacaaatgcttggatccaagaaagaaagtaaaaactcctcaagagcagaaaaattagtgaccttaaggaagtggtgctttaaattttcaacagcttccacttattattattattattacagtgctattcagaaagacttaacatgcacctgagttatatactgtaaaactcttactgggtctttgagggctaagtgggctgttttaatgataggaaaatgtgcctgaaaggcagtggatttcactttgcttttaaactttcaggcattatgacattcttgaagaccgagttccatcaggacttattgttgactaccacaatctgttgtctcaatgtgaggagagttacaggaaatttttaaatctgagaagcagtttgtcaaattgtaactctgattccgagcaggaaaatatctccatggtggaagggttaaaattgtattcggagatggaacagttgaaacaaaagctgaaactcattgagaatcctttgttgaggtatgtgtgtctttgtaattcttagttagtcagcatcttttcttacttgctgtcttactgataggcctgtttcgtttctttaaggtatgtgtttggttatcagaagaattctaacatccaagcaaagggtgtccgttccagcggtcagaagatcactcatgtggtctcctccaccatgatggctggtctcctgcggtccctgcttacggacaggctttgccaggagcctggtgaggaagaaagagaaattcaggtaaacggagagtttctcactccaggtggctttttttccttctgattcaccacaggttttcacaaatcccacaaagtatttacaggagctttcccaagacggttttctgtgcatgggaagtagtgagagccctgcctttcatcagcagtagtcacttaccaggcatgtgttaggtcagtgcgctatcaaaggagatgcttcaatatgcagtttttggcttccattttcaaagtaagacatgaagtcacctagagtaatactcaaattacttttttgggagtgtatatttacaaatgtgttcttattgttttctagttccatagtgatccattgtctgctataaatgcctgcttcgaaggtgacactgttattgtttgtcctggccattatgtggtacatggcactttctccattgctgactccattgagttggaaggtgagtatggaagacacacaaccaaactctcacacgtgatatgtttaagtaaacaataaatcaccaatcttgttgaaactccaagaatgtgatttgaacccatttgatttctagtgagctgccttgaaacattaaggacatggaaagctgaaaagaggttgacccagtgtttcagcaatttgagttgtggttctttgtagcagtgtgtatgttggggagatgttcacaggctcatatagaaaaaagaccattaggaagaagcatactttccagattgtaggtggtttatggaaaggaaatctaatttctagaattaaaaaaaaattcctagcaatatttttaaaaattttagtattttaaaaatttgttgcttgctcttatctcatagatgttgcagatatgttagtgcatggctttttgttttttgtttcacacttagcttattttcgtgagaggtataatgaagggcatttaacttgaaattggtaccaattatcttaattctctaaatgcttgccgaatgtcacaaatgctacactttgtgtcttgaccaaagtatactttagaaaagattaatgttgaaagattctattaaaaataactttttgggctgggtgtggtggcttacgcctgtaatcccagcactttgggaggccgaggtgggcagatcacttgaggccaggagtttgagaccagtctggctaacatggtgaaaccccgtcggtactaaaaatacaaaaattagccgggcatgttgttgcacgcctgtaatcccagctacttgggaggctgaggcagaacaatcgcttgaacctgggaggtggaggttgcaatgagccaagatcatactactatgcttcagcctgggtgacagagcaagactctgtctaaaaaaaataactttttcacagttataatcttattgttcatttagagtgatttctaaatttaggttactttacaattgttcatcttggtcctgtatattttcataacatgtcaaatttagttacacctgttcaactatttatcaaaatagcttcaagttagcagtgaagcttgtaatgcaaaaaatcatatatcattttgggacttgtgcagctgttcagaaactgcttaagctatgctctttatcttgtcagtacttctaaatggaactgaagctggaagtttagttttctcctgttcctagtacatcatctcacccccttttttattttatgtgtgtaatttttgttcttttctactctccaatttttgatgtataatagatgtgtgtatataaataacacatctgcaagataaatcactgtgataaaaacactttattttttggcatagtggaaataacactgatattatagtttgtatggtagataagagttcttcctagattggtgaggaaattttaatgtaattgccagagtgtcataaatggacatatagaatgctgatagttaagtataaaaatggctgtatattgactaacagtatgggtctgagaattggggaatcacaaggtatctctagtgtgcatatatggagtgttcatgagtaagattcaagctcatctgatagtgatctatagctaaccaatataacaagagatatatattgagtacctactatgtgcagggtgtcaatagtacttacaatagggtttttctttcttgttttgaaaatccattcatttaggtaatggttttatgttttaagtggaaagaaatacataattatataaaaatttgtgtaaaaatcttttctcaatatgcaattctttttgtacttttaatttttctgatgataaaaagcaatggttattgtagaaaatatgccaagtacagtcagatacatacaacaatcagaaacaaaatcactcataattcaggcatccagagtccacccctggtagcattccagtgtgtggagtccccttgcattctctagggcccccaaagccttgtttgtcctcttccagtgtagatacattgagcggctttgcttgttaaaaacagttactgctttcatttactcaaagattcgtctttagtcaatgagagttatttcttacagctttgtctatgtggttctgttttataatggaagtcaagcgaattctttagttttctgatactctagttttttgtaagcccactcaggtgtttggcttgcattaatggtttgagtaagatttatacagatctgatggtttttttgtttttgtttttttgaggtggagtcttgctctgtcgcccaggctggagtgcagtggtgtgatctcagttcactgcagcctctgtctcctgggttcaagcgattctcctggctcagcctcctgagttgctgggattactggtgcctgccaccatgcctggctaatttttgtagttttagtagagacagggtttctccatgttggccaggctggtctcgaactcctgacctcaagtgatccacctgccctggcctcccaaagtgctaggattataggcgtgagccactgcacctcactgagatctgatgctttttttttgagacagagtcactgtcacccaggctggagtgcagtggcacgatctcctctcactgcaatctccgcctcccaggttcaagcaattctcccacctcggcctcctgagaagctgggattacaggcacatgccacactcggctaatttttatatttttagtagaggcaggatttctgtatgttggccaggctgctcttgaactcctgacctcaagtgatccacctgcctcagcctcccaaagtgctgggattacaggcgtgcgccaccgtacccagccttgatctgatgctttttatttgttaatgaggtagactgtttttttcctgtaactgtaactagtcagtttgtcagattttaagccaactgtttaagagaatattaaaattagatcatcttgagaactgtttaggtttattcaaatgtaatttatattagaatcatagaatgttagagttagaaacaaacttctaagggtgagtgctttaaagttctttgactcagctgtaagtccttattattattattatcattttttgagatggggtctcattctgtcacccagaatgaaggctggagtgcaatggcatgatcatagcttactgcagccttaaaattctgggatcaagtgaccctcccaccttagcctccttgagtagtgagtaattggtgcatgccaccatgcctgactaatttttttggtttttgtagagatggaatctcactgtgttgcctaggctggtcttgaacattatttattttttatagcacttttgaaagtgaatttagtactgagctgatgtgggatagttgatagggtagtcttcctgatacgggactagtcagagagttgttattgttaaaaattggataccctgatttaaattaaacaggatatgtggggagatagattttatttaaatgcaacatggttgactggtctcattatcatctgcagtcatttaaactagagaaacttgttctacagtgttcacgtttagatgtttttcctcacccatcttgagtgttgttgctctctcttccttaggatatggcctaccagatgacattgtgatagaaaagaggggcaaaggcgacacttttgtggactgcactggtgctgatattaaaatctcaggcataaaatttgttcagcatgatgctgtagagggaatcttaagtaagtatctgaatgtttggtatatcatttgttctaagatttgaaggtaaacggttctctctatggaagatagaatttaatgaaatgccactcttgagtacaggcataccttgttttattgcacttcacgatgctgagtttttttttttttttttttttttacaaattgaaggttgtggcaaccctgtttcaagccagtctgtcggcaccattttcccaagagcatatgctcaccttgtgtttctgtgtcacattttggtaactctcacaatatagataatatgctgatctgtgaacagtgatcttgatgttactactgtaattgttttggggtgccatgaaccacatccataaaagatggtgaacttaactgataattgtgtgggttttgactgttccaccgatcagccattcccctatctctctccttctctttgggctaccctattccttgagacacagcaatattgaaattaggccagttaataaccctacaatggcatctatgtgttcaagtgaaaggaagagtcacatgtctctcatgttaaatttaaaaattagaaatgtttaacatagtgaggaaggcatgtcgaaagctgagataggctgacacctaggtctcttgtgtcagttggtgaagttttgaatgtaaaggaaaagttcataaaggaaattaaaagcactactctagtgaacacatgaatgataagaaagtgaaacagtcttattgctaatatggagaaagtttctgtagtctggatggaagatcaaatcagccaccacattccttaaatcagagcgtattgcagagcagaaccctaacttccttcaattctgtgaagactgaaggaggtgaggaagctgtagaagaagagtttgaaactagcagctgttggttcatgaggtttaaggaaagcagccatttctgtaacataaaagtgcaaggtgaagcagcaagtgctgatgcaagctacagaaagttaaccagaagatctagctaaggtaatcgatgaaggtggatacactaaacaacacattttcagtgtagatgaaataaccttctattggaagaagattccatctagtacttttcatagttagagaggagaagtcagtgcttggcttcacagcttcaaaggacaggctgactctcttgttatgagtgaatgtaactggtgactttaagttgaagccagtgctcatttaccattctgaaaatcctagagcccttaagaattatgccagatctactctgcctgtgccctagaaatggaacaacaaagcctgaatggtagcacatctgtttataatgtggtttactgaatattttaggcccattattgagatttactactgaaaaaaaaaattcctttaaaaatatgattgcttattgacaatgtacctggtcatctgagagctatgatggaggtgtactgggagattaatgttgttttcatgcctgctaataatatccattctgcagcccatggatcaaggagtaatttcgactttcaaatcttactatttgagaaatacacttcctaaggctataccagctattgatagtgattcctccgatgggtctgggcaaagtcaattgaaaagtttctgggaaggagtcatcattctagatgtcattaagaacatttgtgattcatgggaggaggttaaaatctcaacattaacaggggttctggagaagttgattccagccctcatggatgattgaggggttcaagacttgaatggaggaagtaactgcagatgtggtggaaatagcaagagaactagagcctgatgatagcaagtagaacctcaagacgtgactgaattgctacaatcttataacaaaattggaacagatgaggaattgcttcttatggatgagcgaagaaggtggtttcctgagatagaatttcctggggaggatgctgtgaacatggttgaatgacaacaaatgatttagagtattaggtaaacttggtaaagcagaggcagactttgatgggattgactccaattttgaaaaaccttctactgtgtgtaaagtgctatcaaacaagatcacatgctacagagaaatcctttcatgaaaggaagagtcaatcaatgtggcaaacttcattgttgtcttatttttaaaaattgccatagccaccttaaccttcagcaaacaccattctgatcagtaagcagccatcaacattgaggtaagaccctccaccagcaaaaagattatgtcttgctgaaggctcagaggattgttagcatgttttagcaaaacaaagtatcttaaattaagatgtatatattgttaaaaaacataatgcctttgtacacttaatagatgcattataaacatagtactcattagtataaactcatatgctcattagtataaacacaacttttatttttttttgtttttagagacagtctcactgtcatctaggctagagtgcaatagcatgatcatagctctctgtagcctcaaactcctgggctcaagcaattctgcctttgccccccaagtagctgggactacaggcgtgtgccatcacgtcttgctaatttttgtattttttagagatggggtttcacgatgttgcccaggctggtctcagactcctggccttaagtgatccacccaccccagactcccataaacatttgtatgcactgggaaaccaaaaaaattgtgtgactcactttaattgtgatatttcctttattgtggtggtttggaactcaacctgcaatatctctggagtatgagtgtgtatggaagactgattatttatgaagctgggcgtggtggctcacgcctgcaatcccagcactttgggcagccgaggagggtggatcacctgaggtcaggagtttgagaccagcctggcgaacatggtggaaccctgtctctactaaaaatacaaaaactagccaggtgtggtgatacacgcctatgatgccatctactctggaggctgaagcaggagaattccttgaacctgggaagcagaggttgcagtgagccaagatcgcaccactgcactccagcccaggcaacagagcaaggctccgtctccaaaaaaaaaaaaaagtttactcatttaggctgggcgcagtggcttatgcctgtaatcccaacactttgggaggctgaggcgggtgaatcacctgaggtcaggagttcgagactagcctggccaacatgatgaaaccctgtctctactaaaaaatacaaaaattagctgggtgtggtggcaggcgcctgtaatcccagctactcaggaggctgaggcaggagaatcacttgaaaccaagaggcagaggtctcactctgtcacccaggctggagtgcagtggtgtgatctctgctcactgcaagctccgccttttgggttcaagcaattctcctgcctcaacctcccaagtagctgggattacaggtgcccaccaccacgctcggctaatttttgtgttttttagtagagacgggttttcaccatgttggccaggttggtcttgaactcctgaccttgggtgttctgcccccctcggcctcccaaagtgctaggattacaggtgtgagctaccgcatgcggcctagaaaattatttttttatgtacatagtgtgatgacttagcaatcttaacccttcagtaaaaaatagcctattcatgataatttgttgtttaatattagtttcttttctgtgtggtgatttttttcttttaaaactttccagtgttgtggtctgttttctctgtattcaaggtagcactagactgaagttatctccacatgggagtaatgtttgtttcctggaatctttgtatcccctttcttgaatcaaagtctttttcttccgagatactcagcaaaattgctctctgatgctttttttttctggtaatggaaagtgcttttgtatctgaggtcaagtcattctttttaaagaatgttgcttttagattgtagaaaataactcaaaatagtcattgttttatattttatgaatttgtaatttaggtaagaaaatttaaatgatagccattgagaaatatttagaccatagctaatgtcagcgcgaggctatctctaacattggaaaaggcacattacttcttaaaacagtcagcgtgtattttcatcccagttgttcaccgtggtaagactacgctggaaaactgtgtgctgcagtgtgagacgaccggagtcacagtgcggacatcagcagagtttctaatgaagaactcggatttatatggcgccaaggtagaagctcttgtcctcttggggaagtagtttgtgtttaagttgtaaatgaatatatgaaatatgggaccaagatgtatgtgtgtactcccactctcttcagacagtcatctctaccaagtcagtcaaactcaactgtgcaagggtcttctcatgtagcattttcaaatgataggaagaaaagtaatacatctcacaatgactttatgtagctttaagagaggtttagacccttaaaattataactttgtagattcacacagtgttgtaagaagtaacagggagaggtcctgcattatgcccttcaccagtgtcccctaatggtaacatcttgtgaaactgtcgtgcaacatcacaaccagaatactgacatcgatcctgtcagtagaagaatattcccatcaccacagggacccctcatgctgccctcctagagccaaactcacctgcctctcccaccaacctcttccttaactgcaggcacaccttaagctgtttttcatttctatttatttcatcatttcaaaaatgtagaaatggaatcacacagtatgtggctctttgggattggcttttctcacttagtgtggttctgtggagcttcacctaggtcgttgtatgtaccaatagcttgctcctttttactgtggaggaatagtccaatgtgtggttgttccacggtttgttttgtcacttgtggaaggatgtctagattgtctccagtttttgcctattgtcagtaaagctgctataaacgttcgggtacaggtttttgtgtgaacacagttttcattttttaaggagtaagtgacaatggatgcaattgtaggtcatatagtagttgcatgtttaggttttttttttttaaagaaaccgctaaaatgttttcagagtagttgtaccatcctactagcaatgtttgagtggtctagtttctccatgtcctcaagagcatttggtgttttgactattttttgttttagccattctgataagtgtgtagtgatatctcattgtggttttaattgtcatttccccagttgttaatgatgttgagcattttctcatatgcttatttgccacccttatatcctctttagtgaaatatctgtgacttttgccccattttctaattggattgtttgttcttctttactgtagaggtttgagagttctctgtatattctagatactagtccgttgtcaggtatgtggtttggagacattttttgccactctgtagcttgtcttttcaccttcttcatatggccttttatggagcaaagtatttaattttgatgaagtccactgtatcagtttttccttttatgagttgaggttttggtgataagaactctgcctagccatagatcctgattttctcctattttttttctaaaatttttatagcgttatattttacataaggttgtgatccattttctagttaattttggtataaggtgtgaggtttaggtcatggttcatttcttttcctattctgtttcactaatctgtgtagccatccctccaccaatacctgtagctatacattaagtcttaaaatcaggtagagtgatttctcctactttgtttttttcaaaattgtttcagctaccctggttcctttgcttttcaatacaaatgttaaaataattttgtctatatccacgaaagatcatgctgagattttgataggaactttaataaacccatatgtcaatttgggaaggattaacgccttccaatctttgaaaacaatgtatttctccatttatttaaaatctctgatttctttttttttttgagatagggactagggacttgttctgtcactcaggctggaatgcggtggcatgaacacggcttatggcatagcttcagtctcctgggctcaagccatcttcccaactctgcctctcaagtagctgggactaaaggtgcatggcacaacactgagctaacattttttactttattttttgtagagatggggtcttgccatgttgcctaggctgttctccaactcctaggctcaagcagtcctcctgcttcagtctcccgaagtgctgggattataaacatgagcccccacacccagccaaatctttgttttctttcatcagcattgtgtactcttcagcatacaaatgttgtatgtgttttgttagatttgtacctaattatttcacttttttgagtgattatggtattaatttcagtgtccatacattcattgctagtatatagaaatataatttatttttatatgtttatgctatatcctatgactttgttgaaccacacttataggaatgtttttgtagattccttgggattttctatatagagagtaatgttatctgcaaataagtgcaggttcttttttttcttttctaatctttatgcctttttccccccttgccttattgcactggctagaatttccagcactatgaaagcagacatccttaccttggttttgatattagagagaatatatttagtattccatcaaaaagaataaggttgaccaggtttttagatattcgttattaagttgaagaatttctgctttttttttttttttttttttttttgagaatttttatcataagtggatgttgacttctttttttctgagttcctttctcaggactaggctgacttttaatgttttttctggatagattgatatgatcgcatgatttttcttactggaaaacagaaaatggtgggttacattggttgattttcaaattttgagccagccttgcctctgtggcataaaacccacttggtcatggtatataattatttttatatattgctgaattatatttgctaatcttttgttaggaaattttgcatctatattcatgaatattggactctagttttggttttctgtgccactgtctttgtctggttctattatcgataataatagcttcataaaatgaatactgaagtgttcccttctcttgtattttgtaaacgagattgtgtagaattgctgtttattcttcagatgtttgatggatttctccaatgcaatcacctgggcccggagatttctcttttggaatttttaaaattatgaattcaatttcattaatagttaaaaggatattcaaatgacctatttcatattgagtatattttggtagtttgtgctttttgtggtattggactactacttctaagttgtcagatttatatgcatagaattgtttgtagtatttccttattcttctgatatctgcagggtatatagtaatgatccctgtttcatgcttgatgttggtagtttgtgtcttctctcttttgagaaccaactctttgtttcattgttctgtgttttttttctttttgataattgttctgttttcaatttcacttatgttctttttttagatttaattttaatttttagttttacttttttatgttctttttatgatttcattccttctgcttgttttggatttattttacttgttttgggttttccacctgagagattagattattgatttgagactttttctcttttctaatgtaagcatttaatgctataaacttgtctctcagcattgctctagctgttttgtaaattttgatatttatttttattcgttggtttgtgcagaatttagaagtgtgttgtttagtttctaaatatttggagttttactattatctttctgttgttgaattccagtttcattccattgtggtcggaaaacacactatatgattttaattcttttatatttctagaggtttcttttatggctcaggatatggtctatctggatacatattctgtgagcaaatgaaaagaatgtgtattccgctgtcattgggtggtatattctataaaatgtcaactagatcaagttggttggtggtgttgagttcttttgtattctttctgattttttttttctgccaattgttgagagaggggtgttgaagtctctaactataactgaatttgtttgtttgccttttcagtactattagtttttgcttcacatattttgcagttctgtttggtgtatgctcacttaggattgctgtgtctttttggtgagtcagcatgtttatgattatgtctgtctctggtaattttttttgctccaaagtctactttatctgatgtgaatatagccacacctgctttcctttgattattgtttgcatgatatgtctttttctattttttttaaattatactttaagttctagggtacatgtgcacaacgtgcaggtttgttacatatgtatacatgtgccatgttggtgtgctgcacccattaactcgtcatttacattaggtatatctcctaatgctatccctccccgctcccctcaccccacaacaggccccagtgtgtgatgttccccaccctgtgtacaagtgttctcattgttcaattcccacctatgagtgacaacatgcggtgtttggttttctgtccttgcgatagtttgctcagaatgatggtttccagcttcatccatgtccctacaaaggacgtgaactcatccttttttatggctgcatagtattccatggtgtatatgtgccacattttcttaatccagtctatttttgatggacatttttgttggttccaagtctttgctattgtgaatagtgcctcaataaagatacatgtgcatgtgtctttatagcagcatgattcataatcctttgggtatatacccagtaatgggatggctggatcaaatggtatttctagttctagatccttgaggaattgccacactgtcttccacaatggttgaactaatatacactcccaccaacagtgtaaaagtgttcctatttctccacatcctctccagctcctgttgcttcctgactttttaatgatcaccattctaactggtgtgaaatggtatctcattgtgtttttgatttgcatttctctgatggccggtgatggcgagcattttttcatgtgtctgttggctgcataaatgtcttcttttgagaagtgtctgttcatatcctttgcccactttttgatggggttgtttgattttttcttgtaaatttgtttaagttctttgtagattctggatattagccctctgtcagatgggtagattgtaaaaattttcttgcattctgtaggttgcctgttcactctgatggtagtttgttctgctgtgcagaagctctttagtttaactagatcccatttgtcaattttggcttttgttgccattgcttttggtgttttagtcatgaagtcctgccatgcgtatgtcctgaatggtattgcctagattttcttctagggttttaatggttttaggtctaacatttaagtctttaatccatcttgaattaatttttgtaaggtgtaaggaagggatccagtttcagctttctacatatgactagccagttttcccagcaccatttattaaatagggaatcctttccccatttcttgtttttgtcaggtttgtcaaagatcagatggttgtagatgtgtggtattatttctgagggctctgttctgttccattggtctatatctctgttttggtaccagtaccatgctgttttggttactgtagtcttgtagtatagtttgaagtcaggtagcgtgatgcctccagctttgttcttttggcttaggattgtcttggcgatgtgggctcttttttggttccatatgaactttaaagtagtttttccaattctgtgaagaaagtccttggtagcttgatggggatggcattgaatctataaattaccttgggcagtatggccattttcatgatattgattcttcctatccatgagcatggaatgttcttccatttgtgtcctcttttatttcattgagcagtggtttgtagttctccttgaagaggtccttcacatcccttataagttggattcctaagtattttattctctttgaagcaattttgaatgggagttcacttatgatttgactctctgtttatctgttattggtgtataggaatgcttgtgatttttgcacattgattttgtatcctgagactttgctgaagttgcttatcagcttaaggagatattgggctgagacgatggggttttctagatatgcaatcatgtcatctgcaaacagggacaatttgacttcctcttttcctaattcaataccctttatttctttctcctgcctgattgccctggccagaacttccaacactatgttgaataggagtggtgagagagggcatccctgtcttgtgtgacagttttcaaagggaatgcttccagtttttgcccattgattatgatattggctgtgggtttgtcataaacagctcttattattttgagatacatcccatcaatacctagtttattgagagtttttagcatgagacgctgttgaattttgttgaaggccttttctgcatctattgagataatcatgtggtttttgtctttggttctgtttatatgatggattacgtttattgatttgcatatgttgaaccagccttgcatcccagggatgaagccaacttgatcatggtggataagctttttgatgtgctgctggattcggtttgccagtattttattgaggatttttgcatcgatgttcatcaggcatattggtctaaattctctttttttgttgtgtctctgccaggctttggtatcaggatgatgctggcctcataaaatgagttagggaggattccctctttttctattgattggaatagtttcagaaggaatggtaccagctcctctttgtacctctggtagaattcggctgtgaatccgtctggtcctagactttttttgattggtaggctattaaatattgcctcaatttccgaac

SEQ ID NO: 188 - DNA, 13750 bp, Homo sapiens
  source 1..13750: mol_type = other DNA
gacttgatcgattgcttctgcctgggcggtaccgcccgaattgactgctcctgtctgatgcgtccccgggcgcgggaaacgagtttcaatccactttcctgaccccaaccatcctgcccagtctccgcttccccgtcttgtacacccctaactcctgaggctcctccgaatcacgcgagtggaagcggagaagctcaagtggccgccatgtcagaggcttatttccgagtggagtcgggtgcgctggggcctgaggagaactttctttctttggacgacatcctgatgtcccacgagaagctgccggtgcgcacggagaccgccatgcctcgccttggcgctttcttcctggagcggagcgcaggcgccgagactgacaacgcggtcccacaggtgagcctttgggtgcggggtcctgcccggaaagactgcagctcccggcgggcccctcggccctgggacgccgcatcggggcgcgctgccctttgggatttgtagttttcgaggagccagggccgaaggcgctaacgacttctcggaaactccgcgggggtcccttcgcgctcggggtggtctccagacttcttgttcgccatctgtggtgaaactacatttatcctaggtcgccaggcagcctccaacattgatttcttttttgaaactgtccaaattagtgtcttccccctaccccatgcaacgtgtgttgaatgcttaaagattggctccagctgaatacttaagaattagagttctgatcatgtttgccttaaaacagctttgggttctgtaagagcatgtgataagtaggaaccccaagttgctaaattcattcctccataatgatgacaggatcagtaagccctactgaggcttacttagtggcagcatggttgggtgtggggagtaagcttttccctttaatccttcagcaaccagaaaggctgggtcacttggccagggcttcagttagtggtgagctgggattcggaacccaaggccatatggcttcaaatataaaattgtcccaggaacatggcttgtaatgattaatttggatatcctgtttcacctaagttttgtatagaacgatgtttattgtttggtctgtttgtttcaagttaatttttatcaaagtaatacataaccaacgttttaaaagtcaaataggccggatgcggtggctcacgcctgtaatcccagcactttgggaggctgaggcgggcggatcacgaggtcaagagatccagaccatcctggccaacatggtgaaaccccatctctactagaaagctgggtgtggtggccggcgcctgtaatctcagctactctggaggctgaggcaggagaatttcttgaacccaggaggcagaggttgcagtgagccgagactgtgccactgcactccagcctggcgacagagtgagactccatctcaaaaaaaaaaaaaaaaaaagtcaaatagtaccaaaagatttataagaaaaaaaatagcaggtcctgccttccttttcccacttccccctccaagtccacagggctcatgtaccttttttagtggtgtcttcaagattcatcttcatatttctaaataatattcttaaacttaccttgttgggttgttttttttaatgtagacattatctgttgacttcatcctagcagatgaggatttcgttcccatacacactggtaaacatggcgctatgctgcccatacttaattcatatttccttagtttttagttaatgccctttttctattctaggattccacctaggataccacactgcatttagtagacatgtttccttagccttctcttggttgtgacaattaatcagacctccttgttctaatgacctcgacggttttgtggagtggtggtcaggtattttgtaaaatgttcctcagttggaaatctttggtttgggggtagttttgtttttggttttgtttttttgtttgtttttttgacacggagttaccctgtcatctaggccagagtgcagtggcataatctcagctcactgcagcctcctccacctcctgggttcaagcaattctgcctcagcctcccaagtagctgagattacaggcgcccaccaccacacccagccaatttttgtatttttagtagagatgaggtttcaccaggttggccaggctggtctggaactcctgacttcaagtgatccacccaactcagcctcccaaagtactgggattacaggcgtaagccacctcgcccagccttctttgtttttgttttttattctttttttctcagcattagacttgattatcagctttagggaggaagaccacagaggtaaagtgccattttcatcacatattaagggtgcctactatcaacaggactttgtactgttcatttgaaccttggcagaggtaatgttcattaggtttctccaccttttcatactgtactctttggatggaagtcattatcactgtcacactgaaggagtagggagttatgttccacttctttgagtgcagagtgtctacattaaatctttagaatccttctgcatgggagatttgtgtaggaaggtttgtatgacatttaatttcatttataggattattcagacttgatttcttcttgtgttagttttggtatatttggtttttaactaaaactttgaccattttatctaattttttttttttttttttgagacagggttttgctctgttgcccaggctggagtgcagtggtgtgatatggctcactgcagccttgacctcccaggctccagagatcctcccacctcagccacctatgtggctggtattgcaggtacatgccaccatgtccagctaatttttgtattttttttttgtctaaattttcttttttttttttttctatttgtacatttgaaattcttctgtaatatttgtatatatatatatatattttttttttaattgatcattcttgggtgtttctcgcaaagggggatttggcagggtcacaggacaatagtggagggaaggtcaagcagataaacaagtgaacaaaggtctctggttttcctaggcagaggaccctgcggccttccgcagtgtttgtgtccctgggtacttgagattagggagtggtgatgactcttaacgagcatgctgccttcaagcatctgtttaacaaagcacatcttgcaccacccttaatccattcaacccctgagtggacacagcatatgtttcagagagcacagggttgggggtaaggtcacagatcaacaggatcccaaggcagaagaatttttcttagtacagaacaaaatgaaaagtctcccacgtctacttgtttctacacagacacagcaaccatccgatttctcaatcttttccccacctttcccccctttctattccacaaagccgccattgtcatcctggcccgttctcaatgagctgttgagtacacctcccagacggggtggtggccgggcagaggggctcctcacttcccagtaggggcggccgggcagaggtgcccctcacctcccggacggggcggctggctgggcggggggctggcccccccacctccctcccggacagggcggctggctgggcagaggggctcctcactttccagtaggggcggccgggcagaggcgcccctcacctcccggacggggcggctggccgggcggggggctgactcccccacctccctcccggacggggcggctggctgggtggggggctgacccccccacctccctcttggacggggcggctggccgggcagaggggctcctcacttaccagtaggggcggccgggcagaggcgcccctcacctcccagacggggcggctggccgggtggggggctgactcccccacctccctcccggacggggcggctggccgggcagaggggctcctcacttaccagtaggggcggccgggcagaggcgcccctcacctcccggatggggcggctggccgggcagggggctgacccccccacctccctcccggacggggcggctggctgggcagaggggctcctcacttcccagtaggggcggccgggcagaggcgcccctcacctcccggacggggaggctggccgggcgggggctgacccccccacctccctcccggacggggcggctggtcgggcgggggctgatcccccccacctccctcccggacggggcggctggccgggcggggggctgatccccccacctcccttcccggacggggcggctggccgggcggtgggctgaccccccgacctccctcccggacggggcggctggccgggcggggggctgacctccccacctccctcccggacggggcggctggccgggcggggggctgacccccccacctccttcccggacagggcggctggccgggcagaggggctcctcacttcccagtaggggcggccgggcagaggcgcccctcacctcccggacggggcggctggccgggcggggggctgacccccccacctccttcccggacggggcggctggccgggcagaggtgctcctcacatcccagtaggggtggccgggcagaggcgcccctcacctccaggagagggcggctggctgggcggggggctgacccccccacctcccttccggacagggcggctggccgggcggggggctgacccccacctccctcctggatggggtggctgccgggcggagacgctcctcacttcccagacggtgtagctgccgggcggaggggctcctcacttctcagacggggtggttgccaggcagagggtctcctcacttctcagacggggcggccgggcagagatgctcctcacatcccagacggggcagcagggcagaggcactccccacatctcagacgatgggcggccgggcagagacgctcctcacttcctagatgggatggcggccgggcagagacgctcctcactttccagactgggcagccaggcagagaggctcctcacttcccagacggggtggcagccgggcagaggctgcaatctcggcactttggggggccaaggcaggcagctgggaggtggaggttgtatcgagccgagatcacgccactgcactccagcctgggcaccattgagcactgagtgaacgtgactccgtctgccatcccggcacctcgggaggctgaggctggcggatcactcgcggttaggagctggagaccagcccggccaacacagcgaaaccccgtctccaccaaaaaaatacgaaaaccagtcaggcgtggcggcgcgcgcctgcaatcacaggcactcggcaggctgaggcaggagaatcaggcagggaggttgcagtgagccgagatggcagcagtacagtccagcttcggctcggcatcagagggagaccgtggaaagagagggagagggagaccgtggggagagggagagggaaagggagagggagagcttgtctaaattttcaatggtatcagtacaatgttcagaatttcctttactatctttttaatgtcagtaggattacagtggtgtccttatttttatttttaatatcaataaattgtgttctccctttcttgattacccttgccaggagtctatcaatttttttattcttttaaaagaactaacttaggactctgttggttttctcttttgtacctttgttttttaggtcattaattttttaattagttctttccttctactttatttgggcttaattctcccaccacacacacacacacagatacacattttgagatggaaacctaggtcattaatttttcaatcttcttttatacattcatagctattcatttcttttaagtgaaattattctattcaattcacaactttaattgcgtttcataagttttgatgtgttatattttcattatcaatgaactaaaaatactttttaggccaggcatggtggctcacacctatagacccaacactgggaggtggaggcaggaggatcacttgagcccaggagttcgagaccagcctaggcaacatagtgagtccccatctctacaaaaaattttttaaaaaagccgagcatggtagcacacacctgtggtcacagctactcaggaggctgaggcaagaggatcacttaagccttggagggtcagtactgcagtgagccgtgatcacaccactgcactccagcctagatgacacagcaagatactgtctcaaaagaaaataaataaaaattttaaaatactgtttaattttgcgttttaaaatactgtttaaaatactgtttaattgtgatttcttttttgacctgtaggtatttagaagactagtgcttaatttcaaacattttgagatttggtcatttaccattttttatttctagcttaattccaccgtggccagaaaacatagtctacatgatttcagtcttgaaagttgctgagacttgctctatggcaaagcataagaccaatttaaccattctgtgtggacttgaaaagatgtctatgggaagtcatagtgtgcaataaataatccgtatgtgtaaattagctcatttgttaattgttttgttgagatattctctatccttgcaatttttttttctacttttttttttatcctgtaaaacatgtggaccaggcatggtggctcctgcctgtaaccctagcactttgggaggtggaggtgagaggatcacttgaggccaggagtttgagatcagcctaagcaacatagcaagaccctgtctctaggaaaaattgaaaaattagctgagtgtggtggcacatgcctatagtcccacctactcaggagactgaggcaagaggattacttgagcctagaagaccactgcactccagcctgggtgacagaacaggaccccctctctgaaaaaaaaaaaaaaattgaaaaaatgttaaagtctctcattatgattatggattagcctgtttatccttttacttctgttaatttagacatatattaataattttctggtagatataatgacccttttattattgtcacgtctccctttatctctaatgctcctgtcttttgattcatgtttacatgactttttttaatcctatttttaatttttctgtgtcttcatatttaaggtatgtctcttttatgcagcatatagttgggttttgttttgtgtgcagtgtgctgatttttaattgttatatttaatccatttacatttaattattgacatatttgtattcatttttaccttcttactattttcttatgtcccatctgttttagctttctttttctatcctttcttgacttccttttgcattaatcaaatttattttattattcatttacctttttattagtttatttagttatatattcttctgttattttagtggctaccttaaatatattacacaatcatttctgaccaaaaagaatgttatataagttactactttcaccacttcacagaaatgactagaatcttagaacacttaaacccattttttctcttgtgttattgtgatgtattctagtttgactcattgaaaacccctgtaaaacattattattatatacccacttatatattcttttcatgacttgtttttcctttctgcatttctgtagttctttctggaatcatttgcattctctcttcagaattcccttattctggatcttctggtgataagtctcagtttctgtctgtgtcacagatgcccaagaccaacccagatttgatgattcactaagaggactcaaaggactcagcatatagtcacactcatggttaagattgattacatcaaaaggatataaagcaaaattagcagagggaaaggttgcatggagtaaagtctggaggagaccaggcacaagcttccaagagtcctctcctagtggagtcacacaggatgcacttaaattctccagtaatttgaattctgataaaatgtttgaaatactgtctcctagggaagcttgttaaagactcagtccccagggttttattggaggctgttcatgtggcactttctgtctagcacagaccaaaattcagacttccagagggaaagcaggtgttcaacatgaatcacattgtttgcacagacagttcaggcacactctcatcagttctaggacgggtgagaatcctcctgaaatccaagttcccaaatgccaaccaagggccaaccttgcagcaggccttgctaagatagcagcctcaggcctactgtgtatctttcctgcatactttctctatggaaatgcctttatttcacttttacttttaaaggatattttcactgggtataagattttacactcacagttatgttcttttagcacataaaaaaaaaattccatttccattgttttgtggcttccacagtttctgttaagaagttggcttttttttttttttttcttttttgagacagagtcttgctctgtcgcccaggctggagtacaatggtgtgatctcggctcactgtaacctctgcctcctgtgttcaagcgagtcttctgcctcagcctcctgagtagctaggattacaggcgcccaccactatgcctggctaatttttgtatttttagtagaaacggggtttcaccatgttggtcaggcccgtctcgaacccctgagcccatgtgatttgcccgccttggcctcccaaattattggtgtgtctggaattggttccttcaggtgggttcttggtctcgctggtctcgctgacttcaagaatgaagccgaagacccttgtggtgagtgttacagttcctaaaggtggtgtgtccggagtttgttcctttagatgttcagatgtgtccggagtttctttcttctggtgggtttgtggtctcgctggcttcaggagtgaagctgcagacctttgcagtgagtgttacagctcatgaaggtagtggggatccaaagagtgagcagccatcaagacttactgtgaagagctaaagaacaaagcttccacagcgtggaaggggacccaagcaggttgctgctggtggcttggtggcctgcttttattcccttatttggccccacccacatcttgctgattggtccattttacagagagctgatggttcattttacagagtgctgattggtccgttttacagagtgctgattggtctgtttttacagagtgctgattggtgtgtttacaaacctttagctagatacagagcactgattggtgcatttacaatcctttagctagacagaaaagttctccaagtccccacccaacccagaagcccagccggcttcaccttttattgggattacaggcgtgagccaccggcccctgccaaaaagttgggtttaactcttaatgttcattctttaaaggcagtgtgttcgtcactcccatctacagctgtttttaggattttctctgtctttggtctcgtaattcaggtaatatatgcctagttgtgattttattagtatttattctattaatacttgttattcataatgttccttgaatctgtggtttgataccttttttaattttggataatatatagctattatctcttcagacatttattttgcctcaatctatcgctcctgcccatcaaattacatgcatgttgaactttgtctttcttttacaccttatttcatacatctcttaggctcttctctgttttttctctagatactttagtctggttattttctattgaccttttctcattcacagtcctgtcttcatccaaatccaatccagtaaacatgttaaatttgatttaatctattgacttcttaggttcaattattgtatttttcagttctggaatttccatttgatttctaagtttatcttaaagttggcgcctaatttctctgctattcggtgtcaaatagggggcttacttccctcccttctttctcagatcttaggccctcatgtcctggtggtgttggcagccttgaactcaatattggtctgtctagtcctgtgcagtttgccaaaagctctgcttccacacccacaaagctgctcccatctttttgcaacagttctcccttgtgagagttttggctcttactgcttcattcaatccagttgtttgcctttgatttttttggagatttatgactcttaatttctggtctgtcatgaccacctcatcttgttttctaattctattgaggctttaaaaactagagacatgtgtgctgtcatctctgaagctgtgaagtgggatggaaaggggctgccactcaagctcaggttgatcttatttttctttctgacccctagcatccaatagggtgctcagtacatagcaggcactcggcaagtggatatttagaataaatattgaatattcaaagaaaaaggaaatgtttactatagctctgaagtgtctacaattggacaatttttatgtgttagttagaaaactctcacttatgctacatttttgttcaccatgtttttgttgtataaatccattttctctctccattccatcatcacataaaacttcagcccacacacttcattgcttcgagtcacgaccaggtcttctgtgcttgacagccactcccccaaagagaaaaggcagtattgcgcaggcgatgtgtatttccttttcgtcacacacatttgctgtgttacttgtctgtttttaaaatctacattcatgcatgctgcagggttccaagcttgaactacccttgtggctggcaaaaggactttttgacaacaagcgacggatcctttctgtggaactccccaagatctaccaagagggttggaggactgtgttcagtgcagatcccaatgtggtggacctccacaaaatggggccccatttctacgggtttggctcccagctcctgcattttgacagtcccgagaatgcagacatttcccagtctctgctgcaggcaagtaatgggtgtgaaaacctgtggtgctgcacttgtctcaagagccagccacagatactacttttacccaggacagtgtatgacttgtaaatttagtctgtttttattccaggtcagcctacagttacactgtctgtccattttatatatttacatatatacacacacacacacacacacacacacatttttttaatatgacttgtctgccactcctcatatttgcttgctacaagttgaggccagcaggaactctaggaaatgagaaaagggtgatgatggccaggcatggtggctcacacctgtaatcccagcactttgggaggccaaggcaggaggatcgctgagcccaggagttcaagaccaacctgggcaacatagtgagatcccatctctattaaaaagaaaaaagagaaaaaaagggctatggtgcattacaggtgacaggcacttagatacacagtcccaggcctggcctaagggttcctgttggaaatacaagagttattgggttgtttccttcctttgttctggggttagggcttggccctgccatgaactagcaatatgacttggtcaagctacttgacctctctagacatcaattcacctgtaagaattgatggagatgataatagtgccaaaattatagagttgtggtaaaactatgtaatgccgtgtaataaacaataactcatattgttattacttttccaggacaaaacaatgttatacatctgttcccaacctttatggtataaccttattttaatttttcataattacttttttattctgttactgttagaagaaaccatcatttcttcctcttgggacagaagcatttgctactaatgacaataataggtgatgcttctcaaggagcttgctgtgtgctagccatttgctaggtgcattacatgtattcattggttttcttaacaacttactggattttcataacaatccacttcacagatgaggaaattgaggcatggcaatgtgcaataacttacttgggtgctagagggaattcagacctccttctgagtcctacacatcattctttcttttcatgccatttaaatgttctgagataaaaatggatatgactttgtggggtgtgaggtcaaccctgacttgtcttactcccttgtttcccagacttttatcggacgttttcgccgcatcatggactcctcacagaatgcttacaacgaagacacttcagccctggtagccaggctagacgagatggagaggggcttatttcaaacagggcagaaaggactgaatgactttcagtgttgggagaaggggcaggcttctcagatcacagcttccaacctcgttcagaattacaagaagagaaaattcactgatatggaagactgaaagccggaagaacacagaatggctcctcacagacgtatccctccgtgtgtccttgataggagctggttgaccttgtacagaaccagaatcctgtcccatttcatggcttatttcctgtggccatagagaattatagggaactggacatgctggaggatgtgggtgtccctggctctgtgagtcttccaggaccgtcccaccctgctgacccacagcccaggccctttaacccaagaacccatggccaaggagaaatcaaagtccttcctaaataagaatcactgccatataatatatcacagtagagttgcaactgagattccttgtgtctgggagtttggacagcttcagatgtacagtttcactagccacaaagcacaggtacaaactgggtcatcgcctgttcacaaaatgctctcttgatcttatttgcctcatcttcctcatggttgtacagaggatagcaccccaccatgccagcctgacttggagatatctcctgctgcctgcctgcagggagttaccccagtttccaaaaacagtcgcccagataaaggaggaaaagggaaaggcagacgaatggcatggcttttactaaagaaaagatgttggcctcatactctatactcagggcttaatgaactggaatctgcataactcagcagtcaacccagaagggaaatggttaaactgagcttgttattgcctcggagagcctaagagcacccgcacacttaattctactccctgtctagaaaagctgtcagggagtcgtttggaattgcaatgtagttattaagggctgttaaccagcctgcattacatctggaagtcaggacttgggtgctgactatgaagggccctgttttcaaaatctaacattgcaagtgtaaatgggcaagaagcctccgttgtgctttttttttcctcttcagtaacttttgcaacattattgcatagaagatccctgaccatttactaggaacctggttaagcaagcactaatctcttttcctggagatcaaggatgcaacctcaggttgagaaagaaacagggttccctgggcccattagactgtttgcagggcatcactgcttccccctgacacctcacaactagcaaaaattgtctttgtctttggaaattatagagggatttgggtatccagattgtgcagatgcaaacttaggctgtcttgatgcaaacttagaaccacagaaatgcttttaaaatgcctgttttaagatggaattgttgtttttataatttgattttagtgctaaataaatgattggctttgtacatgaatatgttctgtacaagtgctctttcactagtactacagataatcaaagctatcagaattgtgtctttgatcatatttgacggtaatacacaaatccatgttttagca

SEQ ID NO: 189 - DNA, 28098 bp, Homo sapiens
  source 1..28098: mol_type = other DNA
agtgcgcctgcgcgcttgtggagctggtggcggcgctccgcaggggctcggctgttttccgcgcggcaggcgcggccatggcgcagctgggaaagctgctcaaggagcagaagtacgaccggcagctgaggtgagccgaggctcaccgagccgagggcgggccggcgggctttccagcattcgggccgggcctaagggcgcgggcggcgcggtcgggccttcctcaggccttcttccaggctgggccgggccgtgcggggcgcgggaagccggcgctcggagctcccgccctgggccaaaggtgctccgcgagggctgggaccccttcccccgccacgcggtgtgcagttcgggggacggggtccccagcgccagccgggtagctaaggcggctgccggccccgttgcgcccaggctcctcgttttccgaatggggaggcccggggcgcaccgcatcccggccgcgagggcggcacagagggttaggttttgttctcagccagcgctgtccaatggaaataaaatgctagtctcatgtgagccgcaaatgtaattataaattttctagtaaccacactaaaggtaaaatgaaacagatgaaattgatttttaaatacaatttaacccaatatgtccaaaacattactatttcaacacaatataaaaagttcttgagatattttacttaaatttttatttttatttttatttttgtttttgtagaaacgaggtttttgccacctttccccaagctggtcatgagtattttcctttttaaaactgtcttggaggaccggcacggtggctcacgcctgtaatcccagcactttgggaggccgaagcgggcggatcacctgaggtcaggagttcgagaccagcctgggcaacatggtgaaaccctgtttctatttaaaaattcagaaattagctgggcgtggtggtgcgcgcctgtaatcccagttactctggaggctgaggctggagaatcggttgaatccaggaggtgtaggtttcagggagccgagatcgtgccactgcactccagcctgggtgacagagcgagactccgtcaaaaaagcccccccaaaactatcgtataaatattgtattttacacttaccagcacatctcagttaacactagcctcattgcttgtgctcagtagtacatgtggctagcagctaccttaatggacagtgcaggcctaagccatcaggagggtccttgggtacttccccacccttgccttttctccttgcactacccattccttatttattgagcgtcttctgtgtcttgaggctgtggagataacaaagctgctcagctttcctccttcctggagcctctgagacaacagaagttatatgtccccaaggactggagcttctgtttgcgccaccagcctagtgctgtagtagaggctttaggcacttagttctgagagtacccttgaaagcaaccatttcctgtgctttacagttggagaaacagagtcttggagaagttaggtaatttgcccagagttccccatatctttgagccaggatgtaaactaaggctcttctggctttttcggaggtactcagttacatcctgcttccaagcttttcggagaagaaacagggtaacagtccttataaccaacttaggttttcttgtaaattcttggagttcttgtgtttctaatgcaggtataactgtacatgacagagctgagaagatagttgaggttactaagcaactctaacaaaagagggtttttgctgagggcattccatttaagtcccaaactttactttcatagtgagaactggttttgaagtgtcaaagggaagcagttagaagcaaaatgcagcagtcaataagcccctccttacttcacgttagttgggccagcaagatagtagagaggactgattcatttggcctattcttgaaacatgttacttagagacacaccaggattcttttttttttttttttcagggacaaggtctcactttgtgacccaggctagagtgcagtggctagagtgcagtggcaagaacactgctcactgcagcctcaacttcctgggctctaacgatcctcctgcctcagcctcttgagtagctgggactacaggcatgtgccaccatgcttagctaactgttttagagatgggggtttgcccaggctggtctcgtacctctgcactcaagtgatcctcctgcctcagcctcccaaagtgctaggattacaggcatgagccacagtgcctggcctcagtattctttttgttttatttttgaggtgggtctcagtatgttacccaggctggagtgcagtggctgttcgcaggtatgattattggcacaccacagccttgatctcctgggctggagtgatcctcctgcctcagtctcccaagcagctgggactacaggcacacacactatctcaccctgcttgagatgcaccagtatttttttttttttttttttgagacggagtctcactgtgttgcgcaggctggagtgcagtggcgcggtcttggctcactgcaatctccgcctcctgcgttcatgcgattctcatgcctcagcctccctagtagctgggattataggtgcgtgccactgtgcctggttaatttttgtatttttagtagagacggggtttcactatgttggccagcctggtctcaaactcctgacctcaggtgatctgcctgcctccgcctcccaaagtgctgggattacaggcgtgagccactgcgcccagccaagatgcaccagtattcttaaatttactctccaactatctaagcatccatcaaccatatatgtcaggtgtcttctacgtgccatactttgatggagaaaacaggcgtttacggtccatctggttcttctaggcgattcctccatacatttgacagctgtctgggcccttatggagcatacagtggagtggaaagatggatgctcagcaaacaaaaacaaatgaagccaggtacagtggcttgtgcctgtagtcccagcaactctagaggctgaggcgagagaaatgcttgaacccaggagttcaagaccagtctggataacatagtaagaccctgtatcaaaaacaaaaacaaaaaacaaggcagttgcttgacatgctctggaggacatactgactacataataaggggtaatctgctttaaatcaggtaacagggaaggcacattaatcactctattagaatgttcattgggtaatatactttaaagcactcctgtagaagttgatgtgaggcttttcagatgataattcagttttcttggtaaagcttttgcagaagtcacagtaataagccctatgtcgagatcttaaatgcatctaacttaacttaaatgcatctaatataattttttttttttttgagacggagtctcgctctgtcgcccaggctggagtgcagtggcgcaatctcggctcacttcaagctccgcctcctgggttcacgccattcttctgcctcagcctccgagtaggtgggactacaggcgcctgccaccacgcccagctaattttttgtattttttagtagagacagggtttcaccatgttagtcacgatggtctcgatctcctgacctcgtgatccgcctgccttggcctcccaaagtgttgggattacaggtgtgagccactgcacctggcacatctaacataatttaagaataaatgaaatagggctgggcacggtggctcacacctgtaatcccagcattttgggaggccaagtgagctgagatcatgccactacactccagcctgggtgacagagcaagactctgtctcaaaacaaaacaaagaataaatgaaatagaaaacagatgagggtttaaatccaaagacgctttttaaatgtttgtttgtttgttttgagacagagtgtcgctcttgtgcccaggctgataaggggctggaagaccaagtttctgtttctaatttgaccctctccctcttttcccctaaccattcaaggcatcaacctgagttctagattactgtataatcactatactaatatctgttcccgtcttacctgtattctgtggttatcatatcagtctatgcaaggaaagtttaaagatcaccattcaaataagaaagctgtattttcatgaaagttttaaaaacatcaaatttgtgtctgttttgtaggttgtggggtgatcatgggcaagaggctttagaatctgctcatgtttgcctaataaatgcaacagccacaggaactgaaattcttaaaaacttggtactaccaggtaacgtaggtttgtggttgtgttctaaatatacttctttaagtttatgacctagaactatgtattcctgactgactctgttttggctctcaggtattggttcgtttacaattattgatggaaatcaggtcagcggagaagatgctggaaacaagtatgttctattctcttcaaatatattcacgttaaggaaggcaaggcctgagtcttagcttcacctcctcagtcagggtgactcgactctcagtggaaatcatccttatgtttgggattatggtgaggaagtgagataatataggtaaagtgctagtacagcatctggcaaatagggcattaataaatgttacccatcattactgtctttattgttattaatacaaaggagtagtcgttattcctttattcatggaatatgggcacttcctaagctcttgtattgatccgtaggtgttagcatataattaacaataatgcctgttgtttgtgatgtcttttaggcttagtctaggggtatctctctttacagtgtcaacaaaaatgctgttttaaagatggcctgtatattattctttaaagattatatttagactttcagaacatgcccaaatttggatttaaagctcaccttttcagggacttgaagtctggtatctctcattgtgtttgtcagtaacaacaacagtgagtaaatataagggaaaccagcaattagttcatatttagttttgatgccttttctttggatcgtagtgccagtttctgccaggcacagcacagcttttttattgatatataccaagaagtcttgttatctttgcttacttggtgggttagagtagaaagtgataaaaataaggtttcttcttatggagccagtgagcttataccgaaaagtggcatcctgactctgatcagcagcctcatatctgggccttgagacatgtcaagggtatgtgtgggaggaagcctgaataaatctgttacagttacgtgcaaaaacaaatggttcaatacaccgagagtggtctgtggaacaccggttctagggaacgataagagctgttaaatgggccaatgggttccatagtgaaattagtttgggaaatggatcaaatgaagtaaaaatttctttaccataagattttagtatcacatgtattatgtgtattatgaatttccaagagggaaatatagtatatggtgtttcccaaactttttttttttttttttgagacggagtctttctctgtcgcccaggctggagtgccgtggtgcaatctcggctcactgcaagctctgcctcccaggttcacgccattctcctacctcagccttccgagtagctgggactacaggcgcccgccaccacgcccggctaattttttgtatttttaatagagacggggtttcactgtattagccaggatggtctcgatctcctgacttcgtgatccgcccacctcggcctcccaaagtgctgggattacaggcatgagccaccacacccgccggtgtttcccaaacgtttttagccaaggaacccttttctctcagaggatcttgtgaaattcacatgctgtggtacacaatttgggaaagaaacattgatttattagcctatctttctttataagttccatctgattttcttcctccaggaaggccattacagtctgtaatcacaatatagtttgttttatactgtgaatgaaatatgcatgctattacaaacaacttttcctttatagtcagtaagctttacttttttttcctttattctgttcactttagtttcttccttcaaagaagcagtatcggcaaggtaaacaattagagaatatagttggatgtgagcatctaatgatgcccctgtgttttgattgcttgaaaagctttgactttaaaaacgtgtattatttctctgagaaaaaagttaactaatttttgtaatcttgtaaatcttcatatgtttggtagtttaagaacttagaggtgtactgtctgtgtttatacattgcatcctgtattaaagctaaatcttgagtaatgttaatattcattctggttaacaaattttttttttttgagacggagtctcgctctgtcccccaggctggagtgcagtggcgcgatctcgactcactgcaagctccacctcccaggttcacgccgttctcctccctcagtcttccgagtagctgagactacaggcgcccaccaccacgcctggctaattttttgtatttttagtagagatgggatttcaccgtgttagccaggatggtctcgatctcctgaccttgtgatccacccgcttcagcctcccaaagtgctgagattacaggcatgagccaccacgcccagcctaaaaaatcttacaaaaccatgttagtcaacttagtgaaatgacttttagcttagtgattaaccactcttgtacaggattatagatgtgggtggttagagtgagtctgaacttgatccaggatatccctgcctgctacccagagttttttggtcatttgcctaatcaaaaaagtagagtacaagtaatgtcatttgagaactctggatgatgatggttttgctctgttttaagtaatattctgttgagtcttaaacactaggagaagcagaattggctgggagcagtggctcacgcctgtaatctcagcactttgggaggtcaaggcaggaggattgcttgagaccaggagttcaagaccagcctgggcaacatgtcaagaccctgtctctacaaaatatttttttaaaaaattagctgggcatggtagcacatgcctgtagtcccacctacttgggaggctgaggcaggaagattgcttaagcctaggagttcaaggctgcagtgagctatgatcaggccactatgctacaaactgggcaacagagcaaaagcctgtctctaaaaagaaaaaagaagggaaacagagttgtcatacttatgcatgaaatttggatagttttacagtatgtttgcctgttccataaattgggggattatattgtgaccaagttttttctaattcaagttaaatgctttgtttttaaaaagaaccgagctgaagctgccatggaattcttacaagaattaaatagcgatgtctctggaagttttgtggaagaggtatatatgtacacacattattatgtctgtgctgaaatacaattttttaaataattcaaagccccagaaatttagaattttgaatctttgtgtcatttatgattagttgaattggaattgttgcctcatttgttgtaaaatagcttaactgtctctgccatgtttaatatgattgtgaaattggttttttttgtttgtttttttctttgctgtcctgtttagagtccagaaaaccttctagacaatgatccctcatttttctgtaggtttactgttgtagttgcaactcagcttcctgaaaggtaaatttttatgttaatatgtttttattttaatcttattagatttgcattgttttattttctttgcacagtctatgatgatatggttttaaaaattgttaaattctatagaaactttaaatatgaaactttttttttttttttttttttgagcttgagctcaaattcctgagctcaagcaatgcaccctcctcggcctcccaaagtgttgggattacaggtgtgagccaacgtgcctggtcaagagtttcagatttatggctgggcacggtggctcatgcctgtaatcccagcactttgggaggccgaggcaggtggatcacgaggtcaggagattgagaccatcctggccaacatggtgaaatcccatctctactaaaaatacaaaaattagctgggcgtggtggctcacgcctatagtcccagctactcgggaagctgagacaagagaatcgcttgaatcagggaggtggaggttgcagtgagccaaagatcgtgccactacactccagcccttgtgacagagttagactctgtctcaaaaaaaaaaaataaataaataaataaataaataaaagaaattcttagaaatcttccagcattgaaaagatgaggaagagaaaaatactgaaacttttttttttattattattctttagacagagtcttgctctgttgctcaggctggagtgcagtggcacaatcttagctcactgcaacctctgcctcctgggttcaggtaactctcgtgcctcagtctcccaaatagctgggattataggcatgtgccaccgtgcccggctaatttttgtatttgtagtagagacggggtttcaccatgttggccaggctgatctcaaactcctggccccaagtcatctgcctgcctcagccacccaaagtcctgggattacagttgtggagccaccaagcctaaccttagatgtgaaacttttggaatatatttagagcagttaaaccgaacattgtttttttgttgttgttgtttttgttctttgtttgttttagtgattaaaaactagttagaattgattattgaaggctgggtgcagtgactcatgcctgtaattccagcagaaccaggctgagacaggttcagatcacttgagcacaggagtttaagaccacctgggcaacatggcaaaaccttgtgtctacaaaaactacaaaatttagccagatggtgtgcctgcttgtggtcccagctactcaggaggctgggatgggagaatcacttgagcctgggaggtcgaggctgcagtgagccatgatcatgccactgcactccagcctgggcaacagagaattggttattggaattgttaggggtgtatttgtgggttttatattttttctctatcatggaaatgtttagaattatctttctttaacgtttctccttaatatgacagactaaagtttcacatccctcttgtccaaagatgtactttctttgagactgcagcctgtggaaatgcttgcttttcagtgtgttcttgacctgcttatgtaaatgcagttatgtacctttgcatctattatttagtaagaaagttgctgtaagacattttcatgttttgcatgttttcatgtttggcatatttccatttgcttatgttcatattttgctttttttttttaaacagcacttcactacgcttagcagatgtcctctggaattcccagattcctcttttgatctgtaggacatatggactagttggttatatgaggatcattataaaagaacatccaggtaaaattgttgagcatatgggcttactattggttgctttagctataattttagaaacttgacaatttagaaagtcagttttaaattacaaagtaaatttgtagcagcacatctctagttgcagattcaaagtggcaatcagattcaataggctgcaatctactctttatgtagcattatagaaggatacaaagcatgatataccacaggcacagcttcttcatcttattaggagatccagcaactatgcaagtacccagcttcttttgccccctaacccacattgggcatgtatggctgtggagagctaaggaatgtggatcactctgacccatgaagttacaccacctttccccactccagtcttttttttgttttttaagacagagtttcgctcttgttgcccaggctggagtacaatggcacaatcttggctcactgcaacctccacctcccgggttcaactgattctcctgcctcagcctcccaagtatctgggattacaggcacccgccaccatgcccagctaatttttttttttttttttttgagacggagtctctctcttttgctcaggctggactgcagtggcgcgatcttggctcactgctacctccacctcccgggttcacgccattctcctgcctcagcctcccgagtagctgggactacaggcgcccgccaccgtgcccggctaattttttgtatttttagtagagatggggtttcaccatgttagccaggatggtctcaatctcctgacctcgtgatctgcccgccttggcctcccaaagtgctgggattacaggcgtgagccaccgcacccggccgcccagctaattttttgcatttttagtagagacaggatttcaccatgttggccaggctggtctcgaactcctgacctcaggtgatccacccgccttggcctcccaaggtgctgggattacaggtgtgagccactgcaccaggtccgtccaatcttttatttcattctcatgcaggctttaggttctctcaattcaggtgcaatttcacacaacaaagacatttacataactactgttcccaaggaaactgttgtaagagaccaaagtcgtttataggcagacctccatcagctgagggtttatataagccctttacttataaaattttaatcttagatgatcataaaattttcatccagtattcaaaacagtgctctttattgactcaagaaaacatttttactatgagccaagcactctgctaatgtggtgatagccattggcattggtagcatcactgaggagtaatatctgtgtgggcagttagggagtgcttgtcaggataagctctggctgctggtggtgagccatttaagagttgaaagtggtgtcaactgatgggagggaacaaaagagttgaaagtgggagagtgaccatgtaaacattttattttaaatgggtcactttgaagttgagtggaaagtaaatggatttaaaggggcaaagattggaggcagtgattgctgttagaaatttccagtggcctaagtaagagagagtgtgttctttttcctaatttagggaagagaagaagagagggtagataataatgaaggttcagcattactagttgtgtgcctgcctttataagaattatttcatttactctttccaaaacctttataaggtacagattgagtatccttaatccaaaaatccaaaatcagaaatgctccaaaatgcaaaactttttgagaactgacataatattcaaaggaaacactcattggaacatttcttacttcagatttttgggttagagagctcatctaatatgtatttgcaaatataccaaaaactcaacaaaatccaaaacacttatggtcccaagcattttggataagagagatatacaatctgtagatactttaatatctgctttttatagatgatgctgaggcaatgagagattaaattatttgcctaaggtcacatagttagcaagtgacagaactgggcctacctctaagcactcactgaaattatacactctcctgtcctctctcatgtggagagcagtgtacagagtgagattaggaagtggggagttactgatgttggggccaaggaagcaagaagtgaaggatgcccatcaggtttctggagaagaagtctaggtagatggtgatgctgtctattgaagaccacaagaggaggaaggataggttgttagttgctatctgtacctagggtttgtcaatgttgagcttttccagttagaacaaattgtgttctaaaggaatcttggttttacttttactaaaactttatagttgacttaagatttctgcattttactatatgtaaatcgtaccttaataaaacagtgaaaaaacctgtgggccctgtgtccatttaaaaattaaagatttcctaagtttctataattcaatgtattgtcatcagtattgccaaagaattaagtttatcttttgagctgggcacggtggctcacacctgtaatgcaaggactttgggaggccgaggcaggaggagcccttgaatccaggagtttgagactagcctgggtgacatagtgagaccctatccctacaaaaaaattagctgggcacagtgacacgagactgtagtcccaccttctcaggaggctgaggtgggaggatcccttcagcccaggagtttcagcagtgagctgtgattgtgccactgtacttcagcctgggtaatacagcaagaccccatctctctcttttttttttttaagtgttaaatttatccttttgaattctttgtttcacagtaatagaatctcatccagataatgcattagaggatctacgactagataagccatttcctgaactgagagaacattttcagtcctatgatttggatcatatggaaaaaaaggttggtagtgtgtgtgaccttacatttacagatagacttaaaacatttttttaacctaaggtttttgaattacactaaagtgagaaaatcctataaacttccatattcctgtcatcccgattacccaataacagtattttaccttgttttcaacatattaatttttctccaaaattaaaaaacttttttactgaagaaaagtacatatactgaacatctgtgtaatcactacccaggtcaagaaattggacattaacctattccaggtggggagatggggatggttaatgggtaccaaaaaaaaattagaaagaataaataagatttactccttgaaagcacaacaaggtgactatagttagtaataacaactcagttatacattttaaaataattaaaagagtttaattggattatttgtaacataaaggataaacgcttgaggggataaatgctatacagataccccattctccatgatgtgcttatttcacattgcatgcctgtatcaaagcatgtaccccataaatatatacacctaagtacccacaaaaattgaaagtaaaaaattttaaaacaaaaaacagaaataaaaaaattccaagaagttctctttatggactttttctaaacaaatagaaataatgacataacactataaggcgtatatgtattttttcccacttccatattaattaacatgcagttgcttatttggttcatcagaaaacagaaaagatcctcctttcttacttaggattggtgtctgaaattgagatttgagctgtgtttttgggtggcagtctctgagactgttttgctggtataatggggacaatcatagtatatatgtgacatactaggtatctgcctctagaaaaatttgtaaagcagtttttattaactcagttcattttcgtctattcactactctgcatatattaggagatcataaatattgttgaatttgttgaaaacgagatggtacagtgaagaattcataatactgatattttcttttatttgtctctcatttttaggaccacagtcatactccatggattgtgatcatagctaaatatttagcacagtggtatagtgaagtatgtccttttttaaaaaaaatttcatatgcaactgtattttcagtttcttacaaaggatttccttgatggggaatgggagattaattttttttccttatggagttgtatggtagggcaaatggatgcttttaaatttaaatctagcagttcctcttttgatcctgataattttaattaaaatgaaattcaataaatgtcattatgaaactggcagggggaatgaatgtagataaatggtcacagtgtctgttttctatcaagtgagcctctgatttcacagagaaatatatttgttgatgaaatcttatgtagagaatgggggacactttagactttcaatttctgtattttgaattttaataactagatttttaaaatttttaaccaatttagacaaatggacgaatacctaaaacgtataaagaaaaagaggacttcagagatttgattagacaaggtaatatgggatatgattaaatactgtataaagcttgaaaagcaaattgctagaggcaggtacttattggatttctgttaacacctttgtcagatgatagcatcatgagcttttattttccttctggagaagttaagaagccacgccttgtatagttttaaggactaatgataagccgtatttcttcttaagatttaatattctgcaggatctgacaaggttatttttataatgggggaacagaagagtgaaaagaaaagggctgtttgctaacaatttcccattacaataggaattctaaaaaatgaaaatggggctccagaagatgaagagaattttgaagaagctattaaaaatgtgaacacagcactaaatacaactcaggtaatgaaagagttgctgagggattcacatgaacaagatgttttctagagtccttggctattaaatggttgactataatgatttaagttaatattttctaaatgtatagttagaaataaatacagggccgggcatgctggctcatcccagcactttgggaggctgaggcgggtggatcacctgaggtcaggagttcgagaccagcctggccaacatagtgaaaccgcgtctctactaaaaatacaaaaattagctgggcatggtgaacatacctgtaatcccagctattcgggaggctgaggcaggagaatcacttgaacccaggaggcagaggttatagtgagccaagattacaccactgcactccagcctgggcaacagagtaagactccgcctcagatgcctttggttttgttatggcttagttgttgaggtctgaccattgaagtttttggggagctttggaataacacctggtagtttaagttagaattttcttgtaacttaaaacagcaaatatgctgcctttcaagttaggaaggcacgtaagatattattaccaactttttagagacaacaaggcagtgttgctgagtgattaaaagtgtgctggctggggccaggcgcggtggctcacacctgtaatcccaacacttttgggaggccgaggagggcagatcacatgaagtcaggagtccaagacgagcctggccaacatggtgaaaccccatctctattaaaaatacaaaaaattagctgggcatggtggtgggcacctgtaatcccagctgcttgggaggctgaggcaggagaaccgcttgaacctgggaggtggagattgcagtgagctgagatctcatcagtgtactccagcctgggcaacaagagcgagactctgtctcaaaaaaaaaaaaaaaagtgtttgctggccaggtgtggtggctcacacctgtaatcccaacactttgggaggccagggcagaaagattgcttgagcccagttcaagaccagcctggacaacgtagggagatcttgtctctacaaaaaatttaaaaattagatgggtgtggtggcatgcacctgtagtctcagctactctggagcctaaggtagtgggaggatcgcttgagcctgggaggttgaggctgcagtgagccatgattgtgccactgcactgcagcctgggcaatgatatgagaccctgtgtccaaaaaataaatgtgctttgtgaatcacttttctggggtgatgaacattttctgttttaattggggttatggttaaaaatatgtatatatagttatcaaaatgcattgaattggacatttgaaatctctgtatttcactgaatataaaaccacagttgaaaagaaaagattctaatagttggggggcagtaagctaaataaacagataaaaatgcaccaggtgctgtgaacaaaattacagcagaacaaagggtcagagagcatgctggggacaagggaatccggggttgagagacaattgtacatagggagccagggagactttccaaaagacatttaagcagaagcctgagtgaagtgacacgcagaggtctggtggaagagcttttcagttggagggagcacatgtgcaaaggcccagaagtgggatgaagcttgacttttgttcaagcatcagtaagcaagtcagtgtgattggagtgaagtgtaaaagggggaaaagtggtaggaaggatttgagtttggagaggcagaaagggccagatcataaaggccttgcaggctatttaagcatttcagtcagggaagtggattgagctgctttgtattctaaaagaccattctggctttcatgaggagaacacaattgaggggactgggagtggaagcagagagagcagttaggaggtcccactgagacatttcttttttccacccatcagtagaatccaagcctatgatttgtgtgtgtgtgtgtgtgtatttttttttttttttttgagacagggtctcacattggtgcccagggtagaatgcagtgacacaatcactgctcactgcagccttgacctcctgggctcaagtgatccccccacctcagcctcccaagtagctgggaccacaggcacgtgccaccacgcgcagctaatttacttttatgttttctatagacggggtcttcctgttttgttcaggttggtctcaaactcctgggctcaaatgaccctctcaccttggcctcctgaatgctgggattatagatatgagccattgtgctcagctttatactcttgattaacgtatgaagatcttgctagcaataaaattactttatggttttagtttttttcagagtggttgtctcaacggtcactaattagggtgcaagggtttcagatttttgacaagatggaaaatcatgatatactgcgagtctataatctgttttgtcttcagatgtaactatataaaataatttactggggccccttctttaccccatttatggtataagagaataggtattaaatggtagcaacagtgggccggagaggtctttcttccattctttccccatcaaatcttcatatggtactgattctaaataaaattataaaccaatcagaagtttgtatttgattacaatttgagaattcaaagaacatatctgaagaaatagcactgaaaataaagatgggcgaattcttaatactgtgtaagtaaatgtttcatgttcctttgttagatcccaagcagtattgaagatatatttaatgatgatcgctgcataaatatcaccaaacaggtaacaacaacaaaagtaaaaacattgctgctaaaactttgggtcaaagtaaaacgccacttaatgttaattttttcttattcttttagactccatcattttggattttagctcgtgccttaaaggaatttgtggccaaagagggtcaaggaaatttacctgttcgaggcacaattcctgatatgattgcagattcaggcaaatatataaaactgcaaaacgtgtatgtcactgttttcaaactatgtaatagaaaaagtctgattatattagagataaacattttatcatcctgtcagaaatcaaatgaaagtttattacaacctcattgcttataaataaactaggccagctgcagtggctcatgcctgtaatcccaacactttgggaggccaaggtgggagaattgcttgagtccaggagtttgagaccatcgtgggcaacatagtgagacttccatctctacaaattgaaaaattaggtgggcatggtagtgttcgcctttaatctcaactactcaggaggctgaggcagaaggatctcttgagctcaggagtttgaggctgcagtgagccatgatcatgccacttcacttcagcctgggtgacagagcaagaccctgtttcaaataaataagtaaaaataagctgaagaacttagaccaggctgggcgcagtggctcacacctgtaatcccagcgctttgggaggccgaggcaggcggatcacgaggtcaggagattgagaccatcctgactaacacggtgaaaccctgtctctactaaaaatacaaaaaaattagccgggcgtggtggcaggcgcctgtagtcccagctacccgggaggctgaggcaggagaatagcgtgaacccgggaggcggagcttgcagtgagcggagatcgcaccactgcactccagcctgggcgacagagtgagactctgtctcaaaaaaaaaaaaaaagaacttaggccgggcgtggtggctcacgcctgtaatcccaccacttcgggaggccgagacgggtggatcacaaggtcagaagatcaagaccatcctggccaacatggtgaaaccctgtctctactaaaaaaatacaaaaaattagccaggtgtggtggtgcgcacctgtagtcccagctattcgggaggctgaggcaggggaatcgcttgaacccaggagacggaggttgcagtgagccaagatcgtgccactgcactccagcctggagacagagcaagagtccgtctcaaaaaaaaaaaaaaaaaaaaaaagaacttagggggcaattcttgttaagctcaaagcaaaattgaatgggaaatacagaattaccacatacgcctaggaggcagagttttttttcatacttcatgataaacttaatatttgatcccttaactctgtgctatgaactatatgtattaagtaatttaacacacacacaaggttcacaacgaccttatgagagagagagagactgttaccggccccattttacacatgaagaaactaaggtattgaaaaggttacttatacaaggtcagatagctggtaaatggcagaaccaagatttgaaccccaggaaacccagtaccagagcctgtatgcttagctatggccctatactaccttgtatttgtaacttaaaaccatgaaggtttgatgaattttttatcttaatgtttcataagttatagtctatgactatagctagacatcttgctatccaggtatcactagcctgaacccagatagactatcacagggatgggtctcaatgaatatgaccctcgtatagttagggcatggtgcaaagaatccaggtctgctggctcggtttctttggggtccaagtaatgtcacacagagatgatctctcttccccagacagatttcactctttatcatgtcaccattgaacgaatcttggtttgttgtcctagcctaagagttcaactacttaaaacttggggaaggtcaattgaggatagaaagaagtatgaccttacatgggaggtagtcagcctgaacactgatgatttttagagggtgaaaggtaaatagacgtaaagaaaacttttatggccggatgcagtggctcacacctgtattcccagcactttgggaggccaaagcgggtggtgaaatgtgccacaagggatgttcacagttgttttaaatggttgaaattttacgttttccatggtctgtctcagtggtatagatacagataataattgggtaagggtttttttttcctctcataataaatacagagtattttaaaacaatcagaggtagagcatgtttatctatggcaatgctaaaaaggtatgaaggtcagttaattgaaaattgtcattaatacagtattttcagtttctaaatcacttgaacccaggagttcaagaccagcctgggcaacatggtgaaactccgtctctacaaaaaagacaaaaattagtcgggcatggtagcgtgtgcctgaattcccagctacttgggaagctgaggtgggaggatcagttgagcgtgggaagttgaggctgcagtgagccaggactgcgccactgtactccagcctgggtggcagagcgagatcctgtctcaaaaaacaaagaagttttacattggagatgaacagttttaatgtatttaactttccttggacttgacttccaggagataagtcatgttcttcagtaatgtattttttcaggtcctctgtcacagaagccgaaatcatagatccctctaggggagcagtttttaagttgggtgctgttagagggaccctgggttttagtgggcactgagagtccgtcactaacactggaaagattcccagctactcatggtgctgttgatagcatttccctggcattttcacatttcatacattgtcagacctgtgttttttcatgaaaaggaaagaaaatttttgttcatggtaacaatttaaattttgctaatttaaaaatttgttagtaattgctttttattcttttttagttaccgtgaaaaagcaaagaaagatgctgccgctgtgggtaatcatgttgccaaattgctgcagtccattggccaggtaagctactgggcacactgtgcccatacaggcctcagcacgtaactccagccagaaagggtttagagacagagggtgtggcactgcctctgtgcttctttagagggagctgtcatttccctgcctaatgggatagcttgtgataaggaaacaagatatttttaaagtgctctcccagctcttggagaaagccttcccatctcacagtgattggctttgtgccgcaccctttgttaatcttctcttttaaactggaacagaatctgtatttatctctttacaggcaccagagtccatttcagagaaagaattaaaattactctgtaagtccccttgaattaatttccttattttgcttgatagaaatgtgccacagggaatgttcccaggtattttgaatggttgaaattttaagttttccatggcctcagtgatatagatatagataattattgggtaaggttttttttttcctctcataatacaatacatggcgagtattttaagactgaatcagaggtagaacatgtttatctgtggcaatgctaaaaaggcttgacggtcagttaattgaaaattgccattaatacaggattttcagtttttaaattttaagtaatttaggaagtttttttgtctgaagactttgggtgtgaagtcttgagtcacatgtacattgacaatattggtttaaatactcattttgatctgtgttaaatgactgtaatggagttaagaattttgccatctagtttcggagtggttaggttcgtaggagtcttctcagtaactcctcagtaggccaaaagcattttcttttatttaagagtcagtttcaaaatacccaatctgttgtgcatgccatctgaagatttctccctgtagctactgctcctacgtcctgtggaagtttatattttgcatgctccccatccttaaaatagatttatccaagctttccattttatgacttctccacaatgtctgtttaggctcggttttaatgttttctgccactactaatcttgcaccttgtttgttctattagactaatcttgaattagcgtttgttgtattagattatataatactagatcacaagtttgatgctgggtatttgaacatttattattctgttctactttggggcgtttttgaaaatttcaataatacaaagcttaaagtcattacatatatcaagagtacaattcataaacctctctcctttaggactacttatccataataatgatgaaaactattatttttagagccatatcaggcattgtgctagagatgcactttatacagatgtcacatttaatctgtagaacaattctcaaaggtaaacagtatcatccccattttacacttgaaaactgaggttcagagaggccatcaccttacttgcttctgaactggttgtagtgccagggatataaatttaaggtgattcatgttctagtgctttctctgctattagaaccaaggagaaaacatttcttcacattctcatgtctgagaagggtatacacataattctctgttcttaaagtcacctgtgattcataatattcaccagtcacagtcattacttccagaatatctttcctctgttcaggcagcaattctgcatttcttcgagtggtaagatgtcgatccttagctgaagaatatggtttggatacaattaacaaggatgaaattagtaagtataatagccttctgattctgggttaattttaattaatttaaaagatataaatattttgtgtataatagtgttgagtatatggtgatgatattaaagataacgtaaacatattctaattttattctaagcttatctaggtaattataatttatatattatatgaaacttaatgtatgcataaagtcatatttaggtcactgagtccattgtgtgatatgtatgagttaaagtcagtatgttactacttcagtagagattgtgtgactccagttaatagtcctgaaactcaagtatatagtaaattcagcccttcattgtttgttacattgcaaattaaccaaattaaactgaaattttttttcctttcagtttctagcatggacaatccagataatgaaatagtgttgtacttaatgttacgggctgttgatagatttcataaacaacagggtagatatccaggtaagaatagcaattgaattaccagatataataagatcttcaataaaacatttaaattgaaagtgttctcagggtatttataatagtgttgcttgaatttcacattgtaaacagattacaccccaaacgttccccagtgaagaaccaccttttgttttttaagtttaactatttgcaaaatagtgttcgattctaaactattacagggggatgttggttgaatatgtatagaagaaaacttttttctgtcattttccatagtttgttactaagactcacactgagtttaatttagtggaataggaaagccacaagaaatatgctggccaggcatagtacggtggctcacgtctgtaatgccagcactttgggagactgattcaggcagattgcttgagcccaggagttggagaccagcgtgggcaacatggtggaaccccatctctactgaagatacaaaaaattagccagacatggtggtgtgcacttgtagactcagctactcgggaggatcacctgagcctgggaagttggggctacagtgagttgtgattgtgccactaaactccagcctgggtgactgtggtgagactgtctcaaaaaaaaaaaaaagtatgctactaatttctgaactcaataactctgaagatgtaggaatttctttgtttagttatctactttttatcttcagcaaatgtagtcattggagaattggcataatctcaaagatctgaggttgctcagaatatttttctttgggatgataattttaattgtgcaggattattgcatagcaacacattctaggggtatcataaaacctgctgctccatctgatacagtgtgtctccagagtttatagtcttttttttttttcttttgagacggagtctcgctctgtcgcccaggctggagtgcagtggcgtgatctcagctcactgcaacctccgcctcctgggtttaagcagttttcctgcctcagcctcccgagtagctgggactataggcgcccgccacctcgcccagctaatttttgtatttttagtagaaacagggtttctccgtgttggccaggctggtctcgaactcctgacctcaagtgatcctcctgtgttggcctcccaaagtgcagggattacacgcatgagccactgcgctgcccagagtttatagtcctaacaagcaagcttactagaagaaaaaaaaagaataaacaccaaatatgtattgctttatttgtattatttgattagtatttatttcagttatctgttgcataacaaaccacttcaaaacttagtggtttaaaacaataaatagtgtcgtgattttgtgggttgcctggtctcaggcagttctccttggggaggcatgcagttgcttgagcctgggggtggagtcattctgaaggcttgactgactgagttagacatgcaagaagacatttttactcatgtaactagcaccttagtcagaacagtgggaatagctggcggctggtcaggtatctcttcacgtggctagcttggacttccttttggcatgtcagttggcttctgcagttaacattccaaaaaacccaagtggaaggtacagggctttttatgacctagctttggaagtcatacagcatcacttatgagctaagtaacttaatctctctgtgctttagttttctcttctataaatggagataactatacatacttcataggactgttttgaggattcaatcaattaatatagatataaggtccttagaacagtgtccagcatctattaatgctcaataaatgtgacctattattggccaggcatggtggctcacacctgtaatcccagcactttgggaggccaaggcgggtggatcacttgaggccaggagttcgagaccagcctagccaacactgaaactaaaaatagaaaaaattagctgtgtgtggtggcgcactcctgtagtctcagtttcttgggaggctgaggcatgagaatcatttgaacccggcaggcagaggttgcggtgagccgagactgcaccactgcactccagcctaggtaacagcaagactctctctcaaaagaaaaaaaaaaagttacctattattaatagctttatgtcctcagtgtcatttatcatttagtcttttagaattggagaataacttttataaagggtataagtaggacattactttctcattcattaagttcttctatcaaataattattaagcactatgtgccagatgcttttctagacagtgaatatgatgcaattaataaagatttaattaaattcaaatttttactaggttttagttggtctctgattataggtttgtgatatgtgcaaatattggtctcatactttgttatttttgttcttcagtttcatacatattttgactagaacatctgaaactagattaaataaaggagttggccattaattttgaatcacatttattttaatgaaaactaacttttatttttaggagtatctaactatcaagttgaagaagatataggaaagttgaagtcttgtctcactggcttccttcaggaatatggtttatctgtaatggtgaaagatgattatgtccacgaattgtgagtattttttagggtatctaggagatgattccacacctgtcataaggctaatcaaaattcatgtctctgtggtctcctttagttgccgatatggagctgctgagccacataccattgctgcattcttggggggtgagttccatatatgagaagactcacctgttgttacatagtacagttactattttaatacaaagttttgtcgtctagctattttaattagggaggtcagtgaagcaggatgttatatttctttcttttttttttttttgagacgcagtctcactgttttgcccaggttggagtgtattgatgccatcatagctcgctgcaacctcaaactcctgggctcaagtgatctctcgcctccgcctcctgaatagctgggactacaggcatgtgccagtaagcctggctaatttttcaattttttgtagagacagggtcccactatgttgctcaggttaggatatttattcagttgcccctatactggtctccctgccttccatctctcccactgccatccaacttaaactccttaagagtcattaatccttctaaagcatagctctgattgtgtccttttactaaccctctgccccaccaatatacataacactctacaacagtcctccaagcaagtccaaggactttggcttgacgttaaaaaaccctgtgttttggttccactcggcctttccagccttggttttatcatattacttgctttccccccaggatgccctttgatttcctgctcctagatctttgctcctctgtgcctatttgccttaaaaatatgtttttctgcatgtccaaaacctatatgttcttcaagacccaactcaaaaatgacatgtctttcataaaagctccctttacttccctccctcactctacttcccccttgtcttagtcagtttgggctgctgtaacagaatatcatagacttataaacaataaaaatttgtcacagagttctggaggctagaagtctgggatcagggtgccagcatggtcaggtctggtgagcgcccatttcctggttcataggcagctctctcttctgtgttctcacatggtgaaaaaaaaaatggcaagagaagtctctggggtctcttcttagggcactaatcctattcatgaaggttctacgctcttgacctaatcacctaccaaaggccctatcctcatacaattacactgggggttaggatttcaacatatgaatttgagggggaaacgaaccattcagtccataacacccctcaaaaaaaattactgtcctgtgatctcctgtagactgagctattagcttgtggcattttccttctagatgttgaatgttttaaaggcagatttaggtctaattaatatttgaagtgttcaaaatgtaaatgcatcatacagacctaagaaaactattttctaagcaaatccaaattaaagcctgattcagaataatttattttaaactaaaaccaagtagtctcttgtgccaaagtagcaaaattttctgccaattcacagaaaagggcaaattattatttattcagatgcagtccagaatctaagaagaggtacagccagatggatggactggatgacttaactatagcagaaaaaagtataaattgaaggttttctttgtttttttttttttgttttttacttctgtgcattctgtaatcattttgcacagtgccattatatcccttcacttccttcaggttttattcaaatgctgtcttctctgcgatgccatccctgactctcctatttaaaatacaaaccccttctcttgtatttatatctcccttatttgctttttctccttagcacctatggtcagttgacatactacacattctatttatttgtaaataaattctctctctcttgctgctaaaaagtagcatgagggtaagtggatcttcttgtcttttttccttactgtatccctactgcctagaacagtatttggtgcacagtagtctcaaattctatccagtcggctgagcgcggtggctaatgcttgtaaggcctccgctttgggaggctgaggtgggcggatcacttgaggtcaggagttcaaaaccatcctggccaacatggtgaaactccatctctactaaaaatacaaaaaaattatccaggtgtggtggcaggcatctgtaatcccagctacttgggaggctgaggcaagagaatcacttgaacttgggaggaggaggttgcagtgagccgagatcacgccactgcactccagcctgggtgacagagtgagactctagtctaaaaaaaaaaaaaaattctatccagtccatgaatatttgggaaagaggaatcttcaggttatagaagatgcacaagtttttttcttagtagtttttttgttttgagtaaatatagcggtctggcgatatttaatatagatccttcctaaattacaaatgcattcagaacaaatatacctttctccttttttattataaaacagatacaaggtaaaattcaaatgcagcagtagggtgtcctttgagaatcttttatgcctgtgtgtatcctttaaagtttggtcaaccacactactgtttagatttcctttaataacaaaaagaattataggcttttatgttgatatgactcagtaagctaactgcatctgttttgggtcactttaaaacacctttgcttttgaaaaggaaaagtttctttacagaattgagtatgtaactcttgaagtttactctttcaaagatttgcttttctcctttttcctttcaggagctgctgctcaagaggtcatcaaaataatcaccaaacaatttgtaatttttaataatacttacatttacagtggcatgtcacaaacttcagcaactttccagttgtagagtaagcaagcaccttaagtagtgtgttaatgattgaaactgtaattgccttcgggttgtgctttagtctgtaaaattctaaaggagagctgctaaattgttttcttaataaacatttttctcatttgta

SEQ ID NO: 190 - DNA, 24400 bp, Homo sapiens
  source 1..24400: mol_type = other DNA
gaagggacagtcggccgcagaccgcgctgggttgccgctgccgctgccgccatcgtgccagcccctcgggtgagtgtcggggccagcacgccggggcgggggctgggccgcaggagccgctctctgggctgccgggaggctccgctgagagtccccgggcggcccctcccctcccccccccccggcggcccgaagccgcgcggggcccgggccatgtgtcgcgcgcggctccgcctcccgccggtcctgtgaggcggcggccgggggtaacgcacagagagccagccgggcgcctatctgggccgtaccgtgctggtggctggtgcaccggcctgcgccatggccaggcctttttctctagtcaggaccgtccggatggggccttagggccccgccccgtctagcctggcccggcctgcgcgagccccgcaagctctgcaggctggctagcgggcagaccccagccccacgtcctgctacccacctacgaaggatccggggatgggcagcgccacccggcccgctccagagtcagcatgggtaagggcgcccgcctgccgcagccggggcttgggcccctcaccctgttcccgaccatagcccggccggggtgtaggtgaacgccccctccttgtctgcccctcggaagtgtacgtttcttaccgcgccctttgtggagcccggactggagttctcgcagggagggcagggtcagggaatatgaggcgggaggggattccacgggagactttatccctgtcttgtcttagaggatctgggcctgatggggtgaggcggctcctgccgggtaggcccagcccacgcccttctctatcagtgaccaggccccagcagcaacacagaattgccccgcaggacaggatgacttcataagaatgggatgttaaggtgggacttaatgcacgggaagtagaattcaggcctgaggttcttgagcctagtgctaaaccagaacctgggctggaaggggctttggggggtggggcacgtagatttcagactttgtggggccctcccgaagcctgggtggcagaactagggctggaagctccagaaagtctggcttcccctcacttgcttgctcacttcccaacaactggagctgcctgtaaacaggcaggaacctggttgctttatgaaattgcccttactgatgccatcagagaccctactgagttctgggggaagagttatctttgaccaaaaaatactatcctgatatcctttgtaaaggcgcttctgattgagagatggtaaattaaggaaccagtccagagaagaccttgggactaggggagagatggcatgtaaagcgttgatttctctgagccgcagtctttccagagactaaagaagtagctcaggcctggcgcggtggctcacgcctgcaatcccagcactttgggaggccaaggccagcggatcacctgaggtccggggttccagactagcatggccaacatggcaaaagcgcatctctactaaaaatacaaaaattagctgaacgtggaggtgcacttctgtaatcctagctactcaggagactgaggcaggagaattgcttgaacccgggaggtggaggtcgcagtgaactgagatcatgccactgtactccagcctgggtgacagggcaagactctgtctccaaaataaaaaaagctgggtgtggtggcgtgcacctgtaatcccagctacttgggaggctgaggcaggagaatcgcttgaatccgggaggcagaggttgcagtgggcagagatcatgccactgcactccagcctgggcgacagagcaagactctgtctcaaaaaaaaagaaaaagaaaaaaaaaaaaagcagcagcagctcaatctctgcagctctggcctcaggagcaagcagaatatcaggtctcttagaagggctgattgagacccaaggtgaagaaagccactgaccctgcatatttttttcttcctccttgaatattttcccaggtaatgtttttctgttcatttctggtcacttcttccaagtactcttgacctagaagttttcttgcatatgaattgctctgcctagttattctccctggtcaggaagaataggcaagaatgctgctcagattttaccaagccctgccttctctctggatgtaactttcctagtccatatcctggcccatgaggacatggaaatcaggttcatccaagaggctcaggagaggccaactttgccagtggagctgggcaataaggagggactacccacaggacaatgaggtgaaatctagaactagaagcagttatttcaagaccctgtagattgtctgcgtgggtactttctaggacacagatttcaggtgagctggcttacggctatggcgtagtttgcgtatttcatggccctgggtgacttgaccaggagagtttttgtttttctctcgagacggagtctctctctgtcacccaggctggagtgctgtggtgcgatgtcggctcactgcaacctccgcctcctgggttcaaacgattctcctgcctcagcctccctggtagctgggactacaggcgcacgccaccatgcctggctaatttctgtatttttagtagagaaggggtttcaccatatttgtcaggctggtcaaactcctgacctcaggtggtctacctgccttggcctccccaaagtgctgggattacaggcatgagccactgatcccggcctaattttatttttatttttatctatttatttattttgagacggagtctcactctgtcacccaggctggagtgcagtggtgcgatctctgctcattgcaagctccgcctcccgggttcacagcattctcctgcctcagcctcccgagtagctgggactacaggcgcccaccaccacgcccagctaactttttgtatttttagtagagacggggtttcaccgtgttagccaggatggtctcgatctcctgacctcgtgatccgcccgtctcggcctcccaaagtgccgggattccaggcgtgagccaccacgtccggccttatttttattttttgcagtgatgtcatctccatatgttgcccaggctggtctcaaactcctgagttcaagcgatactcccacctcagcctcccaaagtgctgggattacagatgtgaacaattgcccagtgatcacaagggttttcttcagggacaaaaagatacttttccttctccaacgttactcaagagtaggaggaattcaggtccctccctctcattccaacctctagaagttccctgtaacttcttttttttttttttgagatggagtcgtactctgtctcacaggctggagtgcagtggcgcgatctcggctcactgcaagctccgcctcccgggttcacgccattctcctgcctcagcctcccgagtagctgggactataggcacccgccaccacgcccggctaattttttgtgtgtttttagtagagacagggtttcaccatgtcagccaggatggtctcgatctcctgacctcgtgatccacccgccttggcctcccaaagtgctgggattacaggcgtgagccaccgcgcctggccgttccctgtaacctctttgtctgaggtcagctagccattgctaggcatcctgatcctgagaattcgttaaatgtttctggaacttggcgggccatctaggtctcagatataagagaagtggcctgaggttctccaggatctatctgcatcctctattcatgtagggctgacttggaagtgggacctggcatgcggtggttgggatattgccgcacaaggatgaggcaggatacaagatgcctcagttctcaattagctcaaaattatgtcccttcgtgtataggagcctatctgcctatcactatttttttttgagacagagcctcgctctgttgcccaggctggagtgcagtggtgcaatctcagctcactgcaacctccgcctcctgggttcaagcaattctcctgcctcagccacccgagtagctgagattacaggtgcccaccaccacacccagctaatttttgtattcttagtagagatggggtttcaccatattggccaggctagtcttgaactcctgacctcaagtgacccactcgccttggctgcccaaagtgctaggattacaggtgtgagccaccgcacctggccgagcccatctcttctctctgagccatgtcttgttttattccgttgcctttggagttggtggtttgggaggggaataattacttaagagagacacagaataggcagggtgcggtggctcatgcctgtaatcccagcactttgggagggcgaggtgggcggatcacgaggttaggagttggagaccagcttggccaatatagtgaaactctgtttctattaaaaatacaaaaattagctgagcatggtggcaggtgcctgtaatcccagctacttgggaggctgaggcaggagaatcgcttgaaccagggaggcggacgttgcagtgagccaagattgtgccactgcactgcagcctggtgacagagtgagaccctgtctcaaaaaacaagggagaccagaattttgttttttttattattattatactttaagttctagggtacatgtgtacaacttgcagttttgttacatatgtatacataacgccatgttgatgtgctgcacccattaactcgtcatttacattaggtgtatctcctaatgctatccctccccgctacccccgccccaggacaggccccggtgtgtgatgtttccaccctggagacacagaattttcaaatttcagaacaagtctgggcgcagtggctcacgcctgtaatcccagcactttgggaggctgaggtgggtggattacttgaggtcaggagttcaaaaccagccttaccaacatggaaaaaccctgtctctactaaaaatatgaaaattagctgagcgtggtggtgcatgcctgtaatcccagctactcaggaggctgaggcaggagactcgcttgaacctgggaggcggagcttgcagtgagctgagactgtgccattgcgctccagcctgggcaacaacagcgaaactccatcttgaaaaaaaaaaattcataactagaagccaccttatatcaaaaattctaggattcagcaccagctctgaagctggagcattgcttgaggccaggagttcaaaactagccttgtcaacatagcaatacccatttctacaaaagaaaaataaaaaaatagccagtgtggttgtggtgttgtatacctgtagttccagctgctcaagaggctgcaggaggtcaaggaaccgtgagctatgatcatgccactgcactgtagcctggggacactctagcaagaccctgtctccaaaaaaaaggctaggtttcccttaacaaaacactattatctttttttctttttttttttttttcacccaggctggagtgaagtgtcactcttgcccaggctcaagtgcagtgtcgcagtctcggctcactgcaacccccgccctccgggttcaagcaattctcctgtgtcaaccttccgagtggctgggattatacccgcctgccggtataatccggctaattttaatatttctagtagagatggggttttgccatgttggccaggctggtctcaaactcctgacctcaggcgatccgcccacctcagcttcccaaagtgctgggattataagcttgagccaccatgcctggcctttttttctttattttatttctttatttttttattttttgagacagagtttcgctcttattgcccaggctggagtgcaatggcgtgatctcggctcactgcaacctctgcctcctgggttctagcgattctcttgcctcagcctccctagtagctgggattacaggcatgtgccaccacgcctggctaattttgtatttttagtagagatggggtttctccatgttggtcaggctggtctcgaactcccgacctcactcaggtgatccacccaccttggcctcccaaagtgctgggattacaggcatgagccaccgctcccggccctttttttctttctttttaaagtttttcttagggtacatcagcagcctttttattttattttattttattttaatgagataaggtctcactcttttaccaacagtgagaccctgtctttaaaataaattaaataaatagaaaccagccaggtatggtggtgggtgcctgtagtcccagctacttgggaggtgaggcaagaggatcacttcagcccagaagttcaagtctgcagtgagctgtgattgtggcactgctaaagtgcagttggtgccatctcaggtcactgcagccttgacctcctgggctcaagcagtcctcccacctcagcctcctgagtagctgggactacaggtgcgcaccatcacgcttggctaattattattattatttctgagacggagtctcactctgtctcccaggctggagtgcagtggcacgatctcggctcacagcatcctccaccttctgggttcaagagattctcctgccttagcctcccaagtagttgggactactggctcctgccaccatgcttggctaatttttgtatttttagtagagacagggtttcatcatattggccaggctggtctcgaactcctgactttgtgatctgcccactcagccttccaaagtgctgggattccaggcatgagccattgtgcctggccacacctgctaatttttatattctattttttagtttttgtggagacaaaagtctcactatcttgcccaggctggtcttgaactctgggctcaagcaatcctcctgcctcagcctcccaaagtcctgggattacagatgtgagccactgtgcccagccaagttttacaacttcttgtagagacgggatctcactgtgttgcccaggctggtctcagaactcttgagctcaggtgatcctcctgcctcaacctcccaagtactgggattatagggaacagccaccacgcctggcctgttgtgcatggccttctttttgagatggagtttcgctctgtcacctaggctagagtgcagtagcatgatctcagctcactacagcctctgccttccaggttcaagcaattctcctgcctcagcctctcaagtagctgggactacaggcacgcgccaccacgcccagctaaattttgtatttttagtaaagatggggtttcaccatgttggttaggatgatcttgatctcttgaactcttggtctgcccgccttggcctcccaaaatgctgggattacaggcgtgagccactgcttgcctggcctgtgcgaggccttctagtcccctgcttggagcatgggtttgtggcttctcctcctttcactgagaccctcctatggtcactttaagtgcccaatagttgttcctgtggtggtacccatcagggcatcttcccaggcaccagacaggaattctccacagaggtgggaggttcagcagacctggtcagggaggctccttggatgttccttcaacagatggcccttgcctgggggcttacagagggaaacaggagacagcagggactttggaaataccaatagcgcttgttttagaatccaattcagaccattttcgttgaggcctccaggacagaggaatagtccttttggggcaaggggagtgaatcctaaaagttttccacagaatagacattgaaagttgggcatgatttcttggccgggcacagaggctcacacctgtaatcccagcactttgggaggccaaggtgggtggatcatctgaggtcaggagtttgagaccaacctggccaatatggcaaaaccccgtctctaccaagattccaaaaaattagcagggcatggtggcaggtacctgtaatcccagctacacgggaggcaagagaattgcttgaacctgggaggcggaggttgcggtgagccaagatcgcgccactgcactccagcctgggcgacaaagggagatctctgtctttaaaaaaaaaagttgggcaggatttctttaagctgaggttgagccgaaccttgtgctgggtgctggtttgtttttttttttaattaatgttttgatagggcatttgagaatgatgtttgtgtgtttgcagttcagtttgagttggctacccctttcctggctttgtgattctgtgattctctcttcctttgatcatatatggcaggaattcttgagtccctccctcggggagccagcagtgtatggattatccttggagtgacttaggtcatgtgatattattcaccctctttttcctcaccctatcagctggagtgtgccctcctgggcagaatgctttgcttgggtctgggtttggctgggaacgtgtcttagtggccaagggagagggacacgaggcccagggtggcctgcctaggggccacagggctcctactgctggctgaccagtggccaagaacttcttttcattgtctggggcgttactcatttgttgctgtacctgctgtgtgccagctccttaagcccccaggctggagacagggctgctatggggatagggaacccttattagagaggggtttctggggtacctgggaactgagggctgtttgtcccagtgtcctcagtaaactgggggaattttggaatgtttgtttcttaaagtctcgaatgattccatcagagccagtgggtctcccgagggcagaaactggaaagcttgctgccccaggaaagagctctgtgtggagatactggttccacttgcaggtggtttcaggactaggagaatgcaaattctcagttgtcctaaggtgtaaagctgctttgacctgctgagtaggtgctcaggttcttccattctgaggctccatggagcttgctgatttcataggggaagacaaggcctgggctgcattccttgccacccgatttttttttggcgggggggggggatgggggaaatgagaataactttatttcattgcggggagtgggcagatgtccagcctcagaacttctggaactgcttcttggtgccagcggccttggtgaccttgagcacgttgaagcgtactgtcttgctcaggggccggcactcacccactgttacgatgtggccaatctggacgtccctgaagaaggtggacaggtgtatggacatgttcttgtaacacctgattttgtcacttaggtgctttctgctactccacattggctctcagctgtttgcatctcggccagtttttttttgttgttgttgttttttgagacagtctcgctctgtcgcctaggctggagtgccgtggtgtgatctcagctcactgcaacctccacctcccaggttcaagcaattctctgcctcagcctcctgagtagctgggattacaggcacccaccaccacgcctggcaaatttttatatttttaatagagacagggtttcaccatcttggccaggctggtcttgaattcctgacttcatgatccacctgcctcggcctcccaaagtgctgggattacaggcgtgagccaccatccctggcccagtttttttttttttttgcttttgttttcctttttgagtcggagttttgctctcgttgcccaggctggagtgcagtggcgtgatcctggctcactgcaacctctgcctcctgggttcaagcaattatcctgcctcagcatgcggagtagctgggattacaggcgcctgccaccacacatggccaattttttgtattttttatagggatggggtttcatcatgttggccaggctggtctcaaactcctgaccttaggtgatctacttgccttggcctcccaaagtgctgggtttacaggcatgagccactgtgcccggccccatctcggccagttttgtggacattctaatgctggctatgccagtggccttttgtggtcttaaattctttcttaacctcttggagtctttgtttccttgtctataaagtgaagataatcataccagcttcacagggcttgttgtgagactcaagtgagagaatacagaagtgtttgactcacaggaggtgttccctccaccactctgtggacgccatggtcatccctttattccctgctcttctcagtctcagcgtgtcacaacagtgttggccaggccacaggagtggtcacttaggggtctcaagccccattaggggagccaagtccatgtttacctgacaatcaagttcatggcctgaggctcagttcacagatgggagctgtgtagaaggaatggggccccagaggtcttctcagtcactggggaaagggaggttacatagggagtgagtgcagagcagagaccagaatgcaggtctcgggattcagctgggccagtcagggaagcccagtggctctagaaccctccctgcaggcagaagaggaggaaggggcccttagggtgctgtgggcacctagacctcaggtgacagccccaggaaaggattctgtcttggccagccatctgggctgattgcactccatccttcagccaggggagtggcgggccaggcagtttccattcctgattctaggccatctccatggtgtgggcgagatacctaccttcttcctagctgttgacctagtattcacctaggaacccatactgactccttacagctgggtcctgctccataccccattcattacctcctaacatcctacaattactaatgatgggacagagtcaaagggtcaaataacaagggagaagtggagcaggctagaggccaggtctttgagggtgtggctgtgcctgctgtttagccacagctgtctctcactaggaccttgggaatgagagagtattggggccaagccccaattgccacatgccatagacagatagctgggtggacaacaaataattgtttcctcacagcttggacagaaggtgtgggtggaggggaagtgggtcagtaggccacttgagtggagtttgcccagaacttactcctcctccagagaagaagggctggcctctcagcccaggctctgacacactcatgcacttagtcaacaaatagtttgtttgagggctgggccaggtaccatgggaacagggatgactaggggtgctttgtcagggagatagaccgtaaacaaataccaaactgtgacaatgtcatgcagtgataagtgctaagaaaacaatacaggaggcaaaatgggtaatcagacagctactttattatttatttattttaattgagaccgaatctcactctgtcgcccaggctggagtgcaatggcatgatctcggctcactacaatatttgcctccctggttcaagtgattctaccacctcagcctcccgagtagctgggactataggcgcatgccaccatttctggctagtttttgtatttttagtagagacggggtttcaccatgttggccaggctggtttcaaactcctgacctcaagtgatctgcctgctcagcctcccaaagtgctgggattacaggcgtgagccactgtacctggccactagacagcaactttagactaaggggtcagggaaggtgtgaatgaggaggtgacattcgagctggcacatatgtgacacacgaagatctaggaagtagagtggtccagatagaaggagcagcagttacaaagccctgcgatgagaacagactcagcatgttccagatagaggaaattgcctggtgcaactgtagaggaggggagggagtggcaagagatgaggttggacagccaggagggccaggtcacctaggacaggataagtggttgagactttgttccaggtgccatgggacagaatacatagtagcacccctcctcagaccataaaatcgggggacttccagaaggactgacacccagcagtgtcttcctgtctggttgctgctgctctgccttcaggacacttttttttttttttttgagacaagatctcactgtgttgcccagtctggacctccctggctcaagccatcctcctacctcagcctcccgagtaactggggctacaggcatattccactatgtccagcttttttttttttcctgtagacatgaggtctcactatgttgtccaggctggtcttgaactgctgggcttaagcagtcctcctgccttggactcccaaagtgtccgagggattacagtcatgattacaggtgtgagccaccacacccgcaagacgctttttacactctggctccgagggtttgtttttgtttgtttgttgagatggagtctcactctgttgcccaggctggagtgcagtggggtgttctcagcacactgcaacctccacctctcaggttcaagcagttctcctgccttagcctcccaagtagccgggattacaggtgcatgccaccacacccagctgatgatttttttttttttttttgaggtggaattttgctcttgttgcccaggctagagtgcaatggcacaatctcggttcaccgcaacctctgcctcccgggttcaagcgattctcctgcctcaacctcctgagtagctgggattacagggaaaaattagctgccaccatgcccagctaattttttgtatttttagtagagacgggatttctctatgttggccaggcttgtctggaactctcgacctcaggtgatccacccgcctcagcctcccaaagtcctgggattagaggcgtgagccaccgcgcctgacctgatttttgtatttttagtagagatggggtttcaccatgttgtgcccaggctggtctggaactcctgacctcaggtgatccacccgccttggcctcccaaaatgttgaaattacaggcgtgagccactgcgccaggcctttttttttttttttttttttttttttggagatggagcctcactctgtcacccaggctagaatgccgtgggtcgttcttagctcactgcagcctccacctctcgggttcaagcaattctgcctcagcctcccgggtagctgggattacaggtgtacaccaccatggccagatattttattatttttttttttctttttttttgagatggagtctggctgtgttgcccaggctggagtgcagtggtgcaatctccactcactgcaagctccgcctcctgggttcacgccattctgctgcctcagcctcccaagtagctgggactacaggtgtctgccaccacgcccagctaattttttgtatttttagtagagacggggtttcaccatgttagccaggatggtcttgatctcctgaccctgtgatccgcccaccttggcctcccaaagtgctggaattacaggtgtgagccatcatgcccagcctttttgtttgttctgaggcagagtcttgccctgtcactcagggtggattgcagtggtaagttcacagctcactgtagcctggacctcccaggctcaggtgatcttcccacctcagcctcctgagtagctgagactaaaggagtgaaccaccatgcccggctaatttttaaaattttttgtagatatggggctttgttgctgaggctggtctggaactcctggactcaagtgatcctcctgcgtgggcctcccaaagtgctgagattacagatgtgagctactatgcccagccttgggcctgaggggtttaagccatgttggctatcagtttccctgttggaggagtcctttccaggctgtgcctcaaggctgtgtttttggcctccgtgatagcatgtgtggaggatagccacgactggtaccaattttggggccctcactgtaggccatgcaaatctgctggcattccctgtgggcttcagcagacacatgagaatctttctgtgtgccagtctggaaggagtgatagcgtcttctcgatcactctcctgcctcaggctaggatctctgtctgctctgtctgctttgctgagatggtagaacagggttgtgacctcgaaggtttgagaaagctgacatcatcctccatgaaaactcctgttgtttggactctaggtttgatgtggaactcttctgcctgaggcctttgtttggaggtggaagccctggttcaggactgccttgcccctttctgagagagccaggctcagaggagtgctctcactgatgtagtctgttcttgtctccaggcccacgttgtcactagaagtcctgactctggagaggcctccaaatctggtcagtccaattccaccacctatcagctgctgacctagagcgagttggagttggctaacctcgctgaatctccttttggtcatctctaacaagggggttgactcacagggtgtggttacaaacaagtgcacataagctctttgcacatttctgtgcctcatatgcattagtgaaaatgaagtgttcacagccagacagttattttgagttttgttcttggaaacacttaaaattggaagataaaaatggagtttttctgttgtctaacgggatctcctgggtcagaggttttaacctgggatctatggctgaacagttgaaaattattcacaaggctggggcatctctacctctgtgcaaatgtgttgggagagggccacagttgctgagacattcttggagggtctttgcactcacagagacctaagggtcagtgaaggctggtgttcagtgggtgagaggtcatcagagtcttttctgctcctcaaggagcctggcctcagcctgcggactgttggggtgaagcaggagatggtgtggtcagcggccctctcacaagagctgtaggagaagctgtcatgatggtcagtccccagtctaatgtgaggctgcctctgagcccgggcttttttgtttccagcctgttacttgcacagtaaatgtgttagaaacaagatcagagcttgctggctattctggggaacatcttccagcctggcctggacccctccctcatgttgcatggggataggatgggggctctgcactcttgcttctttttttggactcaagagtgttgcctcccgtgggaagggtggggatcgcaggaggggactttcctgtgtacaaaacatggtgagcaggctctcggtaggttctgttgtgtctgtatgtagctggatcgaggtaggagggaatggcttagggagatggggatgagggtggatggccacctgtggagcttagggagtttggcctttaagccaaaagcaagggtgtttgtaggggaggagcatggtcagctttgtggtttagagctcagggatgcagagttagcagaaaaaagagacgggccttgaccagaggacccagtgtcagcactgatgtaccaggtgagcttagggcaagacccagcgacatcactggatgacagtggattctgactatgtggctgttgtgatcactacttggaaataaacacaagacagtgaagcaggcctcaatcccacatagttttgaaggttccttgtcattttctgggagcccctgatgtgtcctattcctcagagagcttactcttccccactcttctctgccctaccaggccaaagggtctttctcttcctttatccctccaccccatttccttccaccaccacttcagtcaaggagtttttgtatcagaaagttatcacaggccagttatggtggtgcacgcctgtaatcccagcactttgggaggccaagctgggtggatcacttgagctcaggagtttgagaccagcctgagcaatatggtgaagcctggtctctacagaaaacacaaaaagcagccagacgtggtggtgcttgcctggagtctcagctccttgggaggttgaagtgggaggattgcttgagtcctggaggtcaaggctacagggagatgagatggcatcactgtaccctgacctgggggacagagcgagacccttttcatgccccgggacatttgctggtgctgtttcttctggttggcataccctttctgaggactgcccaactttgctctgagccaagggtagaaggagatgtggcccttatccattcctccagcttttcccctaccctcagagctcttaggcagtgggtatggcaccttggaagctgcagcagggtcagggcacattgagtgactaagcatagcaagtaccaggtggacggggcagaaatgccagaggtgggagctgtgctctgccttaggtcctctaagtttgtgtgtgagtacagccagtgtctgacctcttggaaatgtgaccaagaccacagtgaagactagatgatggtcctgtgctttccccacttgttgatttctttcttggcagagtatgaactaggacacaccttgtgttcctgtgtggcaggcgtgactggatccaagctttctcccctgcttgctttagattttcctggacatttcttagtcatcccagcactgagcttctatttttagtgccactacctcctaggggacctaaaataaagctggcttagcttcctgctccctcattggcttgagtgttggtcacagagcggaggattggctgcgttctcactctttccctacacgattcctccccgctggctcctctggctttgggcgaggtcacacggactggagtgagctagcacttaccatgttgagctgagggctttatcatgttcctttagagaagcttcacaaccaccggcactgtcaggttgccatccccatcttatagtggaggaggctgaggccctaagaagggcagtgacttgcatcagatcccaccactgcgaatgcttgtctgctggggtggaacccacctcctcactgctttggttcagagtcctattatcaggacagagggagtgggctcctctacagttggggccatccacagaaaaacatgtgggtctgcagtcaggggatctgcagcaagatgtgggcttccctacttggaagcagcctagcaaagcccaagcggctctcccatctggggcttgggttttccatccagtatccttacagccatggtctctagttgggagggggcctcctctcagagacccgagagagacagctccttagggtaaaagcaatgctgggatgaggggatatgaagggatgacacgtttcccttcacagcctccatcccctcttcccacaaccctcagctttccctctgatccttgaactcatgtccccagctctgaagtgggtaggagtcactcccatcaatgaagaaatatcctagaaagggccaggtcaggtaatcacctggcctcggggaagtaaactgcccccatgagactaagggatcacttgctgtttttggcagaggagggcccttggctgggtacagtggctcacgcctgtaaccccagaactttgggaggccaaggcgggtggatcacttgcagtctggagttcgagaccagcctggccaacatggtgaaatcccatttctactaaaaatacaaattagctgggtgtgttggcaggcgcctgtaatcccagctactctggaggctgaggcaagagaatcacttgagcccagggagcggaggttgcagtgagccaagatcacgccattgcactccagcctgggcaacaagagtgaaactctgtctcaaaaaaaaaaaaaaaaaaaaaaaagaagaggggccttgagaatctccccacatcctcactgggtcttccatctgtcagcgtagccctgggacagtgttgggggcctgagggctgtagtacaaaatagtacacacacacaggtatcagttgttcttggctgtaaagtgggaagaatagcaataactctgtccttgcaggttgttgagaggattacatggaaagatactggaggagtgcttaactcctcccataaggcccctccccttactgggctttcaagggcctgctctgacctttctttgttgtagatctacccttagcacccctcctgtgtgctccacgaccctatcatctatgtgtctcatcaaccaagaactcaaaggagaggctgggtctgatctacctctgggctcctagcactggtctggcttgggaggggtctcctgccagttccccagggcctgtccgtgttctctgagagaacagatctcagcaaaggactccaggaaggccagtgaggggtgggggtcagtggctggtcacctactctcatggtaccaatgcttccctcctggtctcattggtcttgcaggtctccgtgaggccgggtgacgctccagaatgggagacaagccaatttgggagcagattggatccagcttcattcaacattactaccagttatttgataatgatagaacccaactaggcgcaatttacgtaagtttccagctctagggccagaatggaccctaggggatcaatttggatgttgggccagtgtgtccagttcacaagttctggcagccctatctggactggctacacctctgtatctgaacttttgtccacgggacaggggtctgacgcttggcccaagtaattacctggtctatacttttccttttgtcaacttccacaagagtgagaatcctgctgttctgggcttgccattccatgtggccagcatttgtcatggcacatggttttggattgggcagcaacaggcagaggttagggctcatggtgccctctggaggcagcagccatgagcatcctcagtgcaaagctgagctctcttggaggcctggggtccagcttccttttggatccaaggctcctgaatgctcatggaaaacaaatgaggttagcccagggaggctgataggtcatttcacaaacccttctatgcaggcattgctggctgctcttttttttttttttttttgagatggagtcttgctctttcgccaggctggagtgcaatggctcgatctcagctcactgcaagctccgcctcctgggttcaagtgattctcctgcctcagcctcccgagtagctgggattacaggcgcctgcccccatggccagttaattttttgtatttttagtagagatggggtttcaccatgttggccaggctggtctcgaactcctgacctcgtgatcctcccaccttggccttccaacgtgctgggattacaggcgtgagccactgcgcccggcatttgctgctcttttaacgatgttcatatacaccaagaactaattgtacttgactctgcctgagagtcagtcacaaaaatgtgattgatcaggcaggtgagcccaggatgggggtgttaggagtaatccaggcacagtctcagagcctgattgggctgactctccacagtcttctgtgtctgtctccagaaagtcagtgtccattcagaaattttggaaaaaataatgaaattttattagtggaagaccaattccagcacagatatttgattgtcattatcatagtagagttttttttttttttttttgagacagagtctcactctgtcaacaaagctggtgtgcagtggggtgatctcagctcactgcaacttctgcctcctgggttcaagcgattcttgtgcctagcctcaggagtagctgaggctacaggcatgcaccaccaagcctaattttttttttttcttgagatgcagtctcactctgtcgcccaggctggagtgcagtggtgcaatcttggctcactgcaatgtccatctcctgggttcaagctattctcccatctcagcctcccaagtatctgggactacaggcacgtgttgccatgcccggctaatttttgtattttttagtagagatgggatttcaccatgttggccaggctgttcttgaactcctgacctcaggtgatttgcctgcctcagcttcccaaagtgctgggattacaggcataagccaccgcgcccggctacacctaatttttgtatttttagtggaggtgacatttcaccatgttggctaggctagtctccaactcctgacctcaggtgatctgcctgccttggcttcccaaagtgctgggattacaggtgtgagttaccatgcccagcatagagtttttgaaaccttgaagtgatctgacctgagatcctggcacttgtgcctcattatcactctccctttttttttttttgagatggagtctcactctgtcacctagactggagtgcattcatgcgattttggctcactgcatcctctgcctcccaggttcaagcaattctcatgcctcagcctcccaagtagctggggttacaggcacgcaccaccatgcccagctaatttttgtatttttaggagagacggggtttcaccatgttggccaggctggtctggaacacctgacttcaagtgatctacccaccttggcctcccaaagtgctgggattacaggtgtgagccactgcacctggcctcattatctcttaaagcaggcctgagccagagaagagagttagcaaggtcctaaaagaacaatttatatttattatttcataatactcagcacattacccctttgaaggttaggaaactaagactcagagaaataacttacttaatgtcacagctagtaagcagcagaagcccttttgagttctgcccttgaaggctgtggaagggaagatttgaggtggaactaagctaagtgggttacatttgagattttgcttcttggtggtagggagggtcccagactaggccttggaaggccctgtcagcctctatctctccctgaccccatgggtatccagaaggctagctagaaagtccacagtggaacttagcctcggccctggagggtgatgaatgtggaatttttccaagttatttctgatgactttttttttgagatggagtcttgctctgtcacccaggctggagtgcagtggtgcgatttcggctcgctacaaaccgccgcctcctgggttcaagcaattctcctgcctcagcctcctaagtagctgggattacaggcgtgcgccaccatgcctggataatttttgcatttttagtagagttggggtttcaccatgttggtcaggctggtctcgatgtcctgacctcgtgatcttcccgccttggcttcccaaagttctgggattacaggcgtgagccaccgtgcctggccacatttctgatgaccttttgggactgacactgactgaccacacagcaggatggctgagctcaggccaatatagccctcctgggcctatgcatatcagagaccatatgacttcttaaatacaaatgggaagtatattttattaaatagtctttcaaagcctgggcccagggtcaatggggtagaagatgttgatagtgtaatgtttgggggctatactcagtctccttctttagacagggaaactgaagtgtggccacacttctccaagcaaggcccttttcagagtctttccagggccttagagatacttgtactctgaggccccaaccctggggtttcctgtgcctttttcagattgacgcgtcatgccttacgtgggaaggacaacagttccaggggaaagctgccattgtggagaagttgtctgtaagtagggaagaaagccagggtgcaggtggctcctttcccaccccttctggccttggttctcccacctcccactctctctcttgtagagccttccgttccagaaaattcagcacagcatcaccgcgcaggaccatcagcccactccagatagctgcatcatcagcatggttgtgggccagcttaaggtaatggtactgccacagtggtagggaggggtgggcaggcagaggagagtcttgtacccctgctttccctgtggatgtgacctgcttatctagggacacccagacaaagtgactgtctagagctgcgtagttcagtatgctagccattagccacatgtaggtggcaatttttaagttatattaattaagattaaataaaatgtacttcttcggttgtactagccatatagaacatttttgtgactgtagaaagtcctattggcagacactggtctagagcctttatctggaaaagggagaagtataggagtaggatgggactggggtgccaagccactaggctcccactctgccctaaggtcaaggtggacaggctagctgggtgcggagaggcagtccactcctgcagcccttgctaccactcctcaggctggctgctggctccttgcctgctgagcaaagcagattcctggaactcctatttctttttttttttttttttgagacggagtctcactcttgttgcttaggctggaatgcagtggcacaatctcagctcactacacttctgccttccgagttcaagcaattctccagcctcagcttcccaagtagctgggattacagctgcccgccaccacacccagataattttttgtatttttagtagagacagggtttcactatgttggccaggctggtcttgaactcctgacctcaggtgatccacctgcctcggcctcccaaagtgctgggattataggcgtgagccacctatttctctttgcattttccttcctccttctcaagacctattattctcagagacttcctgtggtccctcagaccccccaagaactctccaaggacctgttgtgcttcagcatattaaagtcagattctgggctgggcgcggtggctcacgcctgtaatcccagcactttgggaggccgaggcaggcagattacctgaggtcaggagtttgagaccagcctgaccaacatggagaaaccctgtctctactaaaaatacaaaattagccaggcatggtggcacatgcctgtaatcccatctacacgggaggctgcggcaggagaatcgcttgaacctgggaggcagaggttgcggtgagctgagattgcaccattgcactctagcctgggcaacaagagtgaaactctgtctctaaataaataaataaagccagattctgtttacaaaaacacccttcttcccaaaaatagcaggacaaattggctgcccctcggcctgggcttgtgtcttacaataacatggtcacatgctctctttctctaggctagccgggacagggcttcctgagtccagagtgggtgtgtaggtggtcctgtgggcctctgcagtggacgcagaggcacctgctttctggcctggactttcctgtcagtttctcctgcctgttcaggatgtcctgctcagtgcctgtgcctgaagaggcacagaattcaggaggtctctgtagggagctcattgttcactttctcaggcaaaggtagtaaacactgctgcttcccaccggcttcaggttcttcctggtgattctgtccaatttggagctcccaaacaactgatttgcctccttgatgacgataattcccagaaagcaggtgatgttagagacagtgctggttagctaggctcctatttcaactaggtctcatcctagttttctgcagtttggctgcaggtttcttgcccttttttttcatctcaaatactgtttattacatgacaggaaacatcattggatagtgaacctatgttttcaagattgtttgcagtttttttgatactctataagttacttggtaaatactatgggattcgtttcaaaattgtgatcacttgtgtctggagatatgtgcttggaggcaggtacatcctctgctcttttgctgtagctaagggtgaattattgtgcagtttaagcacacatagcacacataggcgtggctgattgttggcctacatgtgcccagggcattgtttcatacattacatcaattcacattcacaagtaccccttggctacactgggatttgagttcaggacagtagggcctgatcctaaagtcaacatttttttgccctcttctcctaccactgaattcccttcctgtttcttgatccccttactgaatcctcttttctctcctcataggcggatgaagaccccatcatggggttccaccagatgttcctattaaagaacatcaacgatgcttgggtttgcaccaatgacatgttcaggctcgccctgcacaactttggctgacctcctctcagctaggcactcacgctgtttcctcctccctcctcttcccaatactattcccactcctccagatgctccaaatatcatgcacaaatgagcagggccgcggtgggagtgggcgcagtgcgctgctgccactgaggtgttgtgcatgatgtttggatgctagactagttgcatctgacgggagaagtttgtgttgtaccagcgcatgccttggaaagacttaagtaatgcaaaaggttgtccttttttttttttttttttttttaatctactgacaagttgctctagtaacccaaagaagtgaaggagaaagcagctgcctcaccgcccagacattgatttgttcagatgtttcaatgcctcatgatacaataaaaccacaaaaattttcttaaca

SEQ ID NO: 191 - DNA, 22062 bp, Homo sapiens
  source 1..22062: mol_type = other DNA
atgtgcggtgaggctcgcggccggagtgcggcgctgggcggaagctaccatggcggccgagcgaaagacaaggttgtccaagaatctactgcgcatgaaggtgcggggacgctgagagcgccactccgggcggtaggggcacccggtccttccaacctggccggggccgaggcggcgggcggacaagggacaccagagaggcctcagagggcttccagctctcgtgctcattcattcacttagcgcctgctctgcactgtttactgggaaccagcttacgaattaggccgactctctcaggaggcccgcgggcggatgggagcttgagtacacagaagcagtcagggtacagcttacccagtgcagtgagggtagaagcgctggggaccttggggactcaccgagcttctcgagaagttgttgcttacttatatatgcaataaatatgatatatgggaagtgtaactccttagctgggtaatttaggtaaattcacttctttctctgaatatctcttttcctcatctttaaaaagaagagcattaggctacatgagttcaagctcctttttaattttgataatacttcttttagtagagttcttcagagaaacagaatcaacaagatgtatatgtgtatatatgtgtatggagagagggggtatttttaaaactggatcacacgactgtggagatgcaagtctaaaatctgcagggtgggccagtaggctggagacccagagaagtactcagtccaagtccaaagacagtctgctggcagaactccctcttcttccagggagaagagggtgagtctcgcagggtagtctctaggttactgggagggtggaaggcacagcgtcctaaactaggagaaactgagttcagaagtctgagaggcaagaaagaaaaagaaaaccatggaaatttccaagaattagagacaattcagtatgtctggaaggcaagtactaagaaatggggttgcagagtaggcaatggtcacaacgtgcagggaatttgaggccagattaaagatattttcctttattttgtgagcaatggaaagctattgaaacggggaacagtatcaagaaaatggcaaatatttatagtactagacaatgattgaagtggtttgcgtatattaacctatgcaattcacataatgacactttgaggtgactacaggcagtaactctcttcttacagctaaggcaactgaaacagaaataagtaatttacccaaagttacacagctaataagtagtgtagacaggacgggaattcaggcagtctggctccagaaccctggctctttattactactctgtactctgtgatgcctgtcactaagcactacttctagagagtagcaaactgttacatgtcatgtttaaagaggtggaatttccaaaagagggaaggaagcattcataatgttttgaaagataggccattcgcagtggctcatgcctgtagtcccagcactttgagaggctgaggtagacaaatcgcttaagcccaggtgtttgagaccatcctgggcaacatggtgaaaccccatctctacaaaaaatacaaaatattagccaggcctagtggcacgcacctttagtcccagctacttgggaggctgaggtgggaggatcacttgagcttgggagatcaaggctgcagtgagctgagatggcgccactgcactccagccttggtgacacagggagaccctgtctcaaaaaaaaaaaaaaaagagagagagtaaacattatatgggcaagatttgaatggagttgagctaggatggagttagggatgaatgggtgaatgagggtggaggacaaattgcagcataacttagagtttgtcaagcactttcatgcatattagcaaaatttgaatctttactgaacagagtttgattttatggttggtaataacattaacttcagagaagtggagtgaattggccaagcagatattggaaagattttagcagttgttttagctcttggaataagccagatgatgtactgggtgactcaggctcaaactaaatatccgagttgcaactaagaagaaagaaattaacttaaatgtccacccccaccaaatggggagactcaactggacgttggaagcaaaggagaaggaaaaagatcacccacattctctatttggtttagcagctttggtcattgataagaaaaaacttactggcaagatagcaggagacactgtctatactgatagaacagagtatactgtgagaaggcatggagtagctgcacttagggtgccttaaccagagctaagtcctatatagcatgggtccccaaccgccaggccatggaccagcaccagtccatgacctgtaaggaacaggctgcacagcaggaagtgagcagcgggcaggcaagcgagcgaaacttcatctgtatttacagctgttccccatagcttgcattaccacctgagctccgcctcctgtcagatcagtggcagaatcctagattctcctaggatcagaaaccctactgtgaactgtgcatatgagggatctaccttgcgctctacttacgagaatctaatgcctgatgatctgtcattgtctcccatcacacccagatgggactgtctagtttcaggaaaacaagctcaggtcttccactgattcttcattgtggtgagttgtataattatttcatgacatattataatataataatagaaacaaagtgcacaataaatgtaatgcacttgaatcatccctaaaccatctacccttcccctctccaccacccgtggaaaaattgtcttccaggaagcccatccctggtgccaaaaaggttggggaccactttttaggcaagtataagagggttgaggatttaatcctgactcacttcaatgcctctgacttggtcagccattgcagggtgatcctaatgggaagaagaaaaagaaggatgtggatggaaggtcttccagtatggaatggttgtagagggtgcttatttgtgattttggcactgttagactctcagaacagggcttggcaaactttctgtaaaggaccatatgataaatattttggtcttatgagccagacagtctctgttacaactactcagctctgccagtgttgttcaagaccgaatgaccatggttgtgtaccagtaaaactttatcgacgacaacagacatctagcctgaggactgtattatgctgatgcctgctctgagtcctcactagttttggaatgtgttctgaaatgctctagagtaggagaatcgaacttgtacctaagtctggaggtgcttgattcatattcacagggagttctgtcctttctatgtgtacagaacatatgtatatggctgttgtataccaaaagaataggtacatgactaaatgggagaaaaaagggcagttgggcagtattgatgagttttaccacgaggaatattagtgatgaaatgaggcatctgcatttaaagaaaaccatcccagaaagagaatctggaaaaataagataggtctaggttcatttccattcagagaactttcactgagtgagctcttttgtgtaccaggggtgccgcctaagtaccaatgatacaagatgaacaagagtcatggtctattcagaatcgtagtcctgggagacaccaaagcagcacgatggtgaacaatattccagtgttgatgaggctgtcttgagaatgtgcttctttataggagcagacctaggaagagccaagccaaatgccaaccaggaagtcttaccaaaggacacacactgtaggcttaaaagagtaaatattttgccaggcagaaaatggaaacgtgttaagtcgcaaaggcaaaaggactgggaagtatagcgtgcacattccagaaactgcagttctttcctgggatgaggatgtacacacaggtaaaatggatgacgactgcaaaacactagtctgcaaacttgttttcttttactttttacttaaaatagtgatagattcacaggaagttgcaaaaagtgtacagggatatcccgtgcgtccttcatgccacctcccctagcggcaacattttacaacactaggatatgataaagagccaggacattgacagtgagctgacgcagatttcaccattttacacgcactcattttgcgtggacggttgctgggtcatatggtaagtgtatgtttagtttgctaagaaactgccatgctgttttccacagtggctgtaccatttactttcccaccagctatgtttgagtgatcagtttcttcacattctcttcagcacttgatgttatcaccatcatgtgttacttaacacatgatttaacaacagggatacgttctgaaacatgcattgttaggtgatttcatcattgtgagagcatcatagggttcatctacgcaaacctggatggtatagcctaccacacacttaggctatatggtacagcctgttgttcgtaggctgcaaacctatacagcatgctactgtactgaatactgtaggcagttgtaacacagtggtgtctgtgtatctaaacatatctagatatagaaaaggtacaataaaaatgcagcattgtaatcttatgggaccactgtcatatatgggttccatcgtcgaccaaacatcattttgcagtgcatgactattttattcgtgaacgttaaggttttttcatttaacttagtagtcattgttaaagtgcttatgcctaaaaaggcttatgtttggaaaaggtggaatagaaggaggagaaatatgggacctgggccgggcgcagcggctcacacctgtaatcccagcactttgggaggccgaggcgggtggatcacaaagtcaggagtttgagaccagcctggccaaagtggtgaacccccgtctctactaaaaacagaaaaattagctgggtgtggtggcaggcgcgtaatctcagctactcgagaagctgaggcaggagaacctcttgaacctaggaggcagaggttgcagtgagctgagatcgtgccactacactccagcctgggcgacagagtgagactctgtctcaaaaaaaaaaaataaaaaaaaaaataaaaaagaaatatcggacctgaataagggaaagaaatgggggatacatagaaaccagtggaagctgaaacctaactgctaggaggcttctgggtattttctgattttattttctccagtgttgatattttatcttgttgctgtggttagcctcttaagtttgttcacttgttccctgaagaaatacaggtattcatgctagtgagagactggcagcaggactgttatttactgccatattttgagtcaactttctgcagatttgataagagcagctcaagagtttagcagcatttcagaggaaaaataaaaacgaagagcagacttatagatgtacctttgcttctgcctacatttatcgggctcttactgtgcttcagtcatcatattgggacagatgaaggagatgacccagacacccagtccttaaggtctccagaaaagatagatgctcagaaagttcagatgtggtgagtctattggagggagccatggaagcatttaggacagaggcactgattttactggcactcatagaagtctagtagctttacctatgtcagacgggcgaggagttggccaggtggaagaggataagaagggcatttcaaccccagatcagcaggtgccaaagccagtgggctctgtgggtgagcacaagaccttcgaatgtggtgtcttagcccttaagttttccgaaggaaatatacattgtgcattttctcatgccctgacacaagccctcatcgtctagtgtaaagttggaagggtagagctaaaccgtttgatcacttgccccaaccctcaatcttgagatgggttccatagataaatgaaggagaacaagtagaagaagaaaattatttggggtttcctcagttctaaaatgggaaaagtttctgacattgattttgtttgttttcacagtttatgcaaaggggactggactcagaaaccaagaaacaactagaagaagaagaaaagaaaatcattagtgaagagcactggtacttggatttgccagagcttaaagagaaagagtaggtttattaaaattgatactgatgatgcttgtggcattcagaaggaaactcctggtaaatttaactcatcattccggtgacataaagcccatgaaattgtttctgttcagtttattgatttagtagcacaactaaaaaatattaaacctatagaagttgtacatggatttatacatttttactactccccctcccagccactattttgtccttttttacattgaatgaaggaacctagcccacatatctctgatagtaacagcagacctttggggaagctgtaatgttctctctatcaccttaagttctaaagattaggggtgtacttcaggtctctccagttttgtttcggttacagagttcattaggttgagcattttaaggcaggtcagaagtttttgtttcttcttttaaattgttactacttgtaataccatccattttagctaacatttactgaatctatagtgtgtaccaggaactgggctaaacactttacatctgtagttattgaatcttcgtagcaaacttaggaactgcctcctatgattctgtcactttgtagttgaggaactgagcttaagggagggtaacttgcccagcttcacccagctagtcagtgctgaaggctggggtagacagtttctggcccacccctaagcttggctggtgcctgatcaacaattttgaatgaaggagtgttggatttatttcatccattaatttagctgaatccttctggaagctatttttcatttttccctgatactttcctcaccttagtaagctctgttgtatggtagttttacttaaactttggtcaaatgactgaagatgctgcttactgtcttgaggcacatttatgtgtttccattctgtacctgatgtttgggctttgatttggaatgttatattcccctgttcatttggctgacctctggacattgtttgaaggttagatacccttctctaaagatagaaagtatgtcccaccaggagggatcgggagaaggtactttttttctctgcttctcagaggaagcaagatgttggtgaggagggagaagatagtgccaggggcagggtcacagggaggaagggacctttgctgctggagctataatttacttttatgccttaagtaaacttgccaaagtgttccttccagttgtttattaaagagcaggactgtttctatcttgtttccagtatttttcccctaatacagcatattattcccagaaaatgacctttacatttctttctgggaaggtaaataatgcctttttgccattactcagcatcctgtttatgtataggtgtgtatatcagctcaggatgttggcaggagaagatgacactctcagactgaggagagactatcaaggtgtgggtggggcataggggggcccctcggggcagtgcagcacctcctagcatgtgtagtgggagtgattaccacctgagcttgcagagtcaacgggtgggtggggaatagctgctaccgaatctgcagataagttgtgtagagagagcaccttacaggagctgctacctccattcacgggtacggccagcccaaggtcatcctagcaagggagccaggtacctggcagcaaaggagcccttccgtgcattacgttcaagtcagcctcccaggccagagaaacaggtgaagacgggaagtaggtctggaggggtgaatggatgacatgtccttggtatacgtgttgtattgagttgttgtttttaacactctaaatagggagatcatggaatggattggttgattaagcacatgggctctgaagtcaggcagacctgggtttgatgcccagctccgccagttgtttacttgtcaccttgggtgagttacttaacctgttttgtgtcatttgtgtattgggtatgatgatagtacctgtccagtacattccgagaagtagatgaggtaatatatgtaaaacagtcaccataacaccaggcataaagcacagtgattgtcaccattgtgtgtatttccttatatctgaatatatgaagtacacccattcctttctactcacttatgtttgtgtatccttttttgctagtgttgtcttaactattctgtgaatttggagattgcatgtgtctgtgctctgaaagtctcgactttcccatttttaatgtcagccgtatcagtctgtaattcagtgaagataattagggctattcagtgttaacactgcctcacaggggacacttttagccagtggctagaccatgtaggggaatgatgatctagctgctgtgcctcaacttggaacaactgaagggcattcctgactccagagctctcatatgtggctgaggccttagtgtagccacattgcccattatcttctccctctgcccaatccttctttctctgttttcctagaagggcatctgctgaacaacactgcctgctaagttttctgcatatatgtctgtctcagagtctgtttccagggaacccgatatagtgtgaattcctaggagtgaaatttaccagatgaaagattttgctatctattgccttattgtttttttccccaaggatatggtccagaaagagtgtgcaagtataggcagtttaattcctcctttgccgtagcaagttgtttaagaagtatttttggctattgtacatcttatacttgtgttttgtggtctgtttggagtcagaagctatagggacctgaaactaacaagttagcctgccacactttcactgatgctggtggaagataggaaccttctgggtctgagatgtaggggagggacaatagcctttccttccacccatttgaagttcattagttggggtccctgtaacaaaagacagattaacaaagagaaaggtatacacttttatttcacaaaagttttaggtgacacaggagccttcataagaaaatgaataccgaagaactggttgaacctgagtgtttttatgttagctttgatgaagagtggaaagttgtgaagaaatatgatgggagcaaggggtatgaacgaagagtaataagccaggagaaacttagcaagtcttttgttcagattcctctctctgtcccttcttctgagataaggatgttgctttcctctgagtgtagggagggcacctcttatgtgagatgcttttatgacctgcttcaggggacagtcagaaaatcctacctgcacgtcatttttcagattcctccagtgtaaaattttcagtatgccaagatgccatattttgggagtagtgtctcctgaacaccatcagaaacaaaggacttactgtacagcaagcagcacaagcatcaagtttgcgtcatttctcttttgtccccaactcctatgagggatggcgtgaagtggcccaggtggatgctgtgcacccagtggatttgcatcatagctgagatctcctgagcttagaaaactggaaccttggataacggaccacaagcagacttgccttcggccccaagagaggcatctgtattatgctggacagtaagcaaatctgcccttcgctttagaggaagactgtttttcaaggctgctcgctatgcagatatccttgcaaagatagtccagagcaaccgggcagttagtgcctcactcaaaaaatgtgcaggaatgtgagacccactgagaagggttttctaactggagttttgccatggtatttgtggctttaggcaagtccagctttttctgagcagtagtttctcatctgcgaaatttatgaaataattttgtgggtgtgttttagcctgaaaattatcctcattaatgaaaattggataattaaaatacaaaaagaggtaagttttgaaatatttcacttgcttgccaactctgtaattaatttttctaattcttaaaaccatgcatgtagatacaaaacacctgtgctcctttttatattaaagatacggtgtcaatgcaaacccgtgggaaaaacctctgaggggccagtagtcctgctctgaatccagtcctgacctctggaggttgtctttctctgggtccctcctttgccttaagtgaaagctttgatgtatggtgctttcctgagagagatgatttactttggaattgaggaggtctcatcagctgctccctctataaggaataagattgggcaattgagagggaatcccaagttcatagaaaaagctgaacagcaagttctgtgcccaaatttagattccctcagggagaggcggttctgaagtaagtgagtttctagccagactagagggccagtgagagaggaaccaaaatcacagtggttctcagagttttggaactcagaagctatttgcatttataaaaattatttagaactcctaggccgggcacggtggctcacacctgtaatcccagcactttgggaggccgaggcaggcggatcacgacgtcaggagatcgagaccatcatggttaacatggtgaaaccccgtctctactaaaaatacaaaaaaaattagccaggcatgatggcgtgtgcctgtagtcccagcttctcaggaggctgaggcaggagaatcactggaatccaggaggcggaggttgcattgagccgagattgcgctactgcactccagcctgggcaacagaatgagactccatctcaaaaaaaaaaatttatttagaacacctaaagagtgttttgtgtgatttatatttgttaatatttactatgtaagaaattttaaaaattatttaaataacaaattcattacctaacacatttttaatgacaaataactttttcaagacaaaaaatttaacgagaagagtggcactgttttctgtttttgcaaatctctttaacattgtggcataatagaagacagctagactctgaacgcctgcagtcagcctgttaaagcatgttgtattggttgaagtatataaagaaaatccccctcacacaggtgatacagttgaaaagagaggagtatctcaatggccttttcagataattctttggtacaactccaaaactcagtcagtagtagtttcttcagagtaaattgcaacgtggaatctgaaaacaccagtgaatttttcatgtcttggtctgtcttgtattccaaatagatcttttacctgtatatgatttcttaacatcctgcatctgtcatttggaaaatgagttgtatagattttcccagtgttaactcatcttgttatacaatatcaaaaatcacattcattagtatcaccgtgggtttcaacagaaaagtcttttaagtgttgggaagctatcaagcccaagatgacagataaaagctattcggaattctaacttttgcttgaaagcttgaattttgttattggcagtaaatagtgtcagttattccccttgaagtgtcaggttcactttatttattttcaagaaaatgtctgccaaagaacccaaacccgcaaaaccatagttacggtgtgacattgaaaaaaagtgtctaattcatctctcggttcagtcacacaagtgcagttagattatttgactatgatgaagtatctttttttttttttttttttttttttgagacggagtctcgctctgtcacccaggctggagtgcagtggcgagatctccgctcactgcaaactccacctcccgggttcacaccattctgctgcctcagcctccaatgtagctggaactacaggcacccgccgctatgcccagccaatttttttttttttttgtatttttttagtagagacagggtttcatcgtattagccaggatgatctcaatttcctgacctcgtgatcctcctgcttcggcctcccaaactgctgggattacaggtgtgagccactgcgcccggctaagaagtatcttatatatagagtttcaatttcgtataccgaatattttttaaagtaattgagggctaagattaacagaaataaatttgtgctgtgtcatcaagaacattctaatgtgaaactggcatttttctttgaactgtgagggcctggcagtgaagaatgtaactaccagggtagtctggtatcactgctgctttcactcatgctaagattcgttttacccagagttgcttttgcacagtctgcaaatgtcaacacagtaaaagatgacatcttaatgttatcatgcaagtaactctgacctcctgctactactctgcattgtctccattccaactgcaggggctttatgtttctcaggcaggttagattcccttctcagggcccccacttatggggacttcaggtgttcttcacctgggcatcctcatatcttgcttcctcactgcctcctggtccttgctcagatgtcacccctgacaagaggcctatccagaccactcttttaaaagacgcctctcctctagtctgccctcagtatctccccttaaactgtgtgcacgtgtgggtgtgtgggtggtggttgcattcagtggaatgtacttaagtctacagctgtatgtgttttgatagtgcatgcatctttgtaaaccatactcctatcaaggaaacatttccatcatcacgtaaagatcttcatccctctttctagtcagtctcactcctgctctgatgcaagcactgttctgatttcttaaaccgtagattaattttgtctgttcttgaacttcataaaaaaggaattgtgcaatatgtgcttaactgtgtcagcaaaatgttttggatattcatccttgttttggaacatcagtaatttgtttctgttgctaagtggtatttcattttacagatacaccacggtatatctattcattcttctattaatggacattaatagagaagtgttataacactttcactaaggaagtatgagagttcaacatttggagttagatatctttttaattttattctagtggcatctcattgtggtttttaattagcattttcctgatgactaataatgttaaagaactcatgattgggttgtttccagttttttatttttttatttttatttatttattttttttgaaatggagtctcgctctgttgcccaagctacagtgcactggcgcaaccgcggctcactgcagcctgcttcccaggttcaagcggttctcctgcctcagcctccggagtagctgggattacaggcgtgcaccaccatgcccggctaattttatttttaatagagaccatgttggccaggctggtcttgaactcctgatctcaggtgatcgctggcctcggatacccaaagtgctgggattacaggtatgaggcaccacacccagcctgtttttttacgcttatggataaagctggtatgacattcatactcaagttttgttttgttatgttttcatttcttttgtaactgtggaattgtactttaacagaaattttcagactagtttgttctatgattttacactttcactaaggaagtgtgagagtccaacatttggagttatgtatctttttacttttaactattttagtggcatcttattatggtttttaatttgcattttcctgatgacataatgttgaagaacttcttcctttttggccatttccatatctacctttgtgaagtgccttttcaaatattttggccattttaaaaattgagaaagttttgtttttgttttgtttttttaaatattttatatcacatatttgttcatcccccatccagccatcagtttattgtatttttgatgcagtaagttgcagacatcagtatatttctttctgaaatattgcagcatgcacatcattaactcaagctcagtgtttctagggtttttttgagacaaaacttacatacatctgtgcatgtaggagttatttatgttctgaatacaagttctttgccacatatatatatagtgaatattttcttctagcctgttaatgttgtcttttgatgagtttctattttatcaattttttcttttatggttaattccttatgactctcgtctaatgaatcattggctatgccaagatggtaagatattttctgttttcttctagaaattttgtagttatagtgctgacatttttatccatggtttgcctctaactttttgtgtacagcatgaggtagaaatcaaaggacatgtctttcatagataacctgtgatcctattaactttttttttttttttgagacagagtgtcactctgtcacccaggctggagtgcagtggcgcaatcttggctcaccgcaacctccacctcccgggttcaggcgattctcctgccccagcctcctgagtagctgagattacaggtgctgccccaccacacccggctaatttttgtatttttagtagagacactgtttctccgtgttggccaggctgatcttgaactcctgacctcaagtgatctgcccaccttggcctcccaaagtgctgggattacaggcatgagccactgcacctattaacatttattgaaaaaattttctttgcttattgcattgtttatctctaagtctgtcatagttttatatatcataaatagagttttttcaaacttatttgttgtgtgtatgtatggggtggaggggtgtgtagaaattgaaggttgtacgttgacttcgtattctgtaatgctaaattgactcactgacaagtagtttttttgtggattccttaagattgtttacatgcataattatgtcatctgcaaaaaaagacagttatacattttatctcctcttgttgatttatttcatggctaaggacccaatacagtattgaatagaaacgacaagagtagtccttgaattgtttctgatcacagttgggaaagcatttactttctctctattacacatgaagtgctgttttcgtcaatgcccctgatcagtggtcagagatactcctttattttcgtagtttgctgagggttttcatcataaatgatgttgaattttgtcaaataatttcttatgagaagatcatgatttttattttgttaatgtgttgaaaactattgacttttgaatatcagaacagccttgtatttctgacatacactctacttggtcttcatatgtaacatttaaaatttttaaattcaatttgctgacattttattgatgattttcacatctatatttaaaaaagatattagactgtagagttattgtaatgtctttggttttggccataaaatgagttggaaagtgttcctacctcctcttcttagttcttggtttgtgtaaaattgaaattatttcttccttaaatgcttggtgaaattcaccagtgaagccatctggatctgaagctttctctgtgaaaagatttttagtaatgaattccatttatttgatagatataggactgatccagtttttcactgcagtttttttttcagttatataatttatttttttaaattgttttttcccttaattatataagttctattggtgtttttttgcagtctctatttcttaattcaggctttctgtttctttcttcattgcatgcatgttttcgtttaaatccttgaataaatttacagtaactattctaaagtccatttctactaatttcattttcagttgttttctttctttctatgaggggattacattttcttgcttccttgcatgtctaggaattttttattgtgtgctgtacatttgtatgtattacattgctgactacctggattttgttatttttcttaatagagtgttgaattttgtttcattaggcagttgacttacatgccaatcagcttgattttgttagggtgtgttttgtagctaaattgtctctactcctaaggtgtggcctttctactaaatatcacagagtgtttagcttgttctctcctctctggctaggcagaactcaaacatttccttgctctgtgcaagctctgttatttcttcaacatgcaattgcagggtaaattttttttccccaggtatggtaggctggaaaatggtctcccagataatatctaggttttcatctctgaaacctgtgagtgttaccttatgtggcaaaatttaccttgctggtatatgagtaaattacagatctttagatgagagattatcctggattatctgggtgggccctaaatgtaatcacttttccttataaggaggagaggtgaggaagatttgacacacagaaggccttgtaaccgtggaagcttctggagggatcccaggcctactaacatctggattttgtacagaactgtaggagcataaattctgttgctctaagccaccaattttgtcagcttaaatttgttacagcagccacaggaagctaatgcagcaggtgttctcccagaaatcatctctccagcagttactttttccctaagtctaaagactcatcctgcacatgtgcagcttcatggtcagccaaagattcaagggaacccagtatgcaggtcctgaattccatagtgtagctccctttcagtggtatcctcacccagatattccagccaccaccataaccccaaacttcagtttgtgcctttatttttttcaactaaagccccaatgaaacagtttgtctcttaagctcagcaagacagggttttgtgtgagtcccccactccctgctccacaatctggaaattgcctccaggcagaaagctccgcattcatggggtctacttcatttgattttcttctctcaggcatcacagtcatatgcttggatttgttcattatctgaaaatggtcattttatattttgtcctgttttatataattatggtgcaggaaagctagttccataccaattactcccctacagctagggatggaataacctgctttattttcatccattgtgtgatataaatgtttcatgtttcattcattatttggcccctctttctatagactgtaacctccaggagagcagaggctccttttttttctttttttttggaggtgagtgtttgacactgtcacccaggctggagtgcagtggcacaatcttgactcattgcaacttccacttctgggatgcgagcagttctcctgcctcagccacctgagtaactgggactacaggcatccgccactgtgcccagctgaggctcttttactggtggctgtttccgcagtttgatttaatacacacagtttggtttaataagtgtttgttgcataagggaatctttatgagaatcagagcctactccggcaaacaagccttaaaagccacatgtttgctttcctgccatgctttagggtttatggccaggctggagatagatatgtcaccttggatttacggtcatgtggtggtgactcagcagagaaattctgctgcagacagaaacatcctggtccagggaacgcaacctgccccaatgccatcagtggtgtcgtgctcagccccgtcagcagcaacagtggttttcctagggtcattctctagcatgattttggttctggtgcaaccacctagcgaccgttatttctgcccgtcttccaattctgccccttcagccttcccggtgattctgagatgcccagtacagctggctctttgtgtcacagattttgatatctacaaggggtcctggaaccagtcccccttggaaatgaagagcctacagtgttcttacagtaaattccttctctgctgaagtcatccagggtcagcctttggtgtttatagctaagagctctgactgataacactgttaaagctgctcaagcctctgatttcccactacttctcctggatttgtaataagaatttggtgggggccaaaatctcagaagtcaccactaaagaacttatccatgtaaccaaaaaaccacctgttccccaaaaactattgaaattttttgaaaaaaatctgtgtataagtgcaccacacagctcagacctgtgttcaagaatcaacgtaaatgcaagtacaaaaaagactggaaggaaatattcaaatatactaacagtcctttttatcctcttggtaaggagcttacaggcagtttataaactcatactttattctgctttccaaattacgttccttaaaatgtgctgctttgataattagagaatggaatttttgaaatccctgagaacgaaagacaaaatatgccagaaactttattaaaatgatttggagtagtgtgtcactgtatactgtatgtgtatttttacatacatattatttcctttctgaaaaagaattggaaaaaaatatggtgaggggatgtaaacacaaaagaaactttgcttcaactttggcaaattcaagtttattgtcaatactttagatctttatattatgtagatatttatgcaaattaaatgtggtgtttaagagaggctgtgcctctagcttgctgctcttgtctcctaatgcctttgctgaccaaattaatcagattttatttttaaccctaagttagaaatcttactgtatttttacttcattctactgagaaccataggttgattattttttttattcaaagtgttggcttttgtttgctgtgctttatatatggagaaatgctatttttattttcccatttaggagtttcataatagaagagcagagtttcttactatgtgaagatcttctctatggaagaatgtcattcagaggatttaatcctgaggttgaggtattaaatataattgcttcaaattaaaaatttttccaattgaatttttttctgctaataattgggcttaggtgtttctccaccaggtaccatttctactcattatatagaaaataacaagtcttgaaatatcgccatagctatttaaagaaattggaggcattgcagtctagttttatggtagaggtgagtagataatttcatatagcagtatacagcccttgacagagccaccataaatattaaaatttcaagttgtgtcttttacaggaacgtcaagattttattcatatcatgctattatgaaaagttattttctggcacctatacatgtattttttctaacggaaaaatgttactttagaattatgtcatttgactttttaatggactgttgtaatccaagcttgtaagtagatttttaaatgaatcctttcgacagtttgtttgaaaaatgaatatttgccttataactgagctattcatttgaattttcctgctccaggatagagaagcagacctttatttaacaaatattcattagaactctggctcatatgttaaaagccatcctatcaagtacttgatgaaccaaatggacacatgagatataaatctttagtttggtaaatattacttgaagccagtgtttcttgcccttggcagtgttaacatttggggccagataattctttgtggtggtggctttcctaagagaatgacgaaccacatccctgtcctctgttctctaccaactaaatatcagtagcacacacacaccccaccctcctacccagctgtgacaaccaaaaatgtttccagacattttcacaggttccctggtggggaaaatcatccccagttaagaaccacttctctaggagccacagttaactaagccaattgccagagtttattgaaagattctaggttagttttccttttcttttttggcggagtgggaggaggcatgtgtgataattaaggtgttatgttagaagtgtttgtttttaatatatgctggtctcgctttgactttctttaattaagcttcagattgagaaggagaggggctgggcagtggggtgaagagggaagaaaaaggcagggattatgaagatgtggtattcaaagagtagggtttggataggcgagcattccaaagtatgtctgctgcaatgggaaaggagaggtgccactgcccgcagaaattgatggggggcagggacgggtgttagaaaatggccctaattactggattctgaaacactgaatacactccccctaggaaaaggttttaaactattatcactcttttaagccttagaaaaactagttaagactgatttctcatcttttattccttctcctcttgctaaaaagaagagattacacatttaaaaaaaaaaaggtcagaggataattatcacaaaaaggtttatgtgaaagagttggaggagagaccctgtggtgcatggatgttacatgggatgcattatccactctaaagtttaggagggtaaggctgaggtgcagattccctccattaaacagggccagccttccacttctcccacctcctccactcaccaccaccaccaccaagagatgcatttaaaattattactgacgactagtgtttcttccatatggcttaaagatgggtgggggaagttcagggaaaatctgaaagtttattatttcttcccccactcaccggaatgtgtcagcagtatgcctgctttaaatatgagtaactaatactaagatttatgatcttaaatacactttaaattcaccctaagtataattcagtggggctttgccttactatttttttgactcagagcttacttctcttacaccattgtggtatcaagtattacagagagtcccttatcaattttgactagttctctagattatttgacttcagtttctctgccttcaggtaagtttgacatcagttcctttcacaagcgttttctagcctgaaggtcagcactggtgtatttttcagaaattgatgcttcagatgaatgctaagcacaaagcagaagaagttgaagatgaaacagtagagcttgatgtgtcagatgaagagatggctagaaggtaaccgtgctgcgcagcagccttctaatctggacctagcattcattggctctcccaggaatgctcctcttaccccacagtgcacggcagctttcaagggagtcccccagtaggacgatgactgtgatcggccttctcttaatggcctacgggggccacagacctgtctcaggctgccagttgagggcccatttccagagctgctggaaatgtgtattttaaaatgtacatctctatttatttagggtaatgcaaacaccaaaatggcaaggaatttaatcactcttagagaagttcataaattgttaaatcagatggtttcttttaatgatagttttctttttcgtaatcttttttattgcatatttggtctgatattcttgacaaggcttgatccctacctttttatttgaaattaaacgtgtgctgcctgtcctcttgacagatatgagaccttggtggggacaattgggaaaaagtttgccagaaagagagaccatgccaattatgaagaagatgaaaatggagacataacaccaattaaagcaaagaagatgttcttaaagccccaggattaagatggatgccttaagcgatggcccaggggtgcttggtggaagtcagcagggcatctggagctcatcccaatggtgtctctatagttattaatactgtaacgtttacttgtaaagagattatcattttagaaacatgctgtttttgaaacagatgtgtgatggatgttgtacatcctttgcttcttggtattcattcagagtggatttttagcccctgatctacaaatgtacattgttacagggctgcttcctaaagattttttttacctcaggtttctcttaatatagttctccagtcactgaccttgaattgacttacataaactactgccaatgtttaaattgcccttatgtttatatttattatgtcaagccaattcgtacatacaatttggaatcaaatgtcataagaatttattatataaatttatcaagaataaaaatgcctctccagccttaagtatttacatgctcccaggtcattgtcagtttatggtattatgttgttttatttaaagcattgaattgatagaaaaatttgctctgtaataaaaatctactttcacat

SEQ ID NO: 192 - DNA, 8142 bp, Homo sapiens
  source 1..8142: mol_type = other DNA
tcactatacagagacagtccatgttggggggcctggccgcggcggcgggtaaggggctctgacttcatcggagtttcgttcctcccctccgtgggttctcacccctcccccctccgcaccccacttttgcagggggggccaggatggggggaggggtgagaggggaaggagggggttggagaagggaaggggaggggagcgtgggagggaggggaagggggccctaaaaggggctccccagtggaggggagggggcttggggagcacaccccgattctcaggaggggcgggggcaccgggggctggcagccccggagttcgggggctggggcatgagctggggtgggggaggggaactggatttcggggagccccggggtaggggggggtcttgccaaacggccaggggctaggggccgtggcgggggagtggggtgggggggttggaaacggcagcggccgagggagccgtggagccgaagagggaaggggagagaggaggagagaggaagcagggggagggagggagggagctaggagccagaatggggggggtgccttggcagagttaactccttctgtgctggcaggaacccggataatgggaaaggagatagaagcagaagcacagaggcccctgaggcaaacatggagacctggccagccaccagcgatgacagcaaagacgatgaggctggatttcatttcttagagaaggaagcatctatagttgggctgggagcacccacggttatttgaatacgggagggaggcctctcggcaggcggtagggggtcgggtgtgagggaggagctgaaggaggcaatccctgggggcctagttctccctcaggtttctcagggggaaacctaaaaagttaagccctagactctttagtgcctgaaactggggcagccaaagaaaacgaggaagaaagggagagtgggtacaggaccacagagagtgcattctcggtgccccaagtccctgggccactgactcaggcttttgtcagcagggcccccaagattccaggtaatattagtgatatttggctcacccctccagccctgcctgcccctcaggaagttaggcgctcgcccccacctccttacctgactctctgagagggaagcctcataatagtccaggatgtctgtcacaggaacagaactgagttacctccccaccccaggcctctccaggcacatcacccctgtcatcaccgctgctggctggctggcaagggaggagccctttcagccaaggctggtccacactcatggaggacaccataggcaggaccctgcatggtgctccagcttggaccaaatgatctctgggctcccaaacagcccccgaagttcagtaatggcccttggaggcccaggtccctcagaaaacgggctactcacccagcaaggcctggaagaggtcgctatgcagcactgtgaggagtgggggtgcccaccgcagcagtgggggtgccaggagccagagggctgacctgggagctagtgagatgcaaggagaattgggacagggaagatgccaacacaggaagatgaacacactgtcacttcatctccccagactgtgcccttcaccccagcccctacggaaagatttggggagaaggatctccgagccccagccccccacttcgctcccagacctcccctccacaaggagccctgtttttcacctcttggtctctgggacatctctctcttctctcactttaatctccctaatcctccaggattggagttgagctgcttctccccactaaattccagctgtgagtaaagtaggccgtctctgagccgaccagctgtcccattcccccaggtcccaaggcaccagcaccgccaccatcttgctccacacaccctggccccctcttcccataggcaggcagaacctagccacgctctcctgagaagccagcaaagagggcctcctcacagagggctccagcagctcaaaaagaagctgagcccagctctctctcctcctgggcctcctctcaccccaatgagaattgcagaaaaaggggtagaaattgtttgggacttcctgccctagggctagagaagttggggttttacgggtaagaggcaggagaattcctgcagttcctctcaggcccgggaggaatccatctgcctgggcacatggtctctggaaggaacagagggcaaagacagaagggaatgttcaggaaggtctcagaggctttactaagggaggggcagtgaatctgggggggtcttcctactgtgaaactgtagctgttccaagagttagtgaatggcctacatctcagaagaatacacttagggtactcacaccctagcttgggtgccccccaccactgtaccctcccttttgtgttggccgagatagatttcatcaggaaccctagagtctgtctttccatgtctctgcctctgccatctaccttacacttctctttccctacttttcccttctaaccccaccggagaagccctcccttcagtccacctccatccctctggctgcagtgacttaagccccttcctcttctgtcccatcctatcccatcaccccgtcggaggactagactctaggtcggacgggcgggattaaggagtttgggggagacgagggacgcttggagatccctctaagtcagcggaacgcagggccgggctccagggaactacagctcccagcatgccccggggcccgcaaccgtccgccgcccggtgcactgtggacgatgagtcagggttaggggcgccaggacgtgggcgtgcaggacgccagagctgggtcagagctcgagccagcggcgcccggagagattcggagatgcaggcggctcggatggccgcgagcttggggcggcagctgctgaggctcgggggcggaaggtctgtgtgtgacaagagggacggtgggcagcggccctgggcaccgggccggcactgaacccccactccccacagctcgcggctcacggcgctcctggggcagccccggcccggccctgcccggcggccctatgccgggggtgccgctcaggtaagtcaccgcagccttggcaagggggtgtgggagcggcggtccgcttcggcgcccgccatcggcagggatctccctcttggtgccaggtacctgcctactgctcagtcgccgaaagtaggggaaagggcaagccagggtgccctagggcgaaactaggggaaaggtcaccgcttcgcgccgcctccccgcgcggctctcgcctgttctccccttgacacagcggaagtcccttccctgaacttgctaaccgtctcttttcccagctggctctggacaagtcagattcccacccctctgacgctctgaccaggaaaaaaccggccaaggcggtaggtagccccgaggccaggtggaccttagccagacccaaccagagccctgaaatttgcctctctctgcccaggaatctaagtcctttgctgtgggaatgttcaaaggccagctcaccacagatcaggtgttcccatacccgtccggtaagggaagggataatcagagctgggtggggccagggtggtttcccctgccagcctggcctgaccagcctgtcccccaccctctgcagtgctcaacgaagagcagacacagtttcttaaagagctggtggagcctgtgtcccgtttcttcgaggtaaggaatgactcggggcttggtccctggtgaggtgtttggagatgttaagctcaaaaggagcctggatgtgggatcctgtgccttccccaggaagtgaacgatcccgccaagaatgacgctctggagatggtggaggagaccacttggcagggcctcaaggagctgggggcctttggtctgcaagtgcccagtgagctgggtggtgtgggcctttgcaacacccaggtgagggcgccctatcgccacatcccagtatgccataccccagcttggcagactcagctcttttgccatagacctagagactagggctaaggtctcttctaagcacctgccctgggtgcctgtgggatggatgttaactgtccaaacataacacaatttacatgcagtcccctaggcctgagccatgggcctcaccctggttcccaagtccttacaaatctctaagttggggattgcctaacaatagactgactagtagcaagtcaccctcctacctagacctaagacagaccagcattctctgctgtgccctttgcacaccccacttcttttctacacactggggatggcccaggtcaggcactgccctaggtcaggaactgccctaggtcaggaactgccctgttgcccacactctcctgttaaggtcaggtccccctgcagccagtgacaaccccagattcctgcttcccctccagtacgcccgtttggtggagatcgtgggcatgcatgaccttggcgtgggcattaccctgggggcccatcagagcatcggtttcaaaggcatcctgctctttggcacaaaggcccagaaagaaaaatacctccccaagctggcatctggtgaggcaaccctaggagagccagggattggggggcacactgggcttggcacagattaggccagttggcacttagattatcagatggctgagcatttcagttgggggaaggttttggggaggcatcacagtgtgctggttgggacatgcaaaagaactggatactcccaggtgttaagggggaactgcctgctggagggatggggaagtgggccgaggggactttgaagctcatcagaacttggggtaaagtagctctctccccaacaggggagactgtggccgctttctgtctaaccgagccctcaagcgggtcagatgcagcctccatccgaacctctgctgtgcccagcccctgtggaaaatactataccctcaatggaagcaagctttggatcaggcaacctgcctcccatttctccccttctcctccgcccaattccaggccccactgctccccgtcctccacgccctgaatatcccattcttccacagtaatgggggcctagcagacatcttcacggtctttgccaagacaccagttacagatccagccacaggagccgtgaaggagaagatcacagcttttgtggtggagaggggcttcgggggcattacccagtgagtgaatttgggttgggggagcttaggactgaggggcaggactgggctcctgggcagatggctgttgcaagtcaccctggggacgtgtgcaaaagccaaagcaggtggactgaatgtggcctttgggactaatatgtatgcaactgagctaaagttttggctccagcaaccaagtccaacacaaaataggacatagccaggcctccttagccctcagggcctgaggggaagtggtggctgtagcctctaatagtctagtggtcgtcattcctccctggtgcataaggagcgaaggagcagtttttcccccagtgacaacctgttgaacacacctctgctttcccacactgccctgacacagtgggccccctgagaagaagatgggcatcaaggcttcaaacacagcagaggtgttctttgatggagtacgggtgccatcggagaacgtgctgggtgaggttgggagtggcttcaaggttgccatgcacatcctcaacaatggaaggtttggcatggctgcggccctggcaggtaccatgagaggcatcattgctaaggcggtgagtaccctgcccgagtccctaggtaacccaaacagaagtctcactgtcccccttgccatgtgtccctgatcacttgcaggcactccctacactagaaactcctcccctaccagcagcccgacttgctagcttaggtctccatccagcgtagactgaactctggttgtatgcaaaacccatccctctggcgcaagcccagcccctctcctagggagactgcagaaccacactgaaccacagcgggatgtgtggaccctcttccaggtagatcatgccactaatcgtacccagtttggggagaaaattcacaactttgggctgatccaggagaagctggcacggatggttatgctgcagtatgtaactgaggtgagggcctcccaagcccctctccctggagccctggggctttcttcccagtcgggtcagactacaacccccagcagcacctggggcagtgggtctccagctttacaccaatgccctaggggatgcggggaggcatagtcagctcagcttctgcgaagagagacagcaatgatgttctgctcaggtgcctgccagcagtaccagaagttaattctacctcatcccttacatccaccccttttaagaaaacaaatacctggaagcacctgatgaactgacccagaacaagtatctgcctgacctgacaagctaggtcagcccttatcttggagatctgggtgatgaggccaagtctgacaaagccctttgcaattttccttcccatgtcccaactatgcaacctcagtccatggcttacatggtgagtgctaacatggaccagggagccacggacttccagatagaggccgccatcagcaaaatctttggctcggtgaggtcccaggcatgctgggagggagtccagtttgggtgctcagctcccaaaaccagtctcatctgttctttgtccctaggaggcagcctggaaggtgacagatgaatgcatccaaatcatggggggtatgggcttcatgaaggtacaggacggtcttctgcagagcctcggctgggccaggggtgggtaggcacatctcagcacgggcatataatttgtgtggccctgtgctaggaacctggagtagagcgtgtgctccgagatcttcgcatcttccggatctttgaggggacaaatgacattcttcggctgtttgtggctctgcagggctgtatggtaagacagagaattgggtgggggtagaggtggggaggacagtgagtcctgactgctggaccctcttcccccataggacaaaggaaaggagctctctgggcttggcagtgctctaaagaatccctttgggaatgctggcctcctgctaggagaggcaggcaaacagctgaggcggtaggcttagggccagagccaggggagggcagggtggtgtatggcaactaaccagtcattctccctcttcctctcaggcgggcagggctgggcagcggcctgagtctcagcggacttgtccacccggagttgagtcggagtggcgagctggtaagtggccaggggtccaggagagcctgcatcagggactgcagccgatggcccctctgagccccgcactgtccccatctcttaaggcagtacgggctctggagcagtttgccactgtggtggaggccaagctgataaaacacaagaaggggattgtcagtaagtgagctctacaccattccgcccctccctttcctctccttgagactaatgcccccacccccacccccaccccacctaccggacagatgaacagtttctgctgcagcggctggcagacggggccatcgacctctatgccatggtggtggttctctcgaggtgaggaggcaggcagggaatgcctgagccgcagggggcctgggcctggatcccagccggcccagatttattttcatctcctgcttcctgccagggcctcaagatccctgagtgagggccaccccacggcccagcatgagaaaatgctctgtgacacctggtgtatcgaggtgagactcggggctgccaagctcaggtgagggctggaggtgcaggcccaacccctccttccctctccccaggctgcagctcggatccgagagggcatggccgccctgcagtctgacccctggcagcaagagctctaccgcaacttcaaaagcatctccaaggccttggtggagcggggtggtgtggtcaccagcaacccacttggcttctgaatactcccggccagggcctgtcccagttatgtgccttccctcaagccaaagccgaagcccctttccttaaggccctggtttgtcccgaaggggcctagtgttcccagcactgtgcctgctctcaagagcacttactgcctcgcaaataataaaaatttctagccagtcat

SEQ ID NO: 193 - DNA, 2680 bp, Homo sapiens
  source 1..2680: mol_type = other DNA
agaaggcgggtaggaagggcagtcgtccgcgctggctgggcagggagcggcagcagcgagccggggaccccggcgccgcccgcgcgcggtgggactggggctgcggtcccggccgggtggcgggctcctgggacacgtgaccggggcggcgagcgggccgggcggacgggcttccgcctgggccgggcgcggccccctctgagcgcccgcctccccgcaggccccgtctgaggtctggcagtcagagacagccgggcgcccacggcccgagcgcccacggcagcaccatgcccgcactcctggagcgccccaagctttccaacgccatggccagggcgctgcaccggcacattatgatggagcgggagcgcaagcggcagggtgagccggggccatagcagggggacgcacggcccagaatggctcctgtacctcaaggctggcctcaacccaccggccaaccagcgcgcccgctgccgagcgcagaggagggaaggaatagccccgttgtggtgggatttaagcgtcctgttccacgctccagaacccttgagatgggaaggaccttggagagcacctgataaagcctttccgttccctattgccgcgatggggagcttgtcccctcgaggcaaagagcatacaggcgtgttgggatgactgggttttgctggtcttcaatctgtaacgttggaattgttttcactaccctgcctcttcttcattctgcctgattctccagaggaagaagaggtggataagatgatggaacagaagatgaaggaagaacaggagagaaggaagaaaaaggagatggaagagagaatgtcattagaggagaccaaggaacaagtaagcagtcccttgaactttcccagctttgatttcttcgtttgactctccctgccttcatcttcttttcccaccccatcccagattctgaagttggaggagaagcttttggctctacaggaagagaagcaccagcttttcctgcagctcaagaaagttttacatgaggaagaaaaacggaggcgaaaggaacagaggtgggatcagagtgctaaaaactgaaatgggggccaagtggaactgggatcaggtagtaaaagaaccagtgtttaatggcaaaagagaaggcatctgtccttgactttgacctgtcttcctttcactccagtgacctgaccaccctaacatcagctgcataccagcagagcctgactgttcacacaggaactcatctcctcagcatgcagggtgaggactaaagaaaccaccagatggaaccggccttcttggaggtcacagcctcccatttcagcatcatgaagcccttctccctttctagggagccctggaggacacaatcgcccaggcaccctcatggcagctgacagagccaaacaaatgtttggaccccaagtgcttacggtgagagtaggattggatgcctagcccctagtacttccatccatgcatccttgccaccagtattcaagtcacaaacatatcaagcacttaagtttagggggaaacggggcatacagatacacacaagtcactgggtttcagctttcaaggagtttgtaggcgagttctcattctccttccttagacccggcactacgtgggctcagcagctgcttttgcagggacaccagagcatggacaattccaaggcagtcctggtggtgcctatgggactgctcagcccccacctcactatgggcccacacagccagcttatagtcctagtcagcagctcagaggtgagtaataggagggatggggcttggccttcctcaaggtcaaaggaggaatgccattcagtaaaagattttaatggctctgtcttttcctttctcagctccttcggcattccctgcagtgcagtacctatctcagccacagccacagccctatgctgtgcatggccactttcagcccactcagacaggtgataacatcccatgcaggagctctagctctcaggtcctcccctccctgtttcattctcatctcacatgcccctcttccccacctaggtttcctccagcctggtggtgccctgtccttgcaaaagcagatggaacatgctaaccagcagactggcttctccgactcagtgagtatggcaccttgggaggtcagggttagggatatgttaaggggagcttcagtatgcctcaggccctgactctgttctctgcagtcctctctgcgccccatgcacccccaggctctgcatccagcccctggactccttgcttccccccagctccctgtgcagatgcagccagcaggaaaggtaagaatggtaatagaatttacctgtcagaatccctacactagggatccggaaaagcaggattaggtaggacaggtggcccacatcatctggtttttccttcctctttgggggtggttatcagtagggtattaagtggaagggagagtatgcccagtgacaaagccctcttttcatcaccaccaccagtcgggctttgcagctaccagccaacctggccctcggctccccttcatccaacacagccagaacccgcgattctaccacaagtgaccatcagattatatcttcaacaccacaccccccaccccatcgtgggtgagggtatcccctgtgtgtcccaggccaataaaatctacctgccactgc

SEQ ID NO: 194 - DNA, 19319 bp, Homo sapiens
  source 1..19319: mol_type = other DNA
attctccatgtgcttggatcgtggggaagatgtgattaaggtctaaggtatgtcttccaccagacaacggacacagtcaattagaagctgggtaaaggggtctctcctgcggagcggggagcgccaagccagggacaataatggcctgaagttcattctcccggagatgggggtagaagcaggtgcaggtgccttagaggggtcaaaaataagaggaacagggttcactctaagcggtctcccagggaaggctgcgggttggagcaagggtccaagattctaagggccaggactcagctccagaagctcgatcccgccccacgcgttcctgctccggccaggggagggggctaaggaccggcgtccccagtcggcgcgccgtctcaccttgtagaaggccccgttggagccgcgcacctcgacgggcagtcccggctccacatcccccccagaggccaggccgcccatggcgccgccaccgcctccgactcccccggcggcggctgcagcagcagtctgagtgcgggccgggccaggcccccggcgtctccccggaggaggagccggagggggagccgcggggggcgggagccgggccggccccacggcggccctgccacagccaacgagcagggggccggggccgggccgctccccgtccgccgccgccgccttggtctccgccaccgtgagggaaacggccgccgccgccgctgccttcgtcacctcagcttccgcccgccgccgcccccgctgctgcctcagtcccgggacccgctgctgccgctgccgctccacagcctccacctccccctgccaccgccgcctactgcgcaggcgcaccgggcacccgcccgctgcgcgcggggccccgagggccaccgcgcaggcgtcaaggttagagccccagctagcgccagctagcgcatcggggcttccacattccctttcactctctcactccccctcctggtcgcttgctagcgcttgcgcagaacaagattagccttctttcttcaccgctccaccgcccagccaccccgtctcttcctttccccgccccacaacactgagaaccaaccaatcagggggagggaggggccgggctcgctcagtccgattgggcggcgtccgcacagtcacacagcgctcaggccacacccactccgccgccgctggccccaccgggcttggacaagttagggatgggcatgcgcctgaacgactgcttggtcactttccccacctttgtctttcttggtgcgcacgctccaaaaagaaaaaaaaaagaagaggagtcgccgcaaggaaaaaggtgcttggtgcgcacgcgctgagctttaccctcttcgcgtatgcatcgccgatattttaagaatctgtaactctctactgtagtagatttaacagtcatggctcttaccttgaagagattgtgatacaatgaaagttttggccgggcgcggtggctcacgcctgtaatcccagcgctctgggaggccgaggcaggtggatcacctgaggtcctcggatcacctgaggtcaggggttcgagaccagcgtggccaaaatggtgaaacccacccccccccccaccccgcatctaataaaatacaaaaattagccgggcgtggtgacacgcgcctgtaatcccagatactcgggaggctgaggcaggagactaccttgaacctgggaggcagaagttgcagtgagccaagatcgcaccattgcactccagcctgggcgacagagcaagactcagtctcaaaaaaaaaaaaaaaagaaagaaagaatagaaagaaagctttaagaatagtttcagacgggcgctgtggctcactcctgtaatcccagcactttaggaggctcaggcggtggatcacttgagcccaaaagtttgacaccagcctcaacagggcgaaaccctgtttctactaaaaatacaaaaattaggacgggcgcggtggctcaggcctgtaatcccagcactttgggaggccgagatcacgggcgggcggatcacgaggtcaggagatggagaccattctggccaacatggtgaaacctcgtctctactaaaatacaaaaaattagccgtggtagttccagctactcggaaggagtcccagctactcaggaggctgaggcaggagaatcgcttgaacctaggaaggtggaggttgcagtgagtggatatcatgccaccacactccagcctgggcaatgagtgaaatttcttctttaaaaataataataatggcagggcgcggtggctcatgcctataatcccaacactttgggaggccgagacgggcggatcacgaggtcaggagatcgagaccatcctggctaacacggtgaaaccccatctcaactaaaaatacaaaaaaaaaaaaaaaaaaaaaaaattagctgggcgtggtggcgggcgcctgtagtcccagctactcgggaggctgaggcaggagaatggcgtgaacccaggaggcggaggttgcagtgagcggagatcgtgccactgcactccagctggggcgacagagcgagactccatctcaacaacaacaacaacaaataataataatagtggcccggcgcggtggctcacgcctgtaatcccagcactttgggaggccaagatgggtggatcacaaggtcaggagttcaagaccagcctggccaacatggtgaaaccccatctctactaaaaatacaaaaattagctgggcatggtggtgcatgcctgtaaacccagctacttgggaggctgaggcaagagaattgcttgaacctgggaggcagaggttgcagtgagcccagattgtgccattgcactccagcctgggcaaaaagagcgacactctgtctcaaaaaatagtaataataataataaataatgctggggaaattcaaaataggaaaaactgtcatgaaataagggtagtagcaggaaaacttcacattctgggagttgtcctatgttccatccacttcttggattagagtaaatggtaatgccaatcatggaagagataacataggagataaaggtttagaaaataaggtgatgaatttacttttattttttttttgccctttgagcttagccaccacatctggctaatttttaaatttttgtatttaatggtggagacaaacagacttggaagtctctgacttcatagtgtgatggcagaagaaagacactggaaaaattattaatatttataataattattaatattgcaaccatggccaggcacagggctcatgcctgtaatcccagcactttgggaggctgaggcgggtggatcacctgaggtcacctgaggtcaggagttcaagaccagtctggtgaaattccatctctactaaaaatacaaaaattagctgggcatggtggcacgcgcttgtagtcccagctactcgggagactgaggcaggagaatcgcttgcacccaggaggcagaggttgcagtgagccaagattgtgccactgcactccagcctgggtgacagagcgagactccatctcaaaaaattaaaataaaaaacaaaaataaataaaggcgatagaagaaaggaaaataaagtataagaaaattaaaggattagtccatgggatacaacatctgaataaccagaattccagaaagtgataacagaaataattatctggaaaggataaaatcatctaaaatcaatagtaataattattcaacaaaattttccaaggccaggtgtggtggctcatgcctgtaatcctggcactttgcgaggctgaagcaggcagatcacttgagctcgggcgttcaggagcagcctgggcaacatggcgaaaccctttctctaccaaaactacaaaaattagctgggtgcggcggctcacgcctgtaatcccagcactttgggatgccgaggtgggtggatcatctgaggtcaggagtttgagaccagcctggccaacatggtgaaaccccatctctactaaaaatataaaaattagccacacgtggtagcgtgtgcctgtaatcccaactactcaggaagctgagggaggagaatctcttgaacttgggaggctgaagttgcagtgagccgagatcacaccactgcactacatacagcctgggtgacagagaaagattctgtctcaaaaaaaaaaattatttccaacctcgtttcctatacctagccacactctcaatatttttttgttgttgagatagagtcttactctgccactcagactggagtgcagtggtatgatctcggctcactgcaacctctgcctcccaggttccagtgattctcttgcctcagcctcctgagtagctgtgattataggtgcccactgccacagctggctaggtttgttttttttgtttttgtttttgtttttgttttttttgtatttttagtaaagacggggtttcaccacgttggccaggctggtctcaaactcctcacctcaggtgggtcacccacctcggctgcccaaagtgttgggattataggcatgagccactgcgcccggcccacactctcaattaagtgcagtaatagaacagacattttcaggcttttaagttcccaacaaatttacctcccggtactctttctcaaaaagctccatcaaaataagaagagtaaacatagaaagaggaaacacaggttccaggaaacaggacgtcaacacaagagagaggcaaaggggatccccaggataaaggtgaagggagatcccaattgcgcagcctcaagatcgcctctctggactggagcaggtctaagagctttttgagaaagttcttcaaaatgacgtagattgaaatccctaagtgtttgtatatccttataagagattaattaagggagaatttggggataaattagagtacacaggaaactaagcaaacagagaggacaaggcagttattaattccagggaaaacaaaaatggtacaggaaagaaaaagaattgtaactatccacatggatcatacgtgtattcgtataatcataataatcataataatgaggccaggcatggtggctcacacctgtaatcccagcattttgggaggccgaggtgggcagatcacctgaggtcaggagttcaagaccagcctgaccaacatggagaaactccatctctactaaaaatacaaaattagccaggtgtggtggcacatgcctgtaatcccagctactcgggaggctgaagcaggagaattgcttgaacctagcaggcagaggttgcagtgagccaagatcgcgccattgcactccagcctgggcattaagggtgaaactccatctcaaaaaaaaaaaaaaatcataataatgtaaatgctaaggctggtgcggtggctcatgcctgtaatcccagcactttgggaggtcaagataggcggatcatgaggtcaggagttcgagaccagcctgaccaacatggtgaaaccccatctctactaaaaatacaaaaattagccaggcatggtggcatgcacctgtaatcccagctacccaggaggctgaggcaggacaattgcttgaacccgggaggcagaggttgcctctgcatgagccgagatcatgccattgcactccagcctgggcaacaagagcggaacttcgtctcaaaaaaaaaaaaaaaaagtaaacactaaacacaggaggatgggaagtggaggtgggatgataagcagattggaaaaatagtgcttctctttttttaacctcagtgatccgtgttctgaagggctagcttttcatcctcaacagtgcaaagccaatagctaatgcctaaacaaaaaacactggagtgcagtggctcaaacatgccccacttcagcctcaaccttaagaagtaaggccaagagcagtggcacatgcctgtaatcccagccctttgggaggccaaggcaagaggatcagttaaggccagaagttcatggttacagtgagctatgatcgtgccactgtactccagtctaggcaacagaaaaagaccctgtctctaaaaaagtaaagactccttatccctctccaaaaaaaaaaaaaaattgaaaaaattgaaaaagaaaaagagacatcaagaagtggtaatactggccaggcgtggtggctcacacctgtaatcctccctcctttgggaggccaaagtgggaggattgcttgagctctggagtccaatactagcctggacaacatagtgagacctagtctccaataaaaaatttgttgtttgtttgtttgttttttgagacagagtcttactctgttgcctaggctagagtgcagtggcacgatgttggctcactgcaacccctgcctcccgggttcaagagatcctcctgcctgagcctcccaagtagcttggattacagccgtttgcccccacatctggctaatttttgtatttttagtagagacgggtggggtttcaccatgttagccaggctggtctcgaactcctgacctcaagtgatccacccgcctcagccttccaaagtgctgggattacaggcgtgagctacagtgcccagattaataatttttttttttgtttttttgggggacggagttttgctcttgttacccaggctggagtgcaatggtgcaatctcggctctctacaacctctgcctcccaggtacaagtgattctcctgtctcagtttcccaaatagcttggattacagacatgtgccaccacacccagctaatttttttgtatttagtagagacagggtttcaccatggtagtcaggctggtcgcgaactcctgacctcaggtgagccacctgcctcggcctcccagagtgctagaattacgggcatgtgccaccgtgcccagacaaaaattttgctttcattagccaggcttgatagcacctgactgtgatcccagatacttgagaggctgaggtgggagaatcacttgagcccaggaggtcaaggttgcagtgagccatgatcgcaccactgcacttggcctgggcaacagagcaagaccctgtcacaaaaaaaaaaaaaaaaaaaaaaaaaaaaatcaagatttgcaatagccagttagctcagttggttagagccaggtgctaacaccaaggttgtggatttgatcgccacgtgggcaaatgtattatcatttatgtggatggaggattgcttgaggccaggatttcgagaccagcctggccaacacggagaaaccccatgtctactaaaaatacaaaaattatgggcttgacacagtggctcgcacctgtaatcccagcactttgggaggctgaggcgggcagatcatctgaggtcaggagtttgagaccagcctggccaacatggtgaaaacccatctctactaaaaaaaaatacaaaaattagctgggcgtggtggtgcacgcctgtaatcccagctactcaagaggttgaggcaggagaatcacttgaacctgggaggcagaggttgcagtgagccaagatcatgccactacactccagcctgggggcaacagagcgagtctccgtctaaaaaaaaaaaaaaaaaaaaaaaccagctgcataaactggtctcaaaataaagaaataaattaaatttaaataataaaataaagtacataatgtatatctgtgaaaaaaaaaatcccatggaattgggggagaaattacagaaggaggctgggagaccagtaaggaggttgtggcaattttcaaagagtgagaactttgcaagtaaggatagagctatggacagatttgagagacattttaattttttttttttagatggagttttgctctgttgcccaggctggagtgcagtggcgcaatcttggctcactgcaacctccgcctcctgggttcaagcgattctcctgcctcagcctcccaagtagctggaattacaggcatgcgccaccatgcccggctaatttttttttttttttgtatttagtagagacagggtttcaccatgttggtcaggctggtctcaaactcctgacctcaaatgatctacccgcctcggcctcccaaagtgctgggattacaggtgtgagccactacgcccagcccaagttttctttattctccctttaaaaagccattagcctaaataccctccactctgtttcccttagaatggacagaacccaggcccttttcaccccactccaatcagccccaacacctaataggatcacttttttttttcttttgtaagagggagtctcactctgtcacccaggctggagtgcagtggctcaatcttgtctcactgcaacctccacctcccgggttcaagcaattctgctgcctcagcctcccaagtagctgggattacaggtgcccaccaccacgcccagctaatttttgtatttttagtagagacagggtttcaccatgttgaccaggctggtctggaactcctgacatcaggtgatctgcccaccttggcctcccaaagtgctgggattacaggcgtgagccactgcgcctggcctggccaggatcattttatagatggctaatgaagtgatgaatgggctggagcccaaggatgtagacatgggggtggttgtgaaaatggagtgatactggagtgcaaagatattctatgaatattagtaagatctgggaccaaggtgagggtaataacattaaaaatgtaaaccctgggctgggcacggtggctcacgcctgtaatcccagtactttgggaggccgaggtggtcagatcattaggtcaggagatcgagaccatcctgactaacacagtgaaaccccgtctcaactaaaaatacaaaaaaaaaaaaaattagctgggcgtggtggcaggcgcctgtggtcccagctacttgggaggctgagggaggagaatggcacgaacctgagaggcagagcttgcagtgagccgagatcgcgccactgcactccagcctaggcgaaagagcgagactccgtctcaaaaaaaaaaaaaaagtaaactctgaaaaccaaagacaaaacaagatgggggcaagataaattttggaagtattggccgggcacagtggctcacgcctgcaatcccagcacttttggaggccgaggtgggcagatcacctgaggtcagaattggagaccagcctgaccaacatggagaaacctcatctctactagaaacacaaaattagccaggcgtagtggcgcatgcctgtaatcccagctactcaggaggctgaggcaggagaactgcttggacccaggaggtggaggttgcagtgagtgagatcgtgccatttcactccaacctgggcaacaagagtgaaactccatctcaaacaaacaaacaaaattttggaagtattaagtttcctagtttatactcttttatcttctgcattagtgattaaagtttgttttttgagacagggctttgctctgtcacccaggctagagtgcattgacaggttctcagttcactgtagcctcaacctcccaggctcaagccgtcctcccatctcagccccccagtagctgggactacaggcatttgccaccaagctcggctaatgtttttgtattttttgcagtgaccgggttttgccctgttgcccaggttagtcttgaactcttggactctattgatctacccaccttggttttccaaaatgctgggattataggcgtgagccactgtacccaacctattattttttttttgttttgagacaaggtctcactctgtcactcaggctggagtgtggtggcacaaacgtgactcacttcagcctcgacctctagggttcaggtgatcctcccacctcagcctcctgagtagttgggactacaggcatttgttactgacctgggcaaattttatttatttagtttttgttttctttgggtttgtttgtttgttttagacagagtcttgctctgtcgcccagagtgcagtagtgcaatctcggctcactgcaaactccacctcctaggttcaagtgattctcctgcctcagcctcctaagtagctgggattacaggcttgcaccaccaagaccagctaatttttgtatttttagtagaaacagggtttcaccctgttcgccaggctggtctcaaactcctgacctccagtgatccacccgccttggcctcccaaagtgttaggatacagacgtgagccaccacgcctggccattttctttttttttgagacagagtctccatctgtcacccaggctggagtgcggtggcacaatctcagctcactgcaacctctgccacctgggttcaagcgattctcatgcctcaacctcccaggtagctggaattacatgggtgccaccacacccagctaatttttgtatttttagttgagatgggatttcaccatgttggccaggctggtctcgaactcctgacctcaagtgatctgcctgcctcccaaagtgctgggattataaggatgaaccactgcacccggcctaattttgtagagatgtggtcttgcccatgttgcctaggctggtcttgaactcctgggctcaagtgatcctccaccctcaacctctcaaagtgttgagatttttgttgttgctgttttgtttttgtttttgagactgggtatggctctgtcactcaggctggagtccagtggcatgatctcggctcactgcaacctccacttcctgggatcaagcgattctcatgcctcagcctccccagtagctgggcctagaggagcatgccattgcgtgctggctttttttgtattgtttgtagagacgagactttgctttcctatgttggccaggctgctcttgaactcctgggctcaagcaatttgccggcctcccaaaatccaaaatgctgggattacaggcgtgagcttttttttttttttttttttttggagatggagttttgctcttgttgcccaggctggagtgcagtggcatgatcttgactcactgcaacctccatctcccaggttcaagcgattctcctgcctcagcctcctgagtagctgggattacaggcgcctgccaccacgcctggctaattttgtatttttagtagagatggggttttgctgtgttggtcaggctgctcttgaactcctgacctcagatgatcgacccgcctcggcctcccaaactgctgggatcacaggcataagccactgagcccggccaggcatgagcttttgtagggcataccagattgaaaatgaagactgtcaggccaggcgtggtggctcacgcctgtaatctcagcactttgggaggcaaggtgggtggatcacgaggtcaggagatcgagaccatcctggctaacacggtgaaaccccgtctctactaaaaatacaaaaacttagccgggcgtggtggcgggggcctgtagtcccagctgttcaggaggctgaggcaggagaatggtgagaacccaagaggcaaagcttgcagtgagccaagatctcaccactgccctccagcctgggtgacagagcgagactctgtctcaaaaaaaataaaaagaaaaagaaaagactgtgggctgggcgcggtggctcacacctgtaatcccagcactttggggggccgaggcagtcggactacctgaggtcaggaatttgagaccagcctggccaacaaggtgaaaccccgtctctactaaaaatacgaaaattagccgcatgtggtagcaggcgcctgtaatcccagctactcgggagtctgaggcaggagaatcacttgaacccgggaggcggatgttgcagtgagccaagatcaaacctttgcactccttgcactctggcctgaggacaacagcaagacttgatctcaaaaaaaaaaaaaaagactttggactgggtgcagtggctcacaccagtaatcccagcacttttcgaggccgaggcggacggatcacgagatcaggagttggagaccagcctggccagtatggtgaaacaccgtctctactaaaaattagccgggcatggtggtgcgcacccgtagtcccagctactcgggaggctgaggcaggataattgcttgaacccgtgaggcagaggttgcagtgagcggagttcgcaccactgcactccagcgtgcgcgacagagactctgtctcaaaaaaaaaaaaaaaaagaaataaaagaaagacccaacaccacatcaggacatgtaattcttatttatttttcaccctcaacaaggaagaaaggtctctccctcaattctgctcttccaatacttgaggataggcacccctaaccctccttcctccagggaggcctcagcatcagtgtctgtggacgtagtctctgaagagtgcttcagctgatggggaaggagaaactcaagacagagatcctcctagggatggcgtcactttcctgccaactttctcgttgcctctccttgaaagcagaagaagtgccagccctcagcttccgtcagatcttgggctcctagggccttgtacaagtccatggccctctggttccagtccaggacggccaggcggaattgggagcagcccttatccaaggccacctgtgggagaagacaacactaacttttctggggtcaaaaaagaaaaaggttttctcactccctctttcaacccgggtcccccctccatatacccttgcttcttcaggtcctcacttgtcgccccacccatctcctcacctcagccacctttttgattattttggaaccaatcccttgacctgttgtggagagaaagaggcaaaaaatagctattgtttgagctgaaggggatcagaaaatgacaccggctgggctctggggacaggggataacagtggggtctgtggggtgctttgctcccaccccagcctcagcttctgcccagtaccccgatattccggcatcacatagatatcctccagataaatggtgcgtcccttccatgtactgtagatgaaatagtatatcccatagcccaccacgcagggccctgagagagagaaaaggggagtaaggcttctggaagcctgtggggagacctctgaggccggctggagaggtggacttctaagggccaggtgctcttacccagtagcttcccgggcgctggaagaatctctgctaccaaacagtgatagaaaggattgtctccaaagccatctgctctcagggctgccgagattggagttgtgacaaagagatagagaaagaggacgtgggtgtatgcccagcctggagctgtcgcctggggaacccatccctcatttcctccccagcctccgccagaacctgggcgctgagcccccaccttcttcactgatcttcacctgatccgagagtttttcgaattcggctagctcctaaggcgtgggtacggaagctagattagagcagaagggccccgctgctccccgagcaggttcccaaggcgagcccctccccctgcccccgcctcctacgaccccgctctggccgcgccactctgacccccgggttaccggcctgcagtcttcacccgaatcagcctcaggatatctccacagtctccctccttggcctctcggatccgcacggaagccatccggatccccgctgtctgggaccaaagtcccagggcctcgcaaacggcaactagaccccttaaagggcctacggacttggatcctgaagagcctgagagagcggggtggcgggagtcgggggggacggcggggtagccgcggcctggtaagtggagctgggattccggcgccgtacgggaggagagagtaggccagcgaggcgatcctctgtccgggcatagccccaccccctcgaattctgtcgcagcagggggcacaactgtcagccaatcagcttggagaacaggcacggccgcgtcccccccaagccccacccccgacagctggatcttgtgactgggctcctgggtagagttcaaggttggagtgaagcggcttccttgcggttgtgtgggtgtcccaacctgggtcgagataccccgcggttcaaaggctcccccgcagtgctttttaaattgacatatgcagtgataacctgctttagcctcaggctcactcacccgcccagaccctgggtaagccttaagaccctcagctctgaaagctgtttcctgcagctcttgagtagcatgaagtgttacctcttgggggcatttgcattttttaaatgttttatttttatatttatttatttatttatttttggagatggtgtattgctttgtcgcccaggctggggtgtagtggcgcgatctctgctcactgcagcctccacctcccgagttcaagcgatcctcctgtctcagcctccggagtagctggaactacagtcgcgcaccggcacgcccggctaatttttttttcttttttcttctctttttttttgttttaacggattctcactctgtcactcaggctggagtgcagtggcgcgatctcggctcactgcaacctctccctcctgggttcaagcgattctcctgcctcaccctcggagtagctgggattacaggcatgggcaaccatacctggctaatttttgtatttttagtagagacggggtttcactatgttggccaggctggtctggaactcctgacctcaagtgatctgcccgcctcagccttctaaagtgctgggattacagatgtgacccaccaagcccggtctgtcatttgcattttaaaatgggtcatggggtgggcacagtggctcacacctgtaatcccagcattttgggaggcagaggcaggcggatcacctgagatcaggaatttgagaccagcctgaccaacatggtgaaaccccgtctctactaaaaatacaaaaattagacaggtgtggtggcgcatgcctttactcccagctactcgggaggctgagacaggagaatcgcttgaacctgggaggtggaggttacagtgagccgagatcgtgccattgcactccagcctgggcaacaaaagcgaaactccatctcaaaataaataaataaaataaaatgcgtcagggagggtcgggccttgtggctaatgcctgtaatccaggtactttgggaggctgaggtgggcggatcatttcaggtcagaggttcgagatcagcctgggcaacgtggtgaaatccccgtctctactaaaaacacaaaaaaatttgctgggcgtggtggtgcgtgcacctgtagtcccaactactaaggaggctgagacaggaggatcgcttgaactcgagaggcagaggcagcagtgagccgagatcacgccactgcactccagcctgggtgatagagcaagactctgtctaaaataaaataaaataaaataaaataaaataaaataaaatgggtcagggagtgggtgatttctactgctagactgtttaggccctgtaataaatggataagggaagataactgagaggcggggggcaggtcccttcttaatattcactgaatcatacacacagacaataccttcttgggagacaggcctcagaggcctgggaaaagactgggggaggagttcagaccagatgccaggcactgtgcctgcattttctcaatgaaccctctttcacagtcaccccgtaaagtattattttcctcattttacagacaaggacactgaagcacagaggtgaagtgacttgcccaaggtcactcagctagaaatttaggattccattatctcatttctagtcctgatacaggatgctacttgggacgcaggggaggactgtttctagacctcaggcctgtgaatgcaggctccccgagtggacagaaatcttggaggacctagatcaggccctagaggaggagaggggagatggaatatcctctcccagttcagaaactttctcggcagtggaggatgatagtggaggggactctgtccttcaccccattgatccccagaggggtgatagctgagtcttgtgactgggcccctgggcaggggtcaagggtcagtgcccctgtttcctttaccccctcctccccgggcaacctttaaccctccaccgcccacacgcaaggctgcctgcctctacacattctcccaagagttgtctgagccgccgagtggacagtggctgattatggagagcagaggcccactggctacctcgcgcctgctgctgttgctgctgttgctactactgcgtcacacccgccagggatgggccctgagacctgttctccccacccaggtgcaggagcgggacagggcactcagctcatgcagtcttcccttctctcctctggccctgtagcagggcctctccctctgtctgtctctgacatgtccctactcagctttgtttgttttctctttctgatagagtgcccacgaccctccggctgtccacctcagcaatggcccaggacaagagcctatcgctgtcatgacctttgacctcaccaagatcacaaagtatggggttggcctagcccttgacccagtcccctggttctgccctctctccatcagctcttctcttttccctgtcttcctttccttatctgtgaacaccatctcccccaaacccacactggttctcaaaggacacatgacatacacaatctttccttctgtgtccttccagaacctcctcctcctttgaggttcgaacctgggacccagagggagtgattttttatggggataccaaccctaaggatgactggtttatgctgggacttcgagacggcaggcctgagatccaactgcacaatcactgggcccagcttacggtgggtgctggaccacggctggatgatgggagatggcaccaggtaagctagctctggtcctcaggggagggatgtctggagctggtctgaggaaagggaacaaaaccaagttattgggcatccctctaccactgtcatctcgtttaatccacacgaacccccacaaagtagctattcttggccccatcttttctgatgggaattctaaggctcagtcagtatataagtgacaagagctgagtgacccaaggccaaggatgctagctgcttctttaaggcatgttctttccactatagtactaggctgcctcacaggaaggtggcagaaacagatcccaggggcctctgattttgcttcccaccttcctgcaggtggaagtcaagatggagggggactctgtgctgctggaggtggatggggaggaggtgctgcgcctgagacaggtctctgggcccctgaccagcaaacgccatcccatcatgaggattgcgcttggggggctgctcttccccgcttccaaccttcggttgccggtaactacaccccaggggtggaaccctagccaagacttggtaaagcactgctgggtggctggccgtgggaatctaagtccacacttttagggagaagggaagggttgagagctgcaagggggaggccaaatgctcagaggggagtcaactgagggcagggaggtcgggactgcggctccgatgccctgatttctacatccccgtatcttatctctgtcacactccagctggttcctgccctggatggctgcctgcgccgggattcctggctggacaaacaggccgagatctcagcatctgcccccactagcctcagaagctgtgatgtagaatcaaatcccgggatatttctccctccagggactcaggcagaattcaatctccgaggtagatttcctcggagtctatttttcccaccctggccagctcagcctgcctctgtccccctctaccactggcccctttcctccttgagaccccagctttgaggcctcaggataatcatttctccccacagacattccccagcctcatgcagagccctgggccttctctttggacctgggactcaagcaggcagcaggctcaggccacctccttgctcttgggacaccagagaacccatcttggctcagtctccacctccaagatcaagtaaagggggacagtggggcattgcctgtattcagtggagcctggagcaatgagggaagaggggagtccaacatgtcaatattaggaaggtttccagcccagggaacataacaagactggctccacagaattgtttttcattaataattagccaggcatggtggtgcttgcctgtaatcccaggtgctggaggccaagaccagaggatcacttgaggccaggagtttgacaccagcctgggcaacatagcagagacctctgtctaaaaaaaaaaaaaaattagccaggcatggtagcacatgtctgctgccctagctatttaggagcctgaggcaggaggttcacttgagcccaggagtttgaagctgcagtgagctatgatgtgccactgcactctgacctgggccacagtgagaccctgtctcaaaaaaataaaaataaaaataaggcttatggatggcactcaggtgggtggtaggggcgagggacatatcttgaagctccccacagcaagcaaacagttttgacttagactgcatatttacttggggcaggtgtggtttcaaaaagggtcaagccaaaaaaaattggggcaggatttaagtggtgagaatggccagtaggtggaggcatagcgaagaggcagaattaaggcagctaggggtgaggccacaggcagtaggcccggctcattcttccctctctctctaccgtccctttcccacacactctgcagaaggtggtgttgtcttctgggtcggggccagggctggatctgcccctggtcttgggactccctcttcagctgaagctgagtatgtccagggtggtcttgagccaagggtcgaagatgaaggcccttgccctgcctcccttaggcctggctcccctccttaacctctgggccaagcctcaagggcgtctcttcctgggggctttaccaggtaagagagaatgatgttcaagttcatgagcacaacattggaaacagctcaagggaggcggcacattttgaggggaaggaaacctctgggagggaagaagaataggccacaagaagaagatatgggggcagtggaaggtagtgcttttgcaaactcaggttggaggagtggaaaagtggggagaagattctggatccgagccaccttaatgctctaatgccacctttgcactacctccctctaggagaagactcttccacctctttttgcctgaatggcctttgggcacaaggtcagaggctggatgtggaccaggccctgaacagaagccatgagatctggactcacagctgcccccagagcccaggcaatggcactgacgcttcccattaaagctccacctaagaaccccctttgaaagtta

SEQ ID NO: 195 - DNA, 32744 bp, Homo sapiens
  source 1..32744: mol_type = other DNA
gaggccggcaccgccgagccgccgccattgctggaagcgttcccgccctgctctgcgagttccctcagttgtcctcagttcggccgccaggtactcgttgtcccgggcgcctggcctcggttgcccgccgcccctcccttggcgcttggctcccggcggcgtccggggcgtggccgttccctctagagcccctgtccctgagcggacccgcccactcctgagaggcgattggggctgggcctccttcccgagtgtgggttcagtctccagctggcctccctcacaggtagggccgcgtgccctatgcggcctcctagtccgggtccaaacccgggaaccccctccctgcgggcctggcggcgctggggttaaaaagagccgggcgcagggcgcagggagtcgagtagggcgggcgggcccctgacccgactttcccggtcttcccagccccgcgccttgcaggccctgaggagggcatacccgaagtgggtagaggagagcagttagggaaagaaggcgaggttggcaggagcatatccgctctggcttctgaactggcagggatggaactaggttccacatcgggggacctgcgctactcagtaaccgaggcagcttttcctgaaatgtcacatttcaaatactgtaatcaccttttaatcacttgtcactccctgacatgacaatggtattattgcattggttgggaaatgctggactggtacatggcgctgagattctcagcaaaaacatggacccttcattatttctaaataactgcactggccaaggaagcaaaacaagtaaagtttctccttaagtctctggatacgtttgcaatagttggaaagacagagcttgtaaatagggaaattataactggggaatagtggcctagatatcttctgcataatgacaaaggggacagtagaaacatataaggtggctactgtcatgtactaatagctgattcgttgtgctcaagtgacttgcctgtggtcacagttttacggtagccaaagcagggttagaacctggggatgtggccagccactctgggattttattcctattccacactcctatgtataggtagatacttcttcttgtctgcttggagagtacagaaaagcagaaagaagggtaaacatcacagccccaggtctcagaggtctcagtagagttttgggttactcagtctttttttctatgcattacatttgcacaattgagatcaagctgaatatattaaatgttaaatattgtttattctaattataaaataaaacaagggatttattgtagtttggttgttaaacatatgttacgagcataatctacataatctacataaagtattgccaaagagtttattaatatttacaaatattttaaaaatgatgactcagctcactcttgataaatgttaaagatgcagaaaaccattactctagaccttcggaattgaaaatgccttatgttgctctttgtaggtctgctttagtgttcgggggttgcgggatggggcaatattcttggctcattttttttctttgcaaccttgtaaaacttgggggtcagtgtatgggcttgggagggagagtcagttttcaagctctctgaagtaatatgcaacatcatatatgcatgtgcattattttgtggacaaggtcagattctcagatgggtccgtacccccccaaaaattaagatttactggtatgcatagattgtgtagtggtgagatcagggctttcagggtatctgtccctagaataacgtacattatacccattaagtaattccttattctccacccccctcccactccttcacccttcagaatccctattgtgtaacaggcaatatttcttaaaatattacactaaaactaaaacattatataatttaacattatataattaacatgttaacattatattaaactaaatatttcttaaggtgtacttgttcaagctgtatatttctgtgcctcacatctagagatcctgattttgatcttggatggggccaaataatttcctttttaataagcatatccagtgagttttttgcattctcagatttgagacccctctagttatacatgtggcgttttcattagaaaacaggagaggagtcataattttcattagatttgcaaaaggctctatgacagaaaaatctagagaaacactggcataaggcaaaaccacttactggttaccttgaggcttcaatacaggaatcccctcagactattctttctttacctcttttatctccacactgtaccgctttcctccctcaacttctcattgtttctcttccaccaaaaccttttcattgtgcctaggaaagccccagtgtcatgaaacaggtcactctacatttttaagatactcactttttttttttttttttgagatggagtctcgctgtgtcgcccaggcaggagtgcagtgacacaatctctgctcactgcaacctccacctcccaagttcaagcaattctagtgcctcagcctcccgagtagctgggactacaggcgtgcaccaccacacctggctgatcattttgtattttttagtagagtcagggtttcaccgtgtcagccaggctggtctcaaactcctgacctcaggtgctctgcccgcctcggcctcccaaagtgctgggattacaggtatgagccaccatgcccagccaagatatttacatattttcttgatttaactaaccctggtctcctccttgagttaatacattaatctgacagtatatgtttcagtatacccatatctagttaatttttatatctctaatattctttgcattcttgataaccttgctttatatattcttgtttttcagagaataatggttaagtacttcaagtatcttttcagatgagcttctgattgttagacactgtaaggttagattaagttctgctatgtttattgagcaaagctactgaacgttatgagaagcaaggtgcacattcagggaaggagcagattccacatgtttaagcataacaaaggccctacttgcaggaccatataattgcttataacactttttgtacaaaaacttaatacttattatgtcactgccctcatgaataaagattcatgaggctagtattaccatcctagaagaatttatattgacaatctgtactgtttgatatcctacatcaggcactcctggttcttgaaccaaactcagcctcagcaaggccatacatatcattagccaaaggtagaaaagcagggcccaagcatccctggaaaagatctctgccaccctgttgctccataggataaaacttttattaggtatatacttttttttcaatataaaaagactatagcttaatgctttgtgcactgaatttcatgtctcttctattattattattattattattattatacctgcttcctttttgtttaagtttgcctgatatagaaaggataaagatctatttgaatatcagattcggaggggtaaatcaagatttccaatatcatttaaattttgaagtcgtagtgttctctttacatgaaacagatctctgaaaatgttaggaaatagactcttcgtgggaaaggcaagaaaaggagattcttagaatatttaattgttagatgagtaagtgattgtggcaaagaaagactgaagtattttttttcgtacttcacacagcatgttgattcagtggaaaaggtatgggctttggaattagattgatttggggtcatgtatctgcatggccttgggtactttaatttttttaggttcagtttcctcatctatggaatgggaatattattcctactaggttgatgtgaaaataaaatgagaaagtattttaaaacctccttgtacaatggctagcctgttagttgtgactatagttaacagtgctaaaatcttgagctctgccggagcaagggtctttgtccctcactgatcttaagggttactcttgtgcttccttagggaggtcatgctcacttgtatgtcaggattccaacttggtgagtctgaaattccccaggcaggattggtttccatggcttatttctcttccttaggtatgtctttgcaagactccactctttccagagaggggaaaccagagggagagattatggctgctgtgtttttctcagttggacgcctggtaagttgggattccctgtttttgacctactatcttggtttgagagcatgtttactttgcctgaaggcttgcgacttctctacttcccccgacaccccttctgggaactcaactaaatagacccatgaaaattgggttcacagtaagggtagtaaactatgggacgattcactatacttacttaaccaaatatcaggacacatgatctttcaaaaaatatctgagctgtcgttagttatgacaggcatctttaattttgatattaaatttgtattgttcccaggaaattttagttatttgtgggacagcaaaatggaatatttttcaattggaaaattttatataggaaattatggggaaaatatatgtacacaaacacataccccagccctgattcacaggaaccattccccttgtgccactctcagtgatctcttttctactcattaagaagtgattagatttaatagattacattgagagaatatgtttaagacagtgcttggctctagggaatttacagtttcattgaggtaaaatgtacaaaagtaataattacattatttgggtgaacagtagttgcttatcggtatgataaagatgagtgctatgtaaagaaagaaatgggatgatagtgtgggctaaactggtcatagaaagttcataaggatagttagatttaagctggtactgaattacaagtgagattttaattgtcataaagtatttatgaagatagttcaggtgagaaacgggtttaagggcaaggcttcagaggcagagaacagtgggtgagcttgtgattcaagttggaaagttgtgacagatagggctggaagttagatatttaagatgaatcttttaatgtttccctgaagacatttaaatgtgtgtgtgtgtgtgtttgagtgtccttgggattattattaatgtgataaaagctgtgttttagcagtgactttaaaatagattcagaagaaagagaataccaacaaatataatttgttatagtaatgatctgtaataacccgtgattgtggtcttttattctttgtagccagaatatgtaacatgtaaatagtcctttaaaatacccttgaaaagataaataaaaccaaaatgttgcccttgatcaccaggtataaccatatttgtctaatcgtgtatcacgggatcaacccgtctctatcagagatagaagattcacatcatcattaattttctggaatctgaatatttgtgcatttttagacaagatgttgttgagggagagttagcataacattttttcatagtgatctttatgtagttttattatccataatttttttaaatggcacagcatctgaaatggataactacaactagaaggtaaagtaaaatttcattgcattcataaaatcaggccctcatgggctgggcgcagtggctcatgcctgcaatcctagcactttgggaggctgaggtgggcagattatctgagcccaggagttcaagaccagcctgggcaacatggtgaaactctgtctccacaaaaaaaaaagagtacaaaaaattagccggacatggtggtgtgtgcctatagtcccagctactcaggaggctgagacaggagaatcacttgaacctgggaggcagaggttgcagtgagccaagatcgccccactgcactccagcctgggcagcgacagagtaagactctgtctcaaaaaaaataaaaaataaaaataaaaataaataaataaataaggccctcatggagatacagtttctaagttttggaagaaaacaatgttatgagaggttgctgaaatatttcctgagtgactgttgagccacatccccccaccaaacactgtaatgatttttcaattgtagaaaacagatagtgttagtaggttttgagtgttattcttgagcaagatagatactttctgagaaatagatttcatcccaatatgaaaaagtagaattatgtagtgtctgaaggcactttattataagtttatttttgttttgataggttcttttttaaaagcagttatatctttttcaatcttacgtgtgtttgtcattgtcccaaacaaagtgaaagattatgattgcatgttacaatgggactttgatttcagccctaagtaaaacagtaggtgaggtcatcctgtatacactgcatccacagtggattggtggtgcttgttgaggctctgctgtaagtcataggcagcctatcactgaatgatcttatcctgtatcccatcagagccctgaagttacccagccagatgaagatcttcaccttcaggcagaagaaacacaattggtaaaggtaatacctactgttgtacatataatgaatacagagaaaatgcctattttactgcctctgattctcaatgttcccagttaattgcaagttcacaatgattatttgattggtgtggtagccccagggctggtggcatcaatttaacagatttcatttctctcagaggtggcagccgtaatctagccagatagtcacatcgtgattactaatggtaaaatatcctatcattacgtagtctgaagcttgtgctgcattgtaagacccaatactgtgccattaaaaaataccaagagtacatcaacattgtggaaatagtgttaagatgagtttaaattggtttagatattttatttcttcaggatttcttatatgtgagtagtgaatccacttcatttttccagaaaaaataaaaatcagaaatttgttgtgataagaaaaattatccaaaacttagaaataaataaaagataaatgtaggccatttcagagtcatattagaccattgtcttaacaagcctgtctaagggttatctgacatagcaggggagggttatgttgtttgacttaccatttactattaattaatatttagatcctaaaagttagatattaacttgtagaagattgaaacattgcaattatttttgctaggataaaagataatccccaaagttatggtattactgtcctgtaggacattaaccaggtttgtatccaattttgcagtcttattccagcattcttttttccactatctgtacatcggtttcttgcatctcctttaaacctgtcttgtcaagcttctgatccctcattaatgacttatgtaaatctttggcaagtattcactatgcttttagaagaattatgtttttaagttttttaaaattatcctttgaaagttggttttattccagagatgttttttgtaaaatgtggtttttacttttgcttctatgagaaaatacattctgagattcagttttatacatagtatttttgaaatgattttttaaattctttttaacatacgatagcttagattcttaaaaacttagagtagaaatattcatagttttagactttgaaccataaaccttagaaaatgccatactttttgacatggtgtacaattcatatggtttatttttgttctgacaaagggagtccctggtagaagattaattctgtctggctcttccctaaattctgcatcctttttattatacatactaaacatagcttagtttaattttacttttaatagaaccagtgatttgataataactatcaataagttattaatttaatttaattggttttgtatttgcttgattttcttataactattgctgacattttcttttttttttttttttttttgagatggagtctcgctctgtcacccaggcacagtggcacaatcttggctcactgcaacctctgcctcccgggtacaagcgattctcctgcctcagcctcccgagtagccgggattacagggacctactaccacgggcggctaatttttgtattttcagtatagatggggttttaccatgtcagtcagactggtcttgaactcctgacctcaggtgacctgcctgcctcagcctcccaaaatgctgggattacaggcatgagccactgcgcccggctgacattttcaattagtgttttgttttttttttttttgtagcgtagtcctttaaaagaagaaatttcagtgctaaatgtcttttattttacaggtacatgttttttagtacaaacgtctaacaaagaaactatagaagattgatgaagaactcttattgcatgattattataatcagaccaaaaggaacacatcaagacaaagagtcttgatattttctgagtatcatagtgccagtatatatgttgtaacttttggtaaacaacttaatttaccaacaacaaacaactagataagcatagcctcaagatgaagaggagataataagcctttaaaagcctcccagtaaccgggactaggcacccaccaccatgtccggctaatttttgtatttttagtgtacggggtttcaccgtgttggccagactggtcttcaactcctgaactcaagtgatctgcccacctcagcctcccaaagtgctgggattacaggcatgagccatggcacccagctgggttattatataatcttgacgaaggagggaattctgatgaaattttaatgagatcagggatgtgataggcttacagcaaaataggctctgtataaaagagtcaataccatgtccagactgcataatggatctggagtcctatttccttggaaaatacaaagttaaatgtaaaatgacatattcagaaacccctcatgtgaaagtctgcatctgggttgcaaataactgcttctcagcatcaaagtcactttcattctttctgatgtgatttcagactacacaatttctgacagtctatgactttaaaagatgaggtgtctaatgagtaagaaagcagtagttgctcaaaacgggtaattatgacattttacagctgcagaatgactttagaagaaatattgtttgccgttaacttgtcagttggttttatctgtatctctattctagcttgaggtgtggaagggcagaattttactttctcagtataagctaatttttactttctcgaactctatcaaaaagaaacttttacatcagtctggcttaatgttatttgcccagtgtctttgaggtagagaatatgaggcttatgatttctggtttccattgtatgcatcagtgtattatcttagaatcaacaatttttgggtattatatattaggtttccaattttatttgtctaaattatgaatagagttggtctgggatggtgaaatttgaaataaatgggtactcttttagctccctaggaactttttgcaataaaaataaaactttagttatagtaatagtttcttcagtttgacaaagttcagtttctgaataaaggatacttaagtgaatttactttcacaagatcaaaatgccctcaacattcttagaagttgttttagtgtgtttgttgccatataaaggcatacccaagagtgggtaatttataaagaaaaggggtttatttggctcacagttctgcagtttgtacaagaagcatactgccagtatctgcatcttgtgagggcctcaggctgcttccattcacagtgaaaaggaaagagagacagtgtgtatagagactacatagcaagagagggagaggggaggggccatgctctttttaacagccagctttcatgggaactactaataatagagggagaactcactcattaccatgaggatggcaccaaggcattcatgagggatccagccccatgacacaaacacctcccattaggccccatctccaacatggggatcagttttgaacatgaggttttgggggaaggcatccaaactgtcgcagcagttttatgtttcaaagttaactcacacttctacattctacaatcaatttttcattcgttcttcacacaacacaaacctttgattttttatgattatttatttacctgattttcccctgggagggaagaaaaagattgtccttctggcagtatttttaatgacactttactaagatgtaattaatatatcataaaattcataaagtatacatttcagtggtttttaaatatattcacagagtttgtaaccatcactgtatggaattacagaacattccatcaccctgaaaaagaaaccccatacccactagcagtactctccattccccctccttacagcctctgacaaccactaatcttttcatctgtatagatttgcctattctggacatttcatataaatgaaatgatataatatgttgtccttggtgactgctttcattttagcataatattttcaaggtttatgtgtgttgtagcatgtgtcagtactttattcctttttatggccaaataatattccagttgtatggatatagcttatccatatcacttatccgtttgtcagttgatgagtatttgagttgtttccactttggggcaattaataatgatgctaatacatttgtgtatacgtttttgtgtgagcatgtgttttcatttctcttggtatatacctagggttggaattttgctggatcatatgataattctatgttaaaccatttggagaactgtcagattgttttacaaagcagctgccccatattacattcccaccagcaacgtatgagtgttgcagttgctctacttcttcaacaacgcttgatattgtctggcttttttgattatacacatcttattgggtgtgaagtggtagcttactgtatcttagagactttatttccctaattactaagaacttccagcatcttctcttgagcatacttattggccacttgtatatctcctttggagaaatatctattcaagtcctttgcccattttttattgggttatttgtccttttatgtttgacttgtaagggttctttatatgttctaaatacaaatcccttttcagataaatggtttgtaaatattttcttacattcttcggttggctttttgagtttttgatgatgtcctttgaagcacagaagtttttaattttaatgaagtcctaatgatctcttcttgtcttttgtctagtgtgcttttggtgtcatatctaataattcattaccaaatcggaggtcatgaagatgttcctctgtctttccttctaacagttttatagtttagttcttacatttaggtctatagtccattttgagttaagttttgtttatggtctgaggtagagattcagcttcattctttggcatgtgaatattcagttgtctcagcactgtttgttgaaaagactattctctactcattgtcttagtacccttattaaaaatcaactgaccattaatgtagggatttattcctagactgtcagttctattccattgatgtaaatgtctatcctaatgtcagtaccatactgtcttgagcactgtagctttgaactaagttttggaaatacctttgaagtacgttttgaaattaggaggtatgagtgcctcacctttcttctttttcagtattgttttaaaaaaacaaattcacttccaaatgaattttaggatcagcttttccatttcaggaaaaaaaaagccagatggaatttttataagtcttatgttgaatctgttgatcaatttggagagtaatgctatattcgcaagattaagtcttccatacttgaacatcgattgtcctcccatttatttatgtattctttagtttctttcagttttgtagttttatagttttcagtgtgcatgttttacacatcttttgttaaaacttcattcctgtgttttcttatttttgctattataaatgaattttttcttaatttccttttgaaatagttattgatagtgtatacagataattgacttaaacacacacatatagatcttgtatcctgaaccttgctgaactaggttattctaatagaactaaattgtttgtgtatatgtggatttattagggttttatatgcaagataacattaactgtatagagagattatatcatttgcaaatcaaaatttgctttctcctttcctgtctgggtaccttgtatttcttttccttttcaaatttcccttgcaaaatgtacgatataatgttgaatagaagtgagaaggaatgtctgggcatggtggcccatgcctgtaatcccagcactttaggaggctgaggtgggtggatcacttgaggccaggagttcgagactagcctggccaacatggtgaaaccctgtctctactaaaaaatacaaaaattagccaggcatggtggcacacacctgtaatcccggctacttgggatgctgagacgggaggatcccttgaactggggaggtggaggttgcaatgagccaaaattgcaccactgtactccagcctgggcgatgagcaagatcctgtatccaaaaaaaaagagagagagagagaaagaaagaaaaagaaaagtgagaagggacattgttgtctttgtgatctcaggaagaatgcattcagctgtttaccattaagtatgaggctagatgtaggttttcatagagagtctttatcaggttgatgatgtttgcttctatttttagtttgttgaattttgtcaaatacatatttgaatctattaagatgatgtgcagttgttgttctttgttctattgattgatttttttgatattacataaaccttgtattcctaagataattcccatttggctgtagtatatgtggcattttagttgttgctgaatccactttgttagtattttgttgagaattttgtgtccatattcataaggatgctggtctgtggtgttcttctgaggtctttgtctagttttggtaatattggtctcataaagtgggtttggaatttttcccttccattttttggaagagttagtgaaggattggtattaattcttcttgaaatgtttggtataattcacatgaaaccatttgaacctaggcttttctttgtgggaagtgtacttgttatagatctatccagattttctgtacactgagtcagttttggtagttaatgcctttctacgaatttgtccatttcatctaagttcgcataccatggttcatagtgttcctttataatcctcttatttctttaaggtcagtaggaatgtcttctttttcattctgattttagtaatttgtgtcttctctcttttttttcttagtcactctagctaagggtttgccatttttttatctttccaaataaccaatttttgcccttttttatttcctctgctgtttttctgttctctattttatttccattctaatatttattattttcttccttcagcttcctaaaaaatttagttcactcttccttctctagttccttaaggtataaatttaggttactgatttcttctttttaaattgtaggcattttatagctataaatttccctctgagcactgttttcactttgtccagctactaccgttgaattatctctttgccccttcaattttataaatttttacttcttgtcttatgggactcttttgttaggtgagtatatgtttaaatttgttatgtctcactggtacatttatttcagttattatacttttcaactctaaaatttctatttagtgaaatatcattctcacaatttcttttaaatctttatacatggttttctttaggtctttgaacatatttataatagctgccttaatgtctttgtttaataagtacaatgtcttgacttcctcggaggtaatttccattgatgctttattttttactgtgtatgggtccatgctttcgtgtttctttgtgtgtcttataattttttgttgaaaaccagctagttattttaaataatataatgtggcaactctggaaatcagattctcccctctctggggtttgttgttgcagttgttgctggtgctgttgctttgtttagaaactttcctggaccaatctgtaaagtctgtattctttatcatgtatagccactaaaatatctgcttggttaacatggtgatagttaatgattagacagatttctttttgccttaaaccagtaagtcttcagcgactgccaaaggggcctttgtatgtgttgggcatacatttccctcttaggcaggcaggttgcaactctgccttagtcatttcttgcttgtacagagcctcaaggtaagctatagatgagagatgagggccttctcagattttttcctggggctgagttcttggtgaagaaagaaaacaaaacccagtacattggttacagacacatgtcaagtgattaacaataaagtttatgaactcaacatgtcctacattcgccatgtcttattattagcagaattatctaaaacaagcttcaaaaacctaaaggttcaaaactacaaagggatatatatatacataagacatgtatgacaagcatacatatctaaatggtagaaaaacaccccagaggaaatctttcttctgatccagaacagaccttagccaaatatgatctaagttgacttctttgcctgagtagtcagctaatcagggctcttagtttactagatcatggatcagaatgattacaaggttacaagctggaattctcaatatagactgcttggatttgaatctagattcttctgcttctttgactttgggcaagacatctaacatctctgtgcctcactttccttatttgtaaatagcaccttccttattgtgatgattcattcagtacattataagcccttagagcagtctctgatacataataagcattatactcacagaagtggggagagtagtttacatcccttaaacctgttccccctctttttattttattttattattgttatactttaagttttagggtacatgtgcacgatgtgcaggtttgttacatatgtatacatgtgccatgttggtgtgctgcacccattaagtcgtcatttagcattaggcatatctcctaatgctatccctcccccaaccccacaacagtcccccggagtgtgatgttccccttcctgtgtccatgtgttctcattgttcaattcccacctatgagtgagaacattcagtgtttggttttttgtccttgcgatagtttgctgagaatgatggtttccagtttcatccatgtccctacaaaggacatgaactcttcattttttatggctgcatagtattccatggtgtatatgtgccacattttcttaatccagtctatcgttgttggacatttgggttggttccaagtctgctattgtgagtagtgccgcagtaaacatacgtgtgcatgtgtctttacagcagcatgatttataatcctttgggtatatacccagtcatgggatggctgggtcaaatggtatttctagttctagatccctgaggaatcgccacactgacttccacaatggttgaactagtttccggtcccaccaacagtgtaaaagtgttcctatttctccacatcctctccagcacctgttgtttcctgactttttaatgatcgccatcctaactggtgtgagatggtatctcattgtggttttgatttgcatttctctgatggccagtgatgatgagcattttttcatgtgttttttggctgcataaatgtcttcttttgagaagtgtctgttcatatcctttgcccaccttttgatggggttgtttttttcttgtaaatttgtttgagttcattgtagattctggatattagccctttgtcagatgagtaggttgcaaaaattttctcccattttgtaggttgcctgttcactctgatggtagtttcttttgctgtgcagaagctctttagttgaattagatcccatttgtcaattttggcttttgttgccattgcttttggtgttttagacatgaagtccttgcccatgcctatgtcctgaatggtattgcctaggttttcttctagggttttcatggttttaagcctaacatgtaagtctttaatccatcttgaattaatttttgtataaggtgtaaggaagggatccagtttcagctttctacatatggccagccagttttccgagcaccattttttaaatatggaatcctttccccatttcttgtttttgtcaggtttgtcaaagatcagatggttgtagatatgtggcattatttctgagggctctgttctgttccattgatctatatctctgttttggtaccagtaccatgctgttttggttactgtagccttgtagtatagtttgaagtcaggtagcgcgatgcctccagctttgttcttttggcttaggattgacttagcgatgtgggctcttttttggctccatatgaactttaaagtagttttttccaattctgtgaagaaagtcattggtagcttgatgggggtggcgttgaatctataaattaccttgggcagtatggccattttcacgatattggttcttcctacccatgagcatggaatgttcttccatttgtatctcttttatttcattgagcagtggtttgtagttctccttgaagaggtccttcacatcccttgtaagttggattcctaggtattttattctctttgaaacaattgtgaatgtgagttcactcatgatttggttctctgtttgtctgttattggtgtataagaatgctagtgatttttatttccttctcctgcctaattgccctggccagaacttccaacactatgttggttctgtttatatgctggattacatttattgatttgcacatgttgaaccagcaaaaactggaaacattccctttgaaaactggcacaagacagggatgccctctctcaccactcctattcaacactgcacccggctgagattttgattttttttttttttgagacggagtctctcttcgtgtaccaggctggagtgcagtggcgcaatctcggctcactgcaagctccgcctcccaggttcatgccattctcctgcctcagcctccctagtagctgggactacaggcacccgccaccacacccggctaattttttgtatttttagttgagatggggtttcaccgtgttagccagaatggtctcgatctcctgacctcgtgatccgcccgccttggcctcctaaagtgctgggattacaggcatgagccacggcgcccggccctgagatttttgatttttaaaatattttcagcaatgtcattgcatattgctggtatataccactagaagacatatactagctaactgaggcctttcttttatgttagcagctgctgatgattctttaattcattagtagttgcaaattgtgatgttctaattcttttgttccttcttcattcattagctaaaatacttccataaagagaaaccttccctcagcaactatttaattatgtttgattacaatacaaactatatgtactttgcataggtaagaaaggacaaaagtttgattctttctctttacttaccagtttccaggtattctccaaagataatagatgagatttttaaaataatgtatcatgaatgtaactgtattagatgcttttgaaatccattgcagttattatccttattgatgctcaaattgtcatatcattggccagtggaagcctcttcaagttgtctcctgtgtcttagatatgaccctagtagtctttcatagcttccttgctttttaatatgtcagggtattctaggccctggttccttttagggggaagtaatatttagagcccacagtctggcttgcatagtgccaccttattggttatggtttctgggccttttcagtggctgaagctaggaaatgtgtttttttttttttttctcttaaaatgcttcatgaatctctagtgatacttcctattcaaactcagaactatggagtttttaacctcatctcatcaatattacatttctatcttctttctcccatgccaaatatattagttatcaatgatgtcagtatgctaatttgctttatcaagcactacacgcacagcagttaaacaataacatgtctgtcactgtaattaatatgattatttactgaaaacattgtggttttgtttttattttgcagttatttttctcagggtatatcttgtgcaatgtatacagaaaaattactgtttcaaagtcactcaaaatagttcctctctaatgagtgagtatgctaccagctggtttcatgttactcttaattttcagggattttttttttaattttttatttcatttataatatatttacatggttcaaaagtcaagtctacaaaacaaatattcaaaggagtctagctgtcattccagtccgctctactccctcttttctccgataggtaacattgaaaatgtttatggcctgttcttccattttttaatacatatacatatccagaccaaagaacttacccaaagttcctcgattttttttatttttctttttcaaagagaaagcttataatattctatatccacaatacaaatgataaaatgtatcttttagtaagtcatagtctatagattagaactgaaagaaaattgatattttagataagccagggttttaaggaagaaagatgatttggatggaaactgctggctgttatcaagtattttaaatactttctagggaaggaggaaaccgtgctgtttgactccagataatatagtggagccaatatttataatttataggaagccagacttggtctgaaaagaaattctgctatcagatgaaactctgaagatgatataggcagcatattatggtttcaagttcttgtcactggagagatttatacatcctataaaggatgaactggttgacctacatgatcatttggtgattctggtttctggggctcttccccagttttttatgtataattctgcctaacaagtctaattgtatagtttctaagtgatcacaatgtaattgttttaggaatcggtgacatttaaggatgtggctatagacttcacattggaggagtggaggttgatggaccctacacagaggaacctgcacaaggatgtgatgctagagaattacaggaatctggtctccctgggtaaggataacttctcttctgtgttgattgatctgcccatttgaccaggtttgccaaagataaagggcctctaaagtacttaactgaagtacttgattttaggggcacattgttgggttatgctattcctcactcttaactacatgatctgcccattgtagagtaagaaacacacatttcactggaatcttggagattgttgacaaccccacagattttggaccaaagttttttctagtcactgccttaaatggaagttatcagtacctctagaagaaagaaacaaatgtattcaatttctttctaaactcagtttatttccacaatctattatcccaccaaaccagaatcatagcattgagttcctttgagatgtctttgtaattgtctaaaacatcactgtacaatatggcaggtactagtcacttgtggcttttgagcacttgaaatttggctagtccatctgaagaactgaattttagattttacttgattttatttaaattcaaatttaaatagccatatgtgacaattggcaactgtatcagacagtgcagctctagaacttcctgtaatggtcattctgcccagaagattaagaactgagactgaatttggcaggagttcttgctcatggctccaatcaaatcctatttatttttctctggacagggcttgcagtttccaaaccagacatgatatctcatttggagaatgggaaaggaccatgggtgacggtgagagaaatttcaagaattccctatcctggtgagttaaacagaaccaagaagatgggatttatttgaagtaacagactatagggggatgttcaccagaacatctgaaataattttgaagatatatttgttcaacgctgtctcagaggaagagatcccccatctcactgcctgtccctctcacccccatcttctctctccctctctctctgtcctccacttttgggaaacatctcatcctattctgctttcctggggacgtgcttttcgtaattattattttatttcttcttcattcaaacttgcataaaatatccctttcaggtctgtcttctccagttaacttcatgtttctcatttgtttcattatctgacatttcttccctcatttacctgaaaatgcttccataagggtccccactgatttctcttaaggcaaacttatttactcattatttagttttcttcacctgcaaggctacagaaactttggaggaacccaccacctctcctccaggtttttaactaattgctaatacaaacaaggaagcagttgagaatcaaaatatagtattgatgtatttaatcaatattatacatctatatactgtgaactggcttaggtacaagggctatagcagctaataaaatggaccaggtccctgccttcatgaagattaaattttgagaaatagataatttggcaaacaaataaaaacaaactaaaatggtggttgccatacctcccagctatgagataaattggaggataagaaagagtaactggggtgggatgaggacacctgcttcaaacagggtggtcaggggagcttctgaagaggtgacatttaagccgagacctgaagggtcagaagaagaaaacagtaaggggaagaggaaaagagaagtattccaggctaagggaacaacaatgcaaaggatctgatacagcagagaatgccatgtgttctggaaatcaaaaggaagctgctgtgactaaagtgaggggaaactggtacagaataagattagagatgtagcagcctgcctgtgcagggctttgtagatgatctaagtgagttccaaagcatggagagattctactgcagggtttttagaaaataaccctgtttatagagattgaacttgaggcataaagcaggcagtaagttaaaaggttgttacaatagtctatccaggagatgatagtaactttgattagggtgatggtagtggagatggaaagaaatagattctggttcatttaagcattcattttattatgatgccatgaacaatccacacatgaattacgtatttttatatatcagatattatttatacttaaaagagtgagtgaaaagtagacattagagatagttttagataactttttagagagggattttttttcccctacgaagagggaaagagaaatggagcagtggctaaaggaaagaatggagtcaagaaaaaatacttgttttatttttgaaatgggagctgctatgacatgtttgagtgctgataggattgccttaatggagagagagacattgatgttgcaagacaaagacgaaggactaaagtgtttgacagggttaaaggagataaaatctagaaaggaaagggggatttaccttgaataggtacagaggtcacctcctgtgttgtaatactgagaaaggtggagaagatgggtgcacctgcatgtcagttgagggcaggaagattgaggccactattatgatagctgccatagtttctaaaatgtgaggcaagatcattagcttatggtgagggaagaaaaaattgtgagagagggaaagttattttttatggtagtggaattcaccagggaagccatcttggcctgaagcttttattgggaaaagtgtttaattatagcctctatgcctttagtacttaggactgttcatatttcctttttctttttgtttcagtttagcaaattatgtttagggattgttccgtttaatctaattttaaaatttattggcatactatcggtttatcatttaaatgtttgtatggatctgaagtgatgtgccacttcttattcctgatactggttttttgtgttttctttattttgtcttactcagtcttgctagagtttatcaatcttacttgactcttttttttctttgagacagggtctcattctatcacccaggctggaatgcagtggtgtgatcatagctcactgcagtctcaaactcctgggctcaagtgatcctcctgcctcatcctcctacatagctgggagtagaggcacacaccaccacacctaagatttttattttttgtagaggaaggggtctcactatgttgaccaagctgttctcgaactcctgggctcaagctatcctcccacctcgtcctcccaaattgctgggatttcaggtgtgagtcaccatgcctgacattacttggcttttaaaaacattactgtttttagtcctttttcttgtatgtttgagttttattactttctgttctttattattttattccattcttagagcttaatttgtggatcttttctaacctcttgaattaggtacttagatcgttgattttcagctgttcttcttttctaattgtttagggctatcagaactatatcacacttttttatgtagcatcttcataatttttgagtggaaaatattttataatttctattgtgatatcttttatccttgggttatttttaaatgtttttcttaattttgtgccatttgggaattttctagcaatcttgttgactttaattctactatggtcagacaggatgctctgaattatgtcagtctttgcagaattttgtaaacattttgtgctcttgaaaaaatgtacagcctataggtaggtattgagtattgagtacaatttctagatgtgtcaggagattaagtttgttaattatgttaaaatctgtatacttacagcttattctatcaattgagaaagattttttaaagtctgctagtgagactatacatttgcttcctatttagttcatttaatttttttctttctgtatttgaagctgtgttattatgtaaatacaaagttataattgttatctgtatggtaaattggcttttgtcgttatgaagtatctcatttcttaaaagtttttgccttaaaatctgttttgtctgatactaatattactacagcatctttcttttggttgttatttgtatagtatatcttttttcatctgctaactttcactttctgtgtattcttgtactttttgtctttatttttaaggtagtatattgttaattttttatttttttgagactgagtttcactctcgtcgcccaggctggagtgcaatggcgtgatctcggctcactgcaaactctgcctcccaggttcaagcgattctactcgctcagcctcttcagtagctgggattacaggcatgcaccaccatgcccagctaatttttgtattttcagtagagatggggtttcaccatgttggctaggttggtctggatctcttgatctcaggtgatccacccacctcggcctcccaaagcgctgggattacaagcaatagccaccacgcacagcctcttctcttttttttttctaaaaatatcttcatttggccttcattttgggaggatatttttggtaagtttgaaattttagattggcagttatattctttcaacatttcaaaggtatcatttattgttttctgtcttatgtacaatctgtggagaagtgaaccatctgtctaaacttttctataaaaggcagggcagcaatatttttggctttgttggatcataaggactctctgctgtgactactccactctgccattgtagcaccaaggaatccataggcaacatattaaccaagtaatgtggttgtgctccactaaaacttcacttatggactctgaaatttgaatttcatacatttttaatgtctcacattcttttaatatatttttcaaccattttaaatgtaaaaattggccaggcgtggtgactcatgcttgtaatcccagcactttggtaggccaaggcaggcactggaggccaggagtttgagaccagcctgggcaacatggtgaaaccccgtctctactaaaaatacaaattttagctaggcatggtggcactggcctgtaatcccagctactcggaaggcagaggcacaagaatcacttgaacccaggaggcggaggttgcaatgagctgagattgcccactgcactccagcctgggtaacagagtgagactcggtctcaaaataagtaagtaagtaagtaaataaataaataaaaataaatataaaaatcattcttatcttgctggctatacagaaacagatgatgggccaaattggttataatttgtaacctctgatctaattgttgctcattaaaggacatctatctgtctttggccaggtgttgggaggctgaggtgggtggatcatttggggtcaggcgttcaagaccagcatgggaaacatggcaaaaccccatctctactaaaaatacaaaaattagccgggcgttgtggcacagacttgtaatccaatccactgcactccagcctgggtgacagagcaagacactgtttaaaaaaaaaaagagagagagacagatttttttttttttttttttttttttgagatggagtctcgctctgtcgcccaggctggagtgcagtgacgtgatctcggctcactgcaacctctgcctcctggtttcaggtaattctcctgcctcagcctcctgagtagctgcgactacaggcacctgccaccacgctcagctaatttttgtatttttagtagagatggggtctcgccacattggccaggctggtctcgaactctgacctcaggggatctgcccatcttggcttcccaaagtgctgggattacaggtgtgagccactgtgcccttccctgtctctctttttttggctgcttttaagagtttagttttcaacggttttactactgtgtactttaatatagttttcttcatatttctcatgctgaagattcatttggcttctaagacttgtgacttgattttttttttttatctcttgtggaaaattctaagacattatttctttgacttagcttctgtccattctctctcacttctctttgtaaccttctaggactctggttacatctgtgatagaccttttcaccctatcctggatgtctcttctgcttttctaacgtttgcaagtttttcatcattttgtgtttcagtatggatactttgtactgacctatcttccatttccctaactctctcatgtgctgtctctattgtgctcttagcccatagtttgagttaagttactatatttatttttcagttctagaattttcatttggttattttatactttacaaatctttgtgagattgttaatcttatgttcttgaatatagttatcctagttattttaaagtttatgtctgaggcctcaattatttggattcattttagatctgtttctgtatatttgttttctctcttgatttttttcccatgtgacttttgatttttgtctcccttttttttggggtcgggggaggcagacagagtctcgctcttttacccaggctggagtgcagtggcgcaatctcagttcactgcaacctccacctcccaagttcaagtgattctcctgcttcagcctcctgagtagctgggactacaggcatgcaccaccatgcctggccaatttttttgtattttttagtagagatggggttttgccatgttgcccagtctggtctcgaactcctggcctcaggtgatctgcccttgttggcctttcaaagtgctgggattacaagatgtgagccactatgcccagcgtggtctccttttatgcctgttattttttactgggtatcaggcattgactatgaaaatctatagtaatattaggaggttctagattatgtaatctttcccacagaggattaatgtttgcttttgccagactgctaggctagggactataacaatcttcattcactttaattcaatgagaaatttaaatgaggtgggttttagtccttcagccagccgatctatttcttagtcgttctatttgtagggcttatcaccttaaggttccagccaaaccctagttgttccagaattgtcctccttaatggacctaaatccgtctctgtctttcttgccctatgactttattaagagttctgcttacttattcagcctctcagtcatttcttagagaattaacaggcatttgaaggggaaaatggcaccaaataccaggattgtttttctgggtttcattcttctccttgtaatttgttaagtctttctagctttcagatgctttcaaacagactgttcttttgtccaacatttcaaattgttctcagcaataaagttggtccaaatgacttcctctgacatccccaaagtgcagacctctcaaatataaaagtttttattctgttttttatgcttgttgtctgggagtaacattttactttcactcaagaaagatgagaatttagtgcatataaattaagtttctacaaataaatttattgaagaaaatttctaattactaatataacaacaacctttatgtactctaagcttttataattttagtgcattttgcagcaaatttttctgctttccaacttcatattcttttgaccttttaaatttaatattagtttctgaattccaaattggtgctatagatatgttttatatagcttttcttcttcttttttatttatttatttatttgagatggagtctctcttgtctcccaggctgagtgcagtggcgtgatctcggctcactgcaacctccgcctcctgggttcaagcaattcttctgcctcagcctcccgagtagctgggattataagcgtgtgccaccacacccagctaatttttgtgtttagttgagacggggtttcaccatgttggccaggctggtctagaactgctgatgtcaggtaatccgcccaccttggcctcccagactgctaggattacaggcgtgagccactgtgcccggccttcatttatttatttatttatttgagacagggtttcactttgtcacccaggctgtagtgcagtgatgcaatcatagctcactgcagcctcaacttcctgggctcaggggatcctccagcttcagccttccaagtatttagtactacaagtgtgtgccactatgcccagctcatttttaattttttatagagatggggtctcactgtgttgcccaagctggtcttaaactcctgggctcaagcagtcttcctgtctcatcctcccaaagtgctgggattataggcatgagccaccacacccagccttatagctttttttctgagagcaaacttttttttttatcagatactggcaatataatatcctatgacagcaaaaaatatgctcaaactaattaaaactatttaaaagtaaaagaatgataaatagcaacagcatgacaaaatattaatttaaattttataaaagtaaaataacatagacaaatcatactgcttaaaagtgggttttaaaatcataaaattggctgggcacagtggctcacgcctgaaaccccagcactttggaaggccgaggagggtggatcacttgaggccaggagatggagaccagcctggccaacatagcaaaatgctttctctactaaaaataagaaaaattagctggatgtggtggcgcatgcctgtaatcccaactacttcggaagctgaagcacaagaatcacttgaacccaggaggtggaggttgcagtgagctgagattgtgccactgtactccagcctgagcaacagagcgagacactgcctcaaaaattaaaaaaaaaaaaaaatcataaaaccattctatcatggacaagagtttttattgaacttatatttaaatattgaggcataattacctgaaaatgaattacaagttttaaaaggcattaaagtgtcttaaaaataaaatattaaattgcatacacaaacacattgtaagaccagtatcccacagtgtaatttttttaatgaatttttgacaaactgtcagaaatgttcttagggccataaaaaagttgcaaaatctacccttaattaaacaataattaccactatttgaaatatcagtaagtataaatattaacttttgactagtttgttgttcagttctttttgaaaatcaaagttttttttccataaaagttttattaaaaggtatgtacaaagacttgaataaactactctgccagtgaatttgagaaagccctcacaacaaagctagtcaatcaaaaatgagaacaaatagaggccaggcatggcatggtggctcaggcctgtaatcccagcactttgggaggctgaggtgggtggatcacctgaggtcagaagttcaagaccagcctggccaacatggcgaaaccccgtctctactaaaaatacaaaaatgagccgggcgtggtggcacatgactgtagtcccggctactcggaaggctgagacaagagaattgcttgaacccaggaggtggaggttgcagtgagccgagatcatgccactgcactctagcctgggtggcacagcaagtatctgtctccaaaacaaaacaaaacaaatagaaagtgtgattggggactaaagtctggtttgtggagtaaatagaaagcaaggaagtatgacagtttttgagattgtcaaaagttgaagaataccatctaaaatagttggctctaaactatgaatgggctttttttttttttttgagacagtcgtgctctgtcacccagggtagaatgcagtggcacaatcttggctcactgcaacctccacctcctagaatcaagcagtcctcccacctcagcctcacaaataactgggactacaggtgcacaccaccatgcctggctaattttttttttttttttttttttttttttttttttgtagagacagggttttgctatattgcccagactggtctcgaactcctaagctcaagcaattctctcaccttggcctcccaaagtgctgagattataggcatgagccactgtgcccagctgaatggacttttttaacgggaaagtttcattgaatttgctactttagtttttgctaaaccagcctcccttaaccctaccttcttctcactaaaaaacaagtcagtgtgaaagcaattaaaaccatatattcattatccatgtatttattgcttttattattctgtttagtgagattgccccagcttaggaaaggaattacttgatttttctcttttttgccccagacatggagcccaaacctgcaaccaagaaggctacacgaacaaaggctatttctgaagatttatcacaggaggccatactagagaaacttacagagaatggtctgtgggattccagaatggaagggttatggaaatggaatgataggatattgagattacaaaataatcaggagaatcatttgagtcaaagaataattccactcaagaagactcccactagtcaaagaggctttagatttgaatctattcttattccagaaccaggcattgccacagaagagcttcacagcagatgccaaacacaagaggaaaatttcacagagaatttaaatttgattacagatacccatttggggaagataatttgcaaggagatgaaaggcagcaaagccataaggcagacttcagaactaactttggggaaaaaatccaataataaggaaaaaccctacaaatgtagtacatgcgaaaaggcctttcattatagatcattgctcattcaacatcaaagaactcatactaaagaaaaaccttatgaatgtaatgaatgtgggaaaacattcagccagccttcatatctcagtcagcacaaaaaaatccacactggagaaaaaccctataaatgtaatgaatgtggaaaggccttcattgcttcttcatcacttatggtacatcagagaattcacactaaagagaaaccttatcagtgtaatgtgtgtgggaaatcttttagccagtgtgcccgtcttaatcagcaccagagaattcaaactggagagaaaccctataaatgtagtgaatgcgggaaagcttttagtgataaatcaaaacttgcaagacatcaggaaactcacaatggtgagaaaccctacaaatgtgatgattgtgggaaagcctttaggaacaagtcatatcttagtgtacatcagaagacccacactgaagagaaaccatatcagtgcaacgagtgtgggaagtcttttaagaataccacaatttttaatgtgcatcagaggattcatactggagagaaaccttttagatgtaacgaatgtggaaaagcctatagaagtaattcaagccttatcgtacatataagaactcacactggggaaaaaccctatgaatgtaatgaatgtgggaaagcattcaaccgcatcgcaaatttcacagaacatcagcgaattcacacaggagaaaaaccctataaatgtaatgaatgtgggaaagcattcattaattattcatgccttactgtacaccacagaatgcatacaggagagaaaccttataaatgtactgaatgtggaaaggccttcatgcgttcttcttctctaattatacatcagcgtattcatactgaagagaaaccttatctgtgcaatgaatgtggggagtctttcagaataaaatcacacttaactgtacatcagagaattcacactggagagaaaccatataaatgtactgactgcgagagggcattcaccaaaatggtaaatctcaaggagcatcagaaaattcatactggagtgaaaccctataaatgttatgactgtggaaagtcctttaggactaaatcataccttattgtacatcagaggacccatactggagaaaaaccatataaatgtaatgaatgtgagaaagccttcactaatacatcacagcttaccgtgcaccaacgaaggcatactggagagaagccctataaatgcaatgaatgtggaaaggttttcacaagtaactcaggctttaatacacatcaaagaacacatactggagagaaaccatttaaatgtaatgactgtgggaaagcatttagccagatggtacatgtcacagaacatcagaaaatccatagtggagagaagccctataagtgtgatgtctgtggaaaagccttcaggaggggttcttaccttacagtgcattggagaacacacactggagaaaaaccctacacctgtaaggaatgtggaaagggttgtattactctatcacagctaaccctacatcagagaattcatactggggagaggccctataaatgtgaagaatgtggaaaagccttcagaactaactcagactttactgtacacttgaggatgcatactggagaaaaaccctataaatgtaatgaatgtggaaaagccttcaggagtagttcgagccttactgtacatcaaagaatacatcaaagagaaactcagttaatataaagaacaataagtcattcacctagatgtcaactccacaagatgaatcttataaactatattttatgaatataggaaaatcttcattaggaatttatcagaaagtatacagagaaactataagcaattatgtgggaaatcatttaataatattaaatcttagaagttataaggaaactctcactagaggaaaataatgaacaaatgaaagtgttcatccagatttcatactttactcatttaacaaattatctttagttaattgcctatatatgtatttgcctatttttctattcatttatctgtcttttcttataaacctggaggtgctttttatatatttttgatattaatcctttgtcattatgtagcagatgtttttcttaatctagcatttgtctttatactttatagtaatgcacaacatttttataggaaaatatttgtatcatttcctttttagattttttattttactcattttacttaaaagagatctccttaatccctaggttatacgtagtatcctaaatgtgtttttaagatttttatgattttattttttacacttaagtctttaatccctctggactggatggttcttcataggagagcaactgtaggtgatcattatcctgtgaaaatattttgaacctaaaaagcactcagggaaatgcaaattgaaatgctcagtgagatgaaacttccccttcatggatctggcaaaaattaagagatcttttgctagctattggggtttgggaaaccatgtactattacttaaaggttgtgtaacatacttccaccagcagtccaacaatatatgtttaaaaatttaaaacatatatactcttagacccagcagtctcacttttggaatctgtccgttagaaataaaagcagcatcaatgcataagaatgtaaataaacatgtttgttgaagtactgtttgtagaggggggcaaagccccaactgcaaacaaagtgaatgcccattaatagggaactggttagataaattgtgacatacccatattatggaacagtgtgagagtaattttaaaaacgacttatatctatgctagctgatttcaatgtatttccacaatgtattgataaataattgctttataacaaatgtatatatacaatatatcatttttgttaaaataatcacaccc

SEQ ID NO: 196 - DNA, 32744 bp, Homo sapiens
  source 1..32744: mol_type = other DNA
catgccaacatgtgacgcgtggaatctacgccagccacagcagagaggtgggggttgtgaccggagttagatgccagcgcagaagggacgtgagcccagccgaggtaccgctgaagaggaatcaattttggtatgcagataatcactgggctcatgggtcttgctctttacaaagaggtatgtccctgtaaagttgtcaggcaaaggaaatgtttcaaacgactccatttcacgaagtctcacctaatttacaattcgttagttgagatgcttgtattcttcgtttctaaaataagacgttgaaccataaagactctagctagctctgcaacctctgatgaatatttcatgcctcattattgtgaaaaatccaaagcagaattggagagaagatgtggtatagggattaggtaagtgaagactggtgcaaagcctcctgggtcgaaattctgtccactgctttgtcattggaaaagttatttaacgtcgtcgtctcagttcccacaactattaaaatggagaggataacaacacctaccttatgctcttgtgaggattaaataagttaccgttaatatatgtaaagcacttaaaagaggaccatgtgtttgctattattatgttatacatacaataaagagtaaacattacctaagttataaagaacttaggcaatggataccaaaagtactaattcctttataataaaagaaaaaaaggcgacaaggcaaataacgataataactgataatggctgggcgcgatggctcacgcctgtaaccccaggactttaggaggcggaggcgggcggatcacttgaggtcaggagtttgagaacagcctggccaacatggtgaaaccctgtctctactaaaaatacaaaaaattagtcgggcgtggtggcgcacacctgtaatcccagctactcgggaggctgagacaggagaatcgcttgaacccgggagacgaagtttgcagtgagctgagatcgcgccgatgcactctagcctggacaacagagcgaaactccgtctcaaaacaaaaaactaacaaacgaacaaaaaactgatcatttattatacacccagaactgtgcttttagcacagttttgttttgttttgttttgtttttgagatggactcttgctctgtcacccaggctggagagcagtggcgcgatctcggctcactgcaacctctgcctcccgggttcaagcgattctcctgcctcagcctcctgagtagctgggattacaggcgcgcaccaccacgcctggctaattttttttttttgtatttttagtagagatgggggtttcaccatgttggtcaggctggtctcgaactcctgacctcgtgatccgcccgcctcagcctcgcaaagtgctggaattacaggcgtgaaccaccgcgtctggccgtattgtctcatttaatcctcacaacagtcttatggaatgggtgctgctatctttgtttttcagatgaggaaacaagctcagagggttgaaatgacttgtccaaggttacaggccagtggaggcttgaacccaggtatttgtaattccaaatgtcatactctgtccacattcattccttgtaacctgcctgggctgtcacagttggtgtggggctagcagctccccagggaccaaaacaggcgcatccccgcccaccgccccgcccatcgtgccagcccgactccacccctgtggctacacccactgccccgcgccttacccactggtgggccacgcccacagcccccagctaggtgcctccgctgtccgggctctagtcccgccctcgcccctccccgcccaccggcctcgcagtcaccgcggacgccaatcttgtgcatggagtcgccattttgctcctagagaggccgccaggagacccggcgctttcttccttctgcagctgaggctgcggcggggccggggctggggtcggggccaggtaggcgggcgggagccagtggcgagcggcagcgagggctggctggctccggcattgcggggcgcaggtgcaaggggcggggagcccgcggcgccggcaggcggacgggtcggggtccctgggtggtggctgcttgggggctcactggggcgatctcgcgcccgcggcccttccatttttccctcccttcttcctctcccgccaggggtcggcgggggcgggggacgggcgtccggtgcctgggctctctcctctccctgaggcgccgctggggagtcgaaccctgatgatgggacctgtggtgagcagccctgaaagcaagcccagacccagccattctccgtccctaagctgacacggagcccctgattttaatttacctggctttgctagttacgaatatatctctcacctcctaaaggatgattttatccaactcagaactcaccccagcagagattgagggggaaccgtgatgaaatttttaagtattctgcttgatgataataatttttctcttatgttaatgttggctccgtttgggtgtttagcttttgaaaggagtatgaaaatgcggaatggggctttggggcttgaggtgtgatctctagtgtttaaaaaatttaattgcacaaatagaaataattcacccacattattgaaccccactaaagcatatcctttttgtccatattcctttcctgctgccctcgtgtgtaccattattactcagttgtgatttgagctcgttccacttaaagtcattcatagatacttttgcgtcgtgttgaatatttattgaatttctattctgtgttttacttaattactttattatggaacctttacacaggtctggtgtacttgttctttgaaaagtcttatgttgaccaccatcactgagcatatagctttttccttatttccttgggataattacccgaagtggaaataccgaatcaaacttctgttttctttctttggcactattatataaattgttttccaaacaaggcatgtttacaatagacatttttcaaaatctgggtatttgtcctattttgctctctgtatgcagaattcagcggggtgccaagtcgttttctgtgtgggttgagagacaggctgtgcagcccactgttgcataggactaactactacaaatcatgctgagaccgagctatttttgctgcttagaggctttgcagccttgagtaagtttcttcatctggaaacctagcttccctgtctaaaatgggtctcattctagtgcttgcttcactgggttgtcataagcattgtgaacactcagatgttaggcatgagttaacattgtgttggagagataagcagagcctgggatcatacaggagtggaagagtaattcggtttagaatttgcccttcaaattctcatcaatattgatattaaaaacagatttccttggagtgaggcacatcactaataaacatacataataagtttttttatttttattttttttgcagagtcttgctctgtctcccgggctggagagcagtggcgcgatctcagctcactgcaacctctgcctcccgggttcaagcgattctcctgcctcagcctcctgagtagctgggattacaggcatgcgccaccacgcccggctaattttttgtatttttagtagagacagggtgtcaccacgtttgtcaggttggtctcaaactcctgaccttgtgatctgcctgccttggcctcccaaagtgctgggattacaagcgtgagccaccatgcccatccaataaacataaatttttatactttttaattttttgacacagagtcttgctctgttgcccaggttggagtgtagtggcgcgatctcagctcactgcaacctctgcctcccaagttcaagcgattctcctgcctcagctgcgcaagtagctggggttacaggtgcatgccaccacacctggctcatttttgtattttttagtaggggtttcgccttgttgaccaggctggtctcgaactcctgacctcaggtgatccgtccaccttggcctcccaaagtgctgggattacaggcctgaggcactgcgcctggccggtttttatactttatgatgccttttagttcatctttcaatttcatttgttaatcattgtgactcattgaagtcaggcattattcagcaatcatttgtttagcctctaccgtgtggcagctgcacagggtatacagcagagaatatcatggtaaaaaatagtctctgctgcctggaccttaaattctgatggggaaatctttttaccaaggttatatctcttgtctggaaggtaaaggctgaggcccagcaaggacaagtgatgtccacatggcctagtagctggaaggcaaacccaactcttcacactcctacttcagccatctttaagtagaaggtatttacacagtagatgctttagagggaagacaacacacttcaatgtgagtcttccccatctgaaatgtgggtgagtggttttgaaatgactgctagtctgtccaaaggaaatgatctctcagtgtggtttcttcattcatgagacttaacattctaaaatcttattcaaaagaggagtatgatttgctctttaaaaggtgctaagattctctgaaaacggtgtgttttcatacatgttataaataattctcacacattctagagtaaatttagaataaacataaagcagttatagctcatggggaaaataagggagtgttctcatttcacactaaaaccttgtgctaacaagcctcctgccagccccatctcgatgattattatgtttttgaggatagtctttataactcttttcttgaagcttggtaaagaacacagccttaattaccaacaggagaaaggagaactaaaactacaagcaggcattatggccgggcgcagtggctcatgcctgtaatcccagcactttaggaggctgaggcgggtggattacctgagcttgggagtttgagaccagcctgaccaacatggagaaaccctgtctctactaaaaatacaaaattagacgggtgtggtggcgcatgcctgtaatcccagctactcaggaggctgaggcaggagaatcgcttgaaccggggaggcggaggttatagtgagccgcaatcgcgccattgctctccagcctgggcaacaagagtgaaactccatcttaaaaaaaaaaaaaagaaaaaaaagaaaaataaacagcccttatgtttgaataacttgtgaagtgaatagtcacaaaacatgactatgttgatagtcatttccaagtggatgctccccagtccactccaccatgtcattttgagggtggtcttaggttaggattctatatagaagcctatatctgaagtctagaacgtcagagaccacatgcagggtgttgcaggccattttaaaccatgagagataaggaaagacttcaggaaatatcctggaaaaaatatacaaaggcaggagagctatcttgaaatagtttggaggccatcctgtggaaaaggaatttgatgtttcccataaatctctaaggagagtacaagaaccagtgggcagaagctgcaggaagaggaatctcagcatgttcttttgtttgtttgtttgtttgttttgagacagtcttgctctgtcacccaggctggcgtgcagtggtgcagtctctactcactgcaacctccgcctcccaggttcaagcgattcacctgcctcagcctcgtgagtagctgggactacaggtgtgtgccaccaggcctagctaatttttgcatttttagtagaaatgaggtttcaccatgttggccagactggtcttgaacttctgacctcaggtaatccgcctgcctcgctctcccaatttgctgggattataggcatgagccacggcgcctggccacagcatgttctaaggaagaatttggaatgatgggccctcagcggatgtgggcatcagaccctggggctgttcaagcttctgttgagtggttccttggcaggattcctacagatgggctttgaacaaaagatttaggagggatgggctgaactacctctaagatctcttcctacctctaaaatactttcattctaagtgttccaactcctatcaggaatcctgctgtactttaaggagcttcttatttgaaggttagggggtgtaaaaaaaatgcccctccccccatggctgttactgtacttatatggtagataatcaagatgttagaagtcagttcataggtagcatgtccgatatgcagggcactgtgttaagtgccttgcagaaattttacagtcacctgtggggtcagttttcacagttgtatggatggcagaactgaggctaagagattttgagtattagataacttatgcaagtcctcactgtgagtttaggggaagtatttcaagatgcaaacatgagtttgactccaaatcctgtatttacaactacaggaaaattagtttgtttttatttattttcctggacctgtaacacccttttatttatttatttatttatttatttatttatttatttatttttctgagacagagtctcgctctgtctcccaggctggagtgcagtggcatgatctcagctcactgcccacttcgcctcccaggttcacgccattttcctgcctcagcctcccgagtagctgggactgtaggcgcccaccaccacgcccacctaattttttgtatttttagtagagacggggcttcactgtgttagccaggatggtcttgatctcctgacctcgtgatccacctgcctcggcctcccaaagtgctgggattacaggcatgagccaccgtgcccggcaattttttatttatttatttttttatttttttgagacgaggtcgcattcccatcgtccaggcaggagtgcagtgaagtggtgcaatcatggctcattgcagccctgaccatctgggctcaagtgatcctcccacctcattttttgatttttttgtagagactaggtctcactatgtagccgaggctggtctcaaactcttgggctcaagcagtcagcccaccttggcctcacaaggtgctgggattagcggtgtgagttgctgtgcctggccataccttttgttcttaaacacacatgtttattggttgagagatggctttagaagtatttaagatcccttccagaatgttgatgattaaacgtattctttctttcttttctttctttcttccctttctttcttcttctcttttcttttcttttctttatttgaaacggagtctcgctctgtcgcccaggctggagtgcagtggcgcgatcttggctcactgcaagctctgcctcctgggttcatgccattcttctgcctcagcctcccgattagctgggactacaggcacctgccaccacgcccggctaatcttttgtatttttagtggagacagcgtttcgccatgttgtccaggctggtctcgaacccctgacctcaggtgatccacccacctcggcctcccaaagtgctgggattacaggcgtaagccactgcgtggccttttttttttttttttttttttaattttttagatggagttttgttctcattgcccaggttggagtgcagtggatctcagctcactgcaacttctgcctcctgggtttaagcgattctcctgcctcagcctcatgagtagctgggattacaggcatgtaccaccatgcctggcttatttttatttttatttttttgtatttttagtagagatggggtttcaccatgttggtcaggctggtctcgaactcctggcctcaagtgatctgcccacctcagcctcccaaagtgctaggattacaggcgtgagccactgtgcctggccgtatataatttttatggaggtcacatgtataaatgcatagaaaaagtcttatgttgtccctaccaaactgataagaaccctcacttctggggaggacctgggatcgaggctggtgactttatccttaactatcatgtttcaggtttttttttttttctgagacggagtctcgctctgttgcccaggctggagtacagtggtgcaatcttggctcactgcaacctctgcctcctgagttcaagcgattctcaagcctcagcctctagagtagctgggactataggcagccaccaccacgcccagctcatttttgtatttttagtagagacagatttcacccttttggccaggctggtcttgaactcctgaccttgtgatccgcctgccttggcctcccaaagtgctgggattacaggtctgagccaccgcgcccagccatgtttcaggtttttatagggaggatgtgtttgtgttttacttgtataattaaaatttgagaataatgaaaaagattagcttagtttcagctcattgatgatctacaccagccttcccagaggtcccaggtgaacatacaactgtggaaatgcagtgggcttgctgagaaagggcccccctgcccacagcctgctggattgttgctgttcctcccatctagcatctccattatgtgatgaggacactcagcaatgatgacgactttttttttttgagatggagtcttgctgtgtcgccaggctggaagtgcagtggcacgatctcagctcactgcaacctctgcctcccaggttcacgtcattctcctacctcagcctcccgagtaggtgggactacaggcacgcgccaccatgcccagctattttttgtatttttagtagagacagggtttcaccatgttggccagggtggtcttgatctcttgatctcgtgatctgcctgccttggcttcccaaagtgctaggattacaggcgtgagccaccacatctgaccagcactgatgatttataagccagggacctttttatttttggcccactgccaaaatttgggtgtgaccaaaactgtcatttgggtggtcgcttaagtgtccttcaaggtgattatctagtcagcccgtgttccacttgaggaaaatgaagatgagaggtcagttttagacatgacacagggcagctgaaaggccgggaaaggttttatggtaaacaaggattacaggaaaagctgggtgtagatgggtcatttattctttgtctaaggattaatcagtccttgttctcgctaatggctctgccatttttctgtgtgttaatccaggaggaattttgttgtcagagaataaaaggaggttgtccataattgactttaagcagcaatcagtaaaacattgagctcttcagctccgcctttcttgtaagtttatcatttcttcttagtggttgtgaacatcatgtgataatgtatttccataaatttaggaccctgaaatccaactgaactttctgtttgtccatatatatctaatatttaaaaaatactattaggatggaaactaatttccttcagctgaagtcatttcctttaaaaaaaattcattcaggtatatttcatatcatatggcagtttttaataagtattatatccttctaggctctgaaaattggaaaaccaagaaggttttgatgttttgtgtgacgccacctgaattagaaaccaagatgaacataaccaaaggtggtctggtgttgttttcagcaaactcgaattcatcatgtatggagctatcaaagaaaattgcagagtgagttataattgtaccattaaaatctatattcattatgtgatgctttaaatttgataatcagattagcagttattgttaaatttgaaagcagatattttataattataaaataattatatctttttttcatcatgtatcttttttttcatcatgcaagatgttcatgtagtatgtctcatctgtatatattaagggctattctttttgtaaactatcccatctccctacatattctttcagcagacatttattgagtgccttataagtgccagggattgtgttagatgctatatatatatataattatttgagtataaagcacactggggccaggcgcggtggctcacgcctgtaatcccagcactttgggaggccaaggcgggtgtatcacgaggtcaggagattgagaccatcctagttaacaaggtgaaaccccgcgtctactaaaaatacaaaaaattagttgggcgtggtggcgggcacctgtagtcccagctacttgggaggctgaggcaggagaatcgcttgaacgcaggagggttgcagtgagctgagattgcaccactgcactccagcctgggcaacagaacgagactctgtctcaaaaaaagaacattaacatgtatattatatgaaataacttatagcttatagtttagtataattttagatatttattaaacaaatattgtacccctactactgtgtactagaccttgatctagatgttggggattatcagtgagtcaagatccatcctttttatgaaatttacattttagtatgggagccaaacagaaatcaagtcaacaaaacaaacaaggtaatttcagatgatgtcaatgctatgaagaaaactgtgtgaaagtaatgatggggcaggttgttctgctttagcatgtgtgctgaagtgcttttaaactgaagggatggtgtgtgagttgagaaacctgaatgagccaccaagtgaaggtctggaggcagaacccccccaagcagaggggacagcagattccaagcctctgcagcatgcaggaggagttcttggtgtgtctcaggaacgtgggctggagtacagagtgtccaaggaagatggctagtgaggcaggcagagcgggactgcatagtccttcctggggagacatggggttggggtgaggggctaggtaatggattgatgtaacaatttaatgttgactttaaattttataagaagaataactttattttattttactcttatcgatttacgagtctccttaaatagtaaagatactgggtttcttctattactttttcagctttttccccctttctcttctctaggcggctaggggtggagatgggcaaagtgcaggtttaccaggaacctaacagaggtgagctatcttgggcatgtggaacattgacctttttgtgaaatgtggcatattggctccgtccttcatcctttactattgaaacgatttgattcagttgtacatttccattagcaagaagtcaggcaggcaaggtagaacagagtggttttttagctctcactaataccagctagatatctaaccctggtgcaagtcatttctggggcttgaactgcagttctgagacttcattcagtaaaagctgcagacatatttgaaccagctggtcaactgaatgaacatgagctcaactgttgcttaaatttatgtcaccttaggaaggatgagtaaatcctgtcaccttagacaggatgactaaatcctgtgtgaccgcagttttagttagtctttatttgcacctaagctgccttgggttagacttcataaaatattgttaagaaatactttttgctaattgatacatgtcattacataattctcccaagttgtaaaaagaagtgttatttaacctttgtaggtccaggtgtgctggctcatgcatctaatgccagcactttgggaggctgaggcaggcagattccttgagctcaggagttgagaccagcctgggcaacacggcaaaaccctgtctctactaaaaatacaaaaattagccaggagtggtggtttgcacttgtagtcccagctactagggaggctgaggtggaaggatcgcttgagcccaggaggtggaggctgcagtgaagtgtgatcataccacagagtgagaccctgtctcaaaaataaataaataaataaatagaaagtgatctttgtaatttctttagcaatggtggatatttgaaattattttaggccaggcgtggtggctcacgcctgtaatcccagcactttgggaggccgaggtgggcggatcacctgaggtcaggagttcgtagaccagcctggccaacatgatgaaaccctgtctctactaaaaatacaaaaatttgctgggcttggtggcaggcgcctataatcccagctcctgggaaggctgaggcaggagaatcgcttgaacccgggcggtggaggttgcagtgagccaagattgtgccattgcactccagcctgggggggaacaagagcgagactttgtctcaggggaaaaaaaaaaaaaaagaaattattttagcaggagcgatggacagcttgcatgggcttgagagttacacaccttatccttgacaagttatttaacctttctaaactataaataaactgtaaattagggctgttttgaggattaagtgggataacttgtgtgcctaccagtttttggcacacagtaggtgctcaatatatacttattcctgttccttttccactagaagatttaaaaaaacattttttttttttttggtagaacaagggtctcattatgttgcccaggcttatctcaaactctgggcaaaagcagttctcctatttcagccccccaaagtgctaggattacaggtgtgagccaccaggcctggcccctctacaggattttatcaaatatttacatattataaagcctacaggaggctttgataaaaaggcacaagttttgctgttcccatgtttatctccgttcctgcctcttttctgtctcccaagatccctatgtggcgtcagtagggaaaaagtataattaaactctgcaaggagagtttggagaagattcttcctctagaggggattgaatgatgttctttgtctggagtctaggagggaaggtgaaagggagaagcagtggcataagactccaggagactggtccactctccaagtttctgaataaagggagagaaaatacttggtgtttattgggaaggaaggaagtaatatttgtgaatttcttactgttaccagatactgaaaaactgagttcaggagttcagggattgatgttaggtacgaggtccagtttgaatccagatctccctgactctaaagctcattttcttttcttttcttttcttttttttttttttgagacagggtctttctgtgtcactcaggctggggtgtagtggcatgatcagggctcactgcagcctctgcctcctgggctcatgtgcttctcccaccttagcctccccagtagctggtactacaggtgggcaccatgctgccaggctattttttttttttttttaaatatggagtcttgctctgtcacccaggctggagtgcagtggggcaacctcggctcactgccacctccgcctcccaggttcgagtgattctcgtgcctcagcctcccaaagtgctgggattacaggtgtgagctacacacacacacccagccataatttttttttttttttgatacggggctttgccatcttgctcaggctggtaaagctcattttcttaacatcataccacatttcttttgtaaacttgtattctgttttttccaacatttttttttttctcttatcctcacaatctgttcccattttgctactttttttttgtgtgtgtgtgtgtgtgtgtgtgagacagagtcttgctccattgcccaggctggagtacagtggcgcaatcttggctcactgcaacatccgcctctcaggttcaagcgatactcctgcctcagcctcccaaataggtgggcttacaggtgtgtgccagcacgcccggctaattttttgtgttgttggtggagacgggctttcaccatgttggccaggttggtctcaaacttctgacctcaaatgatcatccacctcagcctcccaaactattttcctacatttttaatgaaaatgttcaaacatataaaaaagttgaaagaatagtacagtgaactaccgcctagcttgaacagttaacattttgccatatgaatatgtatgtggcgaaccatttgaaattaagtgcaggccgggtgcggtggctcactcctgtaatcccagcacgttgggatgctgagctgggtgaatctcttcagcctgggaggtcaagactgcagtgagccatatttgcaccactgtaccacagcctaggcaacagggcgagatgtgtcccaaaaaaagaaaaaaaatgtaagttgcagacagttaatccttgaatacttgaccatgcatcctctaggaataattactttcacctaaataaatatgataccattatcacatttaaagaaattaactacaggcagggcatggtggctcacacctgtaatcccagcactttgtgggggtcaaggtgggtggatcacttgagaccagaagtttgagaccaacctgggcaacatggcaaaaccccatctttaccaaagataaagaaattagccagggttggtggcacacagctgtaatcctagctacttgggaggctgaggcaggaagatcacttgagtccgggaggtggaggttgcagtgagctgggatcacgccgctgcactccagcccgggcaacagagcaagaccttgtctcaaaaaaaaaaaaaaaagaaaaggaaaagaaaattaacttaacaattaaggacaattctttttttttctgtggcctcaagtgatctgcccgccttggcctcccaaagtgctgggattacaggtgtgagacaccgcacccagcccaacaacaattctttaatcatctaatatatggcctatattcacatttccctaattgtcctaaagggtcttttattttttatttttttgagatggaatctggctttgtcacccaggctggagtgcagtggtgcgatcttggcttactgcaacctctgcctcccaggttcaagcagttctcctgcctcagcctcctgagtagctgggattataggtgtgtgccaccaagcccagctaatgtttgtatttttagtagagacgaggtttcaccatgttggccaggctagccttaaacacctaacctcagattatccgcctgcctgggcctcccaaagttctggtattacatgtgtgagccaccgtgcccagcctaaagggtcttttatagttgttttttccaacacctccaccccaaaccaggattcttagttcaagggattttttttaaaaaatatctctttagtctcttctattttagaacaatcccctcacctcttccgttttcttcctgtgacagtgaagaggttgtcttgtagaatgtcccattatggatttgtctaattgtttctttatgactgatcacacatattttgagagtagggatattaggtcttatttatctttgtttctcacaacatacaatgttttgtacctaatacattctgaattgataattgatgctgattgaatgagtatataattttcttttttttttttttttttttttttgagacggagtttcgctcttgttgcccaggctggagtgcaatggcacaatctcggctcaccgcaacctccgcctcctgggttcaagcgattctcctgcctcagcctcccgagtagctaggattataggcatgcaccaccacgcctggctaattttgtatttttagtagagacggggtttctctatgttggtcaggctggtctcgaactcctaacctcaggtgatttgcccgccttggcctcccaaagtgctgggattacaggcatgagccactgtgcctggcctatgattgtctataaagatactgtgctcaggctgggcacggtagctcacacctgtaatcccagtactttgggaggctgaggcaggcagatcgcgaggtcaggagatcgagaccatcctggctaacatggtgaaaccctgtctctactaaaaaaatacaaaacagttagctggatgtggtggcgggcgcctgtagttccagccactcgggaggctgaggcaggagaatggcatgaacccaggaggcagagcttgcagtgagccaagatcgcaccactgcattccagcgtgggcgacagagcaagactccgtctcaaaaaaaaaaaaaaaaaagttaccatgctcggagtggtacagcactcaactgtttgtatatataaggggtgagaattatacatttacttatttcaagtcagaaatgtaattctctcttaaagctgtgttttaaaaagtgattaatggcagtatgtgtattatcccttgtaacatctaaagcctactgagtcttataacagtttgagttgccatattctattacattagggaataatacagatttttttgtgtattttgaaaaatttgaactatatgcctttccctctcttctttttccttttcctgccagaaacaagagtacaaattcaagagtctgtgaggggaaaagatgttttcatcatccaaactgtttcgaagtgagtatccagcaaaagtgttgctttctgggtttcagtttaggcatgagtgtttaaaataatgatagatggctagccaggaagagttataatagtcttaaaattagtatatcttaccaatttagaatttagaaaactaagttttctgacataactgctgacttttacatgttctttcagtgtttttccttctttctttctttttttttttgagacaaagtcccactccttcacccaggctggagtgcagtggtgcaatctcagctcactgtaaccacctcctcccaggttctagtgattctcttgcctcagcctcccgagtagctggtactacagttggcgccaccacgcctggctaatttttgtatttttagtagagacggggtttcaccatgttggccagactggtcttgaactcctgacctcacgcaatctgcccgcctcggcctaccaaagtggtgggattacaggtatgagccaccgtgtccagccactcagtgttcttaacgggtggaaataaccaagtattggagtagaggctctttttttttttttttttttgagacagaatttcactcttgttgcccaggctggagtgcaatgacgcgatctcggcttaccgcaacctcagcttaccgcaacctctgcttcccaggttcaagcaattctgcctcagcctcctgagcagctgggattataggcatgtgtcaccacgcccggttaattttgtgtttctagtagagacagggtttctccatgttggtcaggctggtcttgaactcccgacctcaggtgatccacctgcctcagcctcccaaagtgctgggattacaggcgtgagccactgcgcccagcctggagtagaggctgttaatgataatagtatacattaagtttcctaacaattaacagccagaattttgtaaaacttgcaaggaagcatttctagttccctcctctccccaaaagaaacagaggctaggggaggagacctttcttagttggggttctttaagcttttattgcatataaaagtgatcattatttactgttttattacataaattagctgagaggataaaaaactgtactgaaggaatgtgtattcctgtctggtgtgacctttgacacacctgtgttctggaaattgtttggtcacatatgtttaagctaggtatagaagattcaatgcagcaaggctgtctctggcactctggaagggagggtgatcacctggagccctactttttttttttctttttcttttttctaagaggtagagtcttgctctgttgtccagtctggagtgcagtggtgagatcataactcactacaacttcaaactcctgggctcaaactatcctcctccctcagcctcccaagtagctgggactacaggcatgcaccagcatgctcacctcgttttttcattttttgtagagatggaggtctcactgtattgcccagctggtctcaaacttttggcctcaagtgatcctcctgccttgacctcctatattgctgagattccagcaatatagaaggtgagcctatcacacctggccttaaagccccactttccattgtgtgtttgtccacaaatgtccctaaatgcttctgtgtatgaagttcttcgctcagaacaatttttaatgtctagaaatcagtttgtctagtgcattattttttagcttagagagtctgaaagttgctgcatgcttaatttgtgtatatacatatataaaaccaacgaaagggaaaaagaaggccatttcgggagactttagtcttggaacacacatttttttcacctaaattttgaacattttctctcctggtctttggtttattgggatgaagtcacaaaacccccatctctcctgggaagaggagtggcaggggagacctgtccttgcatcctatagccctggcaaacgggtgtgctctgaaggaggaagggtgtggagggcctttgccacggtgccctagcttcaccttctgctgtgacacccaggattctcagcagagctggaggtgggggcacggagcgccaactgcccctgctgctgctgtcctctttcccctttcccacgtctgccaccaaaccagggtggaagtggaggactcacctgtgcccacatcttaaccctttacctccagcatcggggtagggaaggggcgggcacagaacaacttaaacggcttctggctccttggtttctgtgtctgtggtacttttatgtccttacagacaagtgtgattccattggataaatgcacagaggttgtgtggattacccaaggggatgggtaggcattgagggcacccctggacttagaatttaggacttcagaagggtgactgctgatccttctcattttcaagtccttctggttgtttatttttgtacatttcaatacttatcctgtgcccctgtcttttgtcagtttcatattcctctaatcagaatcactcagcacccctttcattttctctccgtgtctcattttgcattgttccatacctgacataagcttgtgttaactcgggttctcagtcttgtccatgttgcagagtctggacgtcatggtcttctttgtgaaataccatgaaataacatttagtgttgagggccagatgtggtggctcatgcctgtaatcctagcactttgggaggtcgaggtgggcatatcagttgaggccaggagtttgagaccagccaggccaacacggtgaaaccctgtctttactaaaaatacaaaaaattagctgggcatggtcatgagcgcctgtagtcccagctactcaggtggctgaggcacgagaattgcttgaacgcaggaggcagaggttgtagtgagctgagatcacgccactggattccagcctgggtaaaagaacaaggctccatctcgaagtaaaaaaaaaaaaggctgggcgaggtggcttacacctataatcccagagctttgggaggccgaggcgggcagatcaggagttcaagaccagcctggccaacatggtgaaaccctgtctctactgaaaatacaaaaattagctgggcgtggtgatatgcgcttctaattccagctacttgggaggctgaggcatgagaatcgcttgaacccaggagacagagggtgcagtgagccaagatggcgccactatactccaggctgggtgatagagtgagactctgtctcaaaaaaaaaaaaaaaaagcctgtaatcccaccactttgggaggccccaggcgtgcagatcacctgaggtcgggagttcaagaccagcctgaccaacatggagaaacgctctctctgctaaaaatgcaaaattagccgggcatggtggcgcatgcctgtgatctcagctactcgggaggctgagacaggagaattgcttgatcctgggaggcggaggttgcggtgagccgagatcatgccattgcactccagcctgggcaacaagagcagaactccgtctcaaaaacaaacaaacaaaaaaatgatttagtgttgtcagatacatcttatacttcattttactacagattagtgctagcactaaaaataaaagagaaatttaaaattaagaaaattccatccattaactgaagttttcctgtatttcaaacaagactgtccttatctgagttcagtaatggaaagccttgttcctccactcttatccttcccatagaatacttttctgaaaatctttttttttcctaagttaattaacagggtgaaagtctcttttaactcatcagatgtcagacttgttgtatagtgacagagaacctactcacctgaatgttctgtgtttccattcactccttctttcattaacaaatacttattttgaatgtctacaatatgtgaattacagttagttacacgtatgcaggatgcctccatgattaaaacagagaaagtccttgtccttgtggagtttatattccagtggaggaagacataaagtgagcataataaagacatagattatctagaaggtgatgaatggtttggaaaaaaataagacagcatggtgagatgatagtggtgagagggcagagagaggcagacagggtaggcctcattgtggaggtgacatttgaacagagactagagaaggtgagggagagtcaggtgactaggtggggagaaaagcattgcaggcagtgggaacgcctagagcaagccccttagcggtgtgagctgctgtgggaggactgaacagggtcaggtgtggccaggcaggaggggaggggcagatcctcaagtttggactggagttgtaaatttgagagttgccaccatctatgaagctgtgaaattagatgagaagcccaaaggacgagagggaacagaaagagaggacacatgagcaagtcctgggacgtgaggctggggagaagaggaaccagcaaaagaaaccaagggtggaaggaggacaccagagaggggcattctggaagccaagtgaccgtggacatggccgcatggaggccactgatgacctttatgaaaacaaagcttcactggactatttgggagagactgagagtagataaattggagatagtgtaagatgtacagcaaaggggagcagaggggagagtggttatgagtcgtgttaatggaagtaacagaatgtttgtggccgatgggttatcagtggtggaggcaggagaggagagagaattccttacataggtgtgccatttggagggattaattttagggccactggcatggaaatttcctctgactgatgactgagggcaggccgactcctggggcacagatgcacatagtgggagcttgtggacacgctcctctgagagtacttaagtagggtggtcagttgagagcagatgatgggggatcttatggaggcctgagaaaagaggaatttattggttggtttttttctgccttgcaccttaggttgtataaaggcatgagtaacacactgctgacactttttggaacagggaatactgtgttgtagatcccttgatgagatttgctgtgtctttgttacagggacgtgaacaccaccatcatggagctcctgatcatggtgtatgcatgtaagacctcttgtgccaagagcatcattggcgtgataccctactttccttacagcaagcagtgcaagatgagaaaaagaggctccattgtctctaaattgctggcttccatgatgtgcaaagctggtaagaatggcagatgtttcacaattaattgggggcctgggagttttatttatttattctctcttttttaagacagggtcttgccctgtcacctaggctggagtgtagtggcgtgatcatagctcactgcaacttgaactcctacagtcaagcagtccaccagagcctcccaagtagctaggactataggcacataccaccctgcctgctaatttttaaattttttgtagatactgggtcttactatgttgttcaggctggttttgaactgctggcctcaagggatgtttctgctccagcctcccagggtgctgagattatagtcatgaaccaccataccctgctggagttttatttttaccttagaaatatcaaagtaatggctgggcacagcagctcacgcctgcaatcccaatgctttgggaagctatgtgggatgatctttgaactcctgggctcaagtgatccccctgagtagttggaactatggacatataccaccgtgcctgcctagataggcatatattggaaaagatacatattattctgtgtcaggcattttcaggtaacaacctaagtatttttcctgtgtttctaaataaccttcatagttgttattgggtatttgtgtcaatatatttgtgtttgtgtgtgtgcgcgcttgtataagtgtatatgattttatttatttatttatttattttgagatggagtttcgctcctgttgcccaggctggagtgcaatggcatgatcttcgctcaccacaacctccacctccccggttcaagcgattctcctgcctcagcctcccaagtagctgggattacaggcatgcgccaccacgcccggctaattttgtatttttagtagagacagggtttctccatgttggtcaggctggtctcaaactcccgaccccgcctcagactcccaaagtgctgggattacaggcgtaagccactgcacccggcctatgatttttttattttaatttttattctgtttatttattttttgagacggagtcttgctccgttgcccaggctggagtgcagtggtggcacctcggctcactgcaaccactgtctcctgggttcaagcgatttttgtaccttagcttctctagtagctgggactacaggtgcctgccaccacactcagctaatttttgtatttttagtagagatggggttttgccatgttggccaggctggtctcgaactcctgacctcaagtgatccacctgctttgggctcctaaaattctgggattacagacacaagccaccatagccagcctgaatgtatatgattttagaaggtatgtatcacggagcatttgcacagagtgaatagaataaaagtccccatatcactgcattttaagacaggtacttactgtagaataaacctttttttttgtttgttttttgagacggagtcttgctctgttgcccagtctggagtgcaatgacgtgatcttggctcactgcaacctccaccacccgggttcaagcaattctcctgcctcagcccccagagtagctgggattgcaggcacacaccaacatgcccaactaattattattatttttattttttatttttgagtctcacctgtcatccaggctggagtgcagtagcgtgatctcggctcaccgcaacctccacttcctgggtttaagcgattcacctgcctcagcctcctgagtagctgggattactggcgcccaccaccacgcctggctaatttttgtatttttagtagagacgaggtttcaccatgttggccatgcttgtctcgaactcttgacctcaggtgatccaccttcctcagcctcccaaagtgttgggattacaggcgtgagccaccacgcccagcccagaataaactttctaagatagtttttcagtaaaggcaaacgtaaaacaaacatttaaaaactaggcagggtgtggtggctcacgcctgtaatcccagcactttgggagaaccagggggcgatcacctgaggttgggagttcagagcagcctaaccaacatggaaaaaccccgtctctactaacaatacaaaattagccgggtgtggtgacacatgcctgtaatcccagctactcgggagtctgaggcaggagaattgcttgaacccgggaggtggaggttgtggtgaaccaagatcatgccgttgcactccagcctgggcaacaagagcaaaactccgtctcaaaaaaataaaaataaaattaaaaactcaacccgaagcaacctcaggagcctaccccattgtaaacactatgacaggcagctggtgaggagagcaggcttgcctgctgaatcttcaggaaagggcccatcttctctaccagccttgcttgatgggcctccagacttactttcctgttcttttgggcaagtaatgctttaaacaatttttcatactgaattttccttacacttttctggtgatcgttacaaaggtggtgaaggttttctgttttctccaatttccaggctggtgcagtttgtcttgatatctttttttttccccatgggtctcagtcctcttgcccgggctggggtgcagtggtgtgatcactgctcactaccaggaggtagccttgacctcctgggttcaagtgatcctccgaccttagcttccagagtaactagggactacaggcatgcatcaccatacctgactagttttttgtatttttagtagaaatggagtctcaccatgtggcccaggccattttcaaacacctgggctcaagtgatactcctgcctcggcctcccaaagtgctgggtttacaggcatgagccaccacacccggctgacttgttatcttaagactggactttgccatgcctgttaaacttcaagaagatttgatctgctctaatataatttttaaagactcttctgtattactgttatctttgctatattatgactattttttatttatttattttttcgagatggagtctcgctctgtcgcccaggctggagtgcagtggcatgatctcagctcactgcaacctccacctcctggattcaagtgattctcctgcctcagcctccctagaagctgagattacaggcacatgccaccacacttggctaatttttgtatttttagtagagacggggtttcaccgtgttggccaggctggtcttgaactcctgacctcaggtgatccgcctgcctcagccttccaaagtgctgggattacagctgtgagccatcgcacctgaccaagactttaaattgatgtgaaaatcaggcatctcacagtactaaaaaaaaaaaaattttttttgaaaaatacaagtgctgagtttttttgatggtagaacaattttgtctttttttttttgagaccaagtctccccctttcacccaggtcggagtgaagtggtgcgatctcggctcactgcaacctccgcccccccaggttcaagcgaattctcctgcctcagcctcccgagtagctgggattatgggcacgtgccaccatgcctggctaatttttgtgtttttagtagagatgaggtttcgccatgttggccaggctggtctccaactcctgacctcaggtgatccacccgcctcggcctcccaaagtgctgggattacaggcgtgagccaccgtgtccggccttattttttatttttttgaggcaagatctcactctgtcacccagactggaatgcagtggctcaatctcagctcacttgcagccttgaccttctgcactgaagcgattctcccaccttagcctcctgagtatctgggactacagatgtgcgccaccatgcctggctaatttttgttttgtagaggcggggttttgccatgttccccaggctgatctcaaactcctgagctcaagcagtttgtcagccttggccttcaaagtgctaggattacaggcgtgagccactgtgcccggccatgagagcaattttttttttttttttgagacggagtcttgctctgtcacccaggctggagtgcagtggcatgatcttggctcactgcaacctctgcctcccggattcaagctattcttctgcctcagcctcccaagtagctgggactacaggcacacgccaccacgcccagctaatttttgtatttttagtaaagatggggtttcatcatattggtcaggctggcgttgaactcctgaccttgtgatccacccacctcgccctcccaaagtgctgggattacaggcgtgagccacagtgcccggctggagagcaattttttaatagtaacttattgtatatagtattttatgtagtacctattttatacagtgcaacttgtttttaaactgtttataggctgggtgcagtggctcatgcctgtattcccagcactttgggaggctgaggcaggaggattacttgaggtcaggagttcgagaccaacctggccaatatgatgaaaccccttctctactaaaaatacagaattatctgggcgtggtggcatgcacctgtattcccagctactttcaaggctgaggtgagaggattgcttcagcctaggagttcaaggctgcagttagctatggtcatgccactgcactccagcctgggtgacagaatgggatcccatcttaaaaaaaaaaaacaaaaacaaaactatttattgcttgtgtctgctttattttcaaaggtctaactcatcttattactatggatttacaccagaaggaaattcagggcttcttcaatattcctgttgacaatttaagagcatctcccttcttattacagtatattcaagaagaggtgagctagctcaaacttttttattttaacattctgattaaggttgaaagatgtatttccatttccttaggatacccctaaaggattaaaacttgatgtattgtacttaaagtaccattatactttatagctataatccaacgcattttagaattctgaatctgcagtttgtttctttagataagctcttaaaattgctttttcttttggacctcaagtacctagaattggactagatatgattgtaatgagtaatttactctcattactagtctatgcttgatcctggttctgttttatgtatccatctatccatcctgtctctctgtccatccagttataatagccagcatccatgatcccacctcccagcaagaaaactagagtcatcatcataacttagagctgctcatgggctccttctctgtcctatccccctgcctccttccaccctagggaaccactgtcctgaagcggtgctgaatctgtcagatgctttttctgtatcagtggagatgatcattttttttccttcattctgttaatgtggtttattaccacccttgaatcctgggataaatcagatgtttaattttaatatagctacatttgtttttctttgatatgagttagcatttttgtgacttactatttaagaaagcttttaaaatgttaatttatactgtacttagctattttgcttttagctgtttttctttctttttttttttttttggtggggggtgtgatggagtcactcccaggctggagtgtaatggcgcaatctcagcccactgaaacctccacctcccgggttcaagcaattctcgagtagctgggattacaggcatgcgccaacacagctggctaattttttgtatctttagtagagatggggtttcaccatgttggccaggctgatctcgaacgctgacctcgtgatctgcctgcctcggcctcccaaagtgctgggattacaggcatgagccaccgcacctggccttagcggtttttcttatataaattatttctctctttaataacttttctagataacttctttttacagtactgtatttaaaagaagataacttctttttacagtactgtatttaaaagatggcagtttataggtttctgaggaacttctttctggtaagaatacagggcttccccattctccagcaattgttataagtccttatagagaaaatgaatttaagtatttttgaaagagaaaaatgtaaaatattctgctttttttttttctttaaagttacacacaagaaacataaaaactctacgccaggcgcagtggctcacgcctataatcccagcactttgggagtctgaggcgggtggatcacttgaggtcaggagttcagaccagcctagccaacatggtgaaaccccatctctactaaaaatacataattagctggatgtggtggcgcgtgcctgtaatcccagttacttgggaggctgaggcaggagaattgcttgaacctgggaggtggaggttacagtgagccaggattgtgccacggcactcctgcctgggtgacagagcgagactatctcaaaaaaacaaaaaagaaaacaaaaatactctaacaaattaaaaaaataatagagactttaattttacctgaaaaattttatgttttttttttgagacagggtctttctctgtcacccaggttggagtgctgtagtgccatgatagctcactgcaaccttgaactcctgggctcaagagatttctcccacctcagccttctgagtagctgagactagaggtgtgccaccacacctagctaatttttaaaaaatatttccagagtcagaatcttgctgtgttacccaggctggtctcaaactcctggcctcaagcgatcctcctgcctcagcctcccaaaacagtgtgattacaggtgtgagccactgtgcctggcctaattttacctgaatattattcttagttgagagagaaggtgagataaaattggcaaatgtcttgatagggaaggatgaagaggtttaggcagagagagagtgagagggtgagcattgaacgtggttcagttagcaaccagccgcatggagaaacctgtcattttggaagaaatagagcagtcgctatagacttatgtgggttgctgtcgacatcttgttgttttaggggatgtttccattcaggacacaggcatgttgtgtgccaatgtctcaaggcacaaatggcaattgcacctcttaagggatgcccggtgggtgagcctaaagaacgaaggctggggcacccttgtgctggttgcaaggtcaggctggaagcctaacgctagtcattgcctgtagtgcaggcttctacctgaggatgacactgccttctacttgaaaaaatccccattttagtttcattgttgagaagaagtcagggctgagtgtggtggcccacacctataatcccagcactttgagaggctgaggaggttggatcagttgagtccaggagtttaagaccatcctcggcaatatggcaaaaccctgtctctacaaaaaatataaaaattaaccaggtgtggtggtgcattcctgtggtcccccctactcaagaggatgagaagtgggaggattgcttgagcctgggaggttgaagttgcccaggtggtcgaggctgcatcaagccgtgatctgggcgacagagtgagattccttctcacaaaaaaaaaaaaaaaaaaaaaaaaaattaatatgtgggaactcagtgttaaaaaggaatttttgtgtattgcttttttcttttttttggagacagtctctctctgtcactcaggctggagtgcgattttggcttactgcagcctccgcctcctgggttcaagcaagcatatctggctaatttttgttttttgtttttttttgagatggagtttcgctcttgttgcccaggctggagtgcaatggcatgatctcggctcacagcaacctccccctcccaggttcaagtgattgtcctgcctcagcctcccgagtagctggggttacaggcatgtgccaccacacccggctaattttgtatttttagtagagacagggtttctccttgttggtcaggctggtctcgaactcctgacctcaggtgatctgcccaccttggcctcccaaagtgctgggattacaggtgtgaaccaccgcacttggcctaatttttgtgtttttagtagagatagggtttcaccgtgttggccaggctggtcttgaacttctgaactccagtgatctgcctgcctcagcttcccaaagtcctggtattacaggcatgagctactacacctggcctgtattgcctttttatagtatacgtatcttgtctcttttgttttcgtgtgttagagcctcttaaagcaggggatagatattcatgtttcactgaatctaaggtgctgtcagtccaggcttacattattttacgtcaccaagaaagaagaaaacactgctaattatactgtggcactgtgccttcttgtcacttagtgatcctattctgcaggttttgatgctgacgctttctccatctcttgtgtttgtcactggaatttaagcaccttctgccagagtcagaaggaacattctggtactaggatgctcgttgccttgaaatttttgccatctatacttttttttttttttgagacggagtctcactctgtcgcccaggctggagtgcagtggcgcaatctcagcttactgcaagctccgcctcccgggttcacgccattctcctaggcctcagcctccccagtagctgggactacaggcacctaccaccacgcctggctaatttttttgtagttttagtagagatggggtttcaccgtgttaaccaggatggtctcaatctcctgacctaatgatctgcccgcctcagcctcccaaagtgctgggattacaggtgtgagccaccgcgcccagccaacttttgccatctcttctgagggcgtctgacagtgtctgttgccttccgctgcactgctggggatgtgtcaggcagtccttttcacagtttgacctactggtagggatcttcctttcttaagtttcataaagcatttgattgttgccttgcaagaaaatgtggaattgtatcatttttccagtgatgaatatttgattcatgaatatcaaattatactctgatggtctcttcctgtgtctttctgcatacatgataatttttcttttcttcttttttttttttttttttttttttgagacggagttttgctcttgttgcccaggctggagtgcagtggcgcaatctcagctcatcacaacctccgcctcccaggttcaagcgattctcctgcctcagcctcccgagtagctgggattacaggcatgggcccccatacctggctaattttgtatttttagtagaaagggggttttccatgttggtcaggctggtcttgaactcccaaactcaggttatccacccgcctcaacctcccagagtactgggattacaagcgtgaagccaccgtgcccggcttgataatttttcattttaatgaaaaattttaatgaaaagaatcatagtaattctttctggagacattttaaatgggttcaaacaattctcctgggttcaaacaattctccggcctcaacctcctgagtaactggattacaggtgtgcaccaccacgcctggctaattttgttttgcatttttagcagcgagggggtttcaccatgctggccaggctggtcttggctcagatgttctgcccaccttggcctcccaaagtgctgggattatgggcatgagccaccgtgcctggccatctttgggaattttttttaatctgttaagtatttcatcccttctatttcttttattattttcctttgggaactattaggtcctgaaaattttggatctagtctctataacttttaaaaacttattttactttttgcatacttatatatagcattctggggaaattccttgtcttgatcttccctggtttgttcttaaagttgtgtttattctgctgttaagccagccagctactgggtttctttagaccataataacttcttccccctagatttatttttggttctttttcataataacttgttctttcttttttttttttttaatttatttttttattgataattcttgggtgtttctcacagagggggatttggcagggtcatgggacaatagtggagggaaggtcagcagataaacaagtgaacaaaggtctctggttttcctaggcagaggaccctgcggccttccgcagtgtttgtgtccctgattacttgagattagggattggtgatgactcttaacgagcatgctgccttcaagtatctgtttaacaaagcacatcttgcaccgcccttaatccatttaaccctgagtggacacagcacatgtttcagagagcacagggttgggggtaaggtcacagatcaacaggatcccaaggcagaggaatttttcttagtgcagaacaaaatgaaaagtctcccatgtctacttctttctacacagacacggcaaccatccgatttctcaatcttttccccacctttcccgcctttctattccacaaagccgccattgtcatcctggcccgttctcaatgagctgttgggcacacctcccagacggggtggtggccgggcagaggggctcctcacttcccagtaggggcggccgggcagaggcgcccctcacctcctgggcggggcggctggccgggcggggggctgacccccccacctccctcccggacggggcggctggccggtcggggggctgaccccccacctccctcccggacggggcggctggccaggcagaggggctcctcacttcccagtaggggcggccgggcagaggcgcccctcacctcccggacggggcggctggccgggcaggggggctgaccccccccacctccctcccggacggggcggctggccgggcaggggggctgaccccccccacctccctcccggacggggcggctggccgggcggggggctgacccccccacctccctcgcggacggggcggctggccgggcagaggggctcctcacttcccagtaggggtggccgggcagaggcgcccctcacctcaacttgttctttcttgttgtatataatttcccattttaacctccgtagagacaatagacttgtttttgttagagtcctttcttttaggtcctttaattgttattaactgttttcttggttctgtcttttcttggctgggtttggtaatgtttgatgatgtttgatgagacaaggaaatacatgaaaaagttta

SEQ ID NO: 197 - DNA, 32744 bp, Homo sapiens
  source 1..32744: mol_type = other DNA
ccgcccggagcgctgagccgcgggagcggagccggggttagcggcgctgctggaagatggcgagcggccgggacgagcggccgccttggcggctagggcggctcctgttgctcatgtgcctgctgctgctggggagctcggcccgggcggctcacatcaagaaggcggaggcgactaccacaactacgagcgcgggcgccgaggcggccgagggccagttcgaccgctactaccacgaagaggagttggagtcggcgctgagggaggcggcggccgcgggcctccccggcctggcccgcctctttagcatcggccgctcggtggaaggccggccgctgtgggtgcttcgcctcaccgccggcctggggtcgctaatccctgagggcgacgcggggcctgacgctgccgggcccgacgctgcggggccgctgctgcccggccggccccaggtgaagctggtgggcaacatgcatggcgacgagaccgtgtcgcgccaggtgttgatctacttggcccgcgagctggcggccggctaccgccgcggggacccgcgcctggtccgcctgctcaacaccaccgacgtgtacctgctgcccagcctcaaccccgatggcttcgagcgtgcccgcgagggcgactgtggcttcggcgacggcggcccgtccggggccagcggccgcgacaatagtcgcggccgcgacctcaaccgaagctttcccgaccagtttagcaccggcgaaccccccgccctggacgaggtgcccgaggtgcgcgccctcatcgagtggatccgcaggaacaagtgagtgttgcctgccccctccccgtccgtgtgagcctccaagggccgaggctggttccggcacccagtaggcgctcagacaatgctggcataaggggtggcggtggtgaaggtgaagggagacaccctgtaacggggacagggcccaggccgcgtagcctcccgtcctgctaatcatcaaagaattgcctcctagaggctgtcatttgttcaagggatggctggaggggacactcctttctgacatttctggtccctattcttacaggggcatagaatatgagcgagaagagatcttaaggataacctaggtcagctcacacattttatagataagctgtcaatgttgttatcttatatcaaaagtgcctaatgttataggcgctgtgctaattttttctgtgactgcagtatctcactttattttggccacaacctgatgtcatagacaccatcagttttgcatacggggaaattgagggtcagattggttaactgatttacataggagtgtggctgggacttagaattaggcaatctgattcccgatagtcctcttagccacggagggacactggagcccaaaaatggcagatgatattcccaggatcttccccttgcctatttgacagaagctgatttttctccaatttttacctctgactcagcttaagaagatatggacttagctggagaacttgcacagatctgtgagccgcttcattttagactctgaagggtttgtgatgtcatttgtgcaccttattagcctgggcagaatggctaatggtcacacttctaatacacactttaagtgttattaagcattgcatgaggtttaaaaaattacaaagtagaagaaggaggacctcaagaaattagtataaaacaagagaatgttataaatatttatgaggtatgttggtgtacccagttaaactttacaggaattgttcccactggcaagatgtgtgtgggctgcaataacacggaccatctctgtggaagaggtagagcttgagctatctccagagatgggcaggattttcagcaaaaaggagaggaataaaataagagggaactcactccagatggcatagtgtctgaagtgagcaggcatctcttccccttttctagcatcagcttttccccatttttgtatcttcataaggcttttgaagcaataactgatcattccatctggattaaaagaagatttctgagggactgctaagataaagaagtttccctgcgggacttggaatcatttcttctacaagatttcagtcatatatagaagatctagaaaattcttgagtgttaggacagttcctgagtcttttcgtcttctatcttttactttactcctcttgataagctctcttgtagatatataatttcacatagactttctgggaggatttttttttcttttaaatacgatcgtgtcatcacctctgaacatctgcgtaagaaatatgactttgacatacacttattgacagagctgtgatggccagggctttttggagatgatacaacaaatgcaccgtttgcattgcttaaatgtttaaaatgctctgtccttgcacctttaaaatgctgtgatccttgcagggatgtaaattctgtgcctggatttttcttttcagtattagttgtgctgtgaccaaatatgaaaataagctttttcttggtgcaagtcgccttgaggctatacagagtcattttggtctgtggctgtggactaccctaatcatatctgttcttcaaatatgtaactctcattaatcaaaagggaaagtaggtgatcatatatggtaaagagtacatccatcctaactcagtcttcaagaattcactcaaaatgcgtactctgtgctattaaccaataacaaaggacactgatatgtgaataaaattaaaaacacaagcacacacacaatttgatattgatgcctaaatatagtgtcaactttatggatgggatatttttaaatactcaaacattagtctgtatgggaaaactacctttttcagtgtattttgtgaggtaaaccatttgagtaatttcttgatatcctattcacccagctatattcgaattagatttttgttgttatttcgaatatgtaaaattttaaggcttaatttcctccagcttgggaaaatgaagtttattttctttgtttcactttatacttcatccaatggatgttgagacaaatacttaagaaaatatataaaaaaattaactttatcattcaaatgaagattttatagttgactcctatttttttatagttgaccgctatgcttctttaagtgaatatacctgcttaaattttcataggtaattagcatataaatgatatttgaatgtgtttgtgaaaagcattattacagtgttgagagtgggtgcagatgatttttttgggggcttatgtatacatatctatgattgtctgaatctttgaaatttagtttgtcagatatcaagttatcttaatttttttcaagttatctacagggttacctggatagcgtaatagagttaatttagagattaactgtttaatatttataaactcatttgtaatatctctaatatatttaccagctactttaaatcttatgcaaggaatgatatgtgatactgaagtcaagtatgagaaacatttcagagaattgatttgaatggaaaccataaagtacctgtcaaataagattggagttgatttgcaaagttgatttgacaaaaactcaaagcataatcttacagccattgtagtcactttctcttgaaatcttcattgtaagaatgacactggtactttcaaaactgtgtaattacagtaaggaaaatcgaagtgaattttattactcaagtagattgcaaatatttcattgttcaaaagtatttgattaggccattttgacaatatttctgagaagtgttggaagaaatgttgaacaaaatgagaaacagcattttgtagagaatcttggattttaaagttttacttaacatgtgtaattaaagtagcatgctttacttatttagaatatttaattatccattttattttactagaatatgaatgcccagagggtatttgtttgtttgtttcgctcacagatgtatctatccctggaatgtcctttgggatgtatctgtccctgaaacgtcatttggcaaatagttgacactcaagaaatgtttgttgccgaatggattacctgacctgccccagccttcttataactttcccagagtcagtgggggaaaaatacttaaaaattgttttagaattacaaaccagagagtaaattgttaataccttagctataggggagaggtggttagagtggagttagaaagttagaatatttacttagtttttgtttctgtatcattctattacccaaggactggcagtggaagtggggagtagaatgatagtttgtaaggcagtgtttccttaaacaggatgctagatacctccaaagaaatgaacatttgttgagcaggggctataaagtagtctttatgccagattatgtttcatgtgtgttatcttaattttcatgacaactctgggaaatgggtagcattaatccccattttacaaatgaaaggaaaactgaggttcagcgaatttaaaggcagtaacttctcctgattatgttatattactggtgagcaacagatctgggagacggaatgttcttacccaaatttgtctccaaagcctgtgccattgccactacaccaaatggcattcttctctggtgtctggaagggtgctaattataattatattagtttttagctagtttcttttcatggtctatgctagtgtttaatcagtgtccttattggcaaagatctgtcttctgatgaacagattttgtgttacaagtaattttcattgtttgatcttctctgggataatactactcatcatgcttaaaatagtctttcaaattagacatgataggtttacttttttttcaagcatatagaaaaatcttatatatcaaccccctttagaatttctgtaggtcagttaatttcaacaacagaaaggcagaagcaagaaaatcctatttagaatggaaaaagaaaagtatttaatctctactgatagtaatggtttaagctgttatataagggaaagatgcttaaataggactttagcattttttttgcctttaggttttagcttttaccataaaaggaattcttcagtatttctatatagataagtttgaccaaattgtaaattggttcacttaaaagtagaagcattaaaaaaaatgtttcttttacaggagcagccttgcctccatgtcaatttatttttttaatggcccaatcagaaacattgggccttgaaagagctgcttctacagtgatgtattggaggactagtctttgacatggtgtattgtttttctctgtaagcagctcactgaatcaggttgttttctttgtttgtttttttcctgaatcttctcaactatggcttctctcttgaaaatgtgaatttagtatattgtgaaactggagtgaaacacaaaatatccttttaaaaattagacttcctatcttaaaaattctctttggacggtaaatgtaaaaagcataaaagttattaacctaacatatatgcaatgaatatttatatataccagccatattttctgtggaatttacgtattatgaaatacaagtcgtagactgaactatatgaaattgtcatttttttaggtcaaaaaaatgggtgagggccaggcatagtggctcatgcctctaatcccagcattttgggaggcctggcaacatggcgagaccccatcactaccaaaaagaaaagggtgaatattggcaagctcaaagctcatatagttcaacctaatacatgaatttagaattccctaaataagacatttcctgaaatattaatttatactgtgttatccagctattttttcaatgaaggaaaactctttaaagttagtttaggttaacctgaattgttaaaggtgtttgaaatcttaaattgataatactttctttccattttctttttttgttgttgttagtctccttataacagataacagctgatagagttgttttctaggtctccaagagagatattggagtttatttctaaaagattttgtggaatttttttaatgcatggtgttttgtgtccttttttagtgatacgtgatttggttgtattttcaaaggtttgtgctttctggaaatctgcatggtggctcagtggtagcaagctatccttttgatgattctccagaacataaggccactggaatctatagcaaaacctcagatgatgaagtatttaaatacttggcaaaagcttatgcttcaaaccaccccataatgaaaactggtgagcctcattgtccaggagatgaagacgagactttcaaagatggaatcacaaacggcgcacattggtatgatgtggaaggtatgcaaagcattgagtttgctacattttcccccttgttcgttgaattttgttatgtgtattctgagcaaaaaagaagaaactctgtagaaatctaactttaaaagatatttatttttattttgaaaatttcaaatctacagcaaaattgaaggactacatgaagacctatctgtccttcatttaaattcaccactgttatcttatcccagatggcttgcctctccctctctctttttcactctctacatgcacgtgtatgtgcatgcacacacacacacacacacacacacacaatcacacaatttttttgccaaaccatccaaaagtaggttgcagatttcacaacactttacctataagttcctcagcatgtatttcccaagtacagggacattttcctgtttaactatatactattaccataactgagaaatcaatgataatttaatattatcataccacatgccatccgtaactcagatttcccccattatgtccaaagtagccttggtagcccctttttatccagatctagtatccaatcaaagttcaagcattgcagttggctcttgtaaagagaccgtgctaatagtcctatggaaaaattccataatctagattgtcactttcttcatggtaagattaggtcaggtttcccagcaagactattatatagatcatgttgcgcattatatcaggagacccataacgtcaagctgcaagtggccaagttggacagcttggttaacatgatgaccaccagcaaccaggtctctccatttaaatttaaaatgtatatattttttaagagatagggtctcactctgttacccaggctgcagtgcaatagtacaatcatagctcactgtaatcacaagctcctgggcgcaagcaatactcctgcctcaatctcctgagtagctggaactatagatgtgtgccaccatgctagctaatttttaaattttttgtagagatggggtatcgctgtgttgccgaggctgatctcaaactcctgacctcaagggatcctcttacctcaaactcccaaagtgctgggattatagatgtgagccacttcacccagcccagatctctccattttacataaaggcacattttccttttgtattttaatctgtgaggtgatcatggaatgctgttttttttatttttattgtggtaaaacatacatatatatatacataacatgaaatttgacagtttaactgtttaaacatttttaagtgtagagctcagtggtactaattttcacaatgttgtgcaaccatcaccactatttctaaaacttgttcatcatcccaaacagaaactcggtaggcattaaataataattcccacttccatctctatcccttacccccagccattggtaacctctaatctactttctatctctgtgaatttgcccattttagatattttatataactggagttatacaatattcttccttttgcatcaggcttatttttcttaacataatattcttaagggtgatccattttgttgcaggtatcagaactttattcatttttatagctgaataatattccttgaatgtatatgttagtaatacattttgtttatccatctattgatgagcactgggttgtttccaccttggctactaggaataatgcgtaatgaacgttggcgttcaggtatctgtatgagtccttattttcaattcgtctggatatatacccaggagtagaattgctgggtcaaatggtaattctatgtttagctttgacagactattttccacagtagatataccatttacattcccaccagcaatatataagaattccaatttcttatgaaatgttattttttaaagaattgtttgttgttgttgttgttgttttcagatggaatttcactcttgttgcccaggctggagtatagtggcatgatcttggctcactgtaacctccgcctcctggcttcaagtgattctccagcctcagcctcccaagtagctgggattacaggtgcctgccaccaggcccagctaattttttgtatttttagtagagatagggttccatcatgttggccaggctggtctcgaactcctgacctcgagtgatctacctgtctcagcctcccaaagtgctggaattatgtatgagccaccgtgcctggcaagaattgttaatacaagcttgaactgtttaccttttctctttaaatgctatgaaaacagctattactctttttaaactttaggtatgctttgaataataacgtttttgtttttatgcacagatgtagatgtagagggaacttagaaggaataagtcaaccaatggaaatgtcatcagtgtaaattttttcttttctaggagtctgcccatgatgaaatgccttaggtcttccttacctttttattggcagtcacattataaagtgtcttatgacatgtctcttaatgtatatttaaacctttgaattactcttttactttttatatcaagccatatgtacccaaaatgggtcataagtttgagaatttaatactttcgttactggatctttggggtattgcttttctggttggaaacctctgtgcctggtggtgcctttgcccaagttcttgtcctgcatccaggaagaatgaggtatgcagacaagtggagggtgagcaagacaaagaggagctttattgagctcagaggagaccggcagtgggcatctcctctctgtaggcaggtcacccagtcaagtgttcagccctcagcacaaaggaaccctggagtgggtggcccctctctacaggcaggtcatcctgatgagtgttcagcttcagctttcagcagagaggagctaccctctggttgtcccatcatctctccatcctctgccttgctctgactgagcccagggcttttatggacctcagaggggaggaagtgtatgccgattggttcatgggcgccacgggcagcctggaaaaggcacaagtccccactccagtctatgggactggcagcctggcccccagccttcaggacctccctggcctgaaggtggggcctcaccagggaccccctcccttatacccaggagctagtctgcctcttgctgctttccatggcaccccggctgctcgtgctaaggggcacctgcaagccagtgctgagtcgccctcagtccccaaccttggttccctcttccatgcttgtcagtgcccagtccggtgggggcccaggcaacagggcccaagcatgtgcgtacccctccgggcagtgacagtgcgccgcctcagctccaaccccaatcccggataggagcagacgcaagaatggggagaggccaggcagcaggagcaggcatctccaagcctgcaagggtaaggggggcctaggaggtcgggggacgcagctgctgccagctcccagctcccgccgactcagtggagcatgcagccccagccgtgccccctgggagcctgtggcgggtggctcctaatcctcgctgggcctgggccagtgtctgggccaggggcgacattgccacaagcttccctgttgccctggggctaaggagtggcccggagctgattgcgggcctggggccaggctgtcaggagtgtcaggctgggaggtcaccccacgtgtggcggacactggggacttggccccaagtggcccgcgcagagcctcctcccgagcccaggaacccgggacccttagtggggtgggcgcagtggctgcacttctggccagatccccaaagctggagcagctcctgctttccgccccgcccccgaagcacagccccagctccgcataggggttcctctctgcctgactacattactcccccgctgtgctgctctgggcctgaccccattacggcagcccccagggcagcgggctctggggggtggcagcgggctgtggggggtggctgcagaaggggtggctgtccgcctccttcccgcaccttccggcctgctgctgctatcactttctagaattttctgatcctcctatagtttctaccagtgtttcttgtatatcagaagcattcaaaaagaggtttgacatactatttagaagtgaaaccttctccccataacaattagaggtgatttgaaaatcattaaaaatttttttgtagataatggacttactttaatgtgtaatttttacatttcagtccttgggaaatatatttaataaaacctaactttgaactggtggttttgtaatctagtcaagttgcttcattaatttgagatgatgttacttaaaataatggggtaaatacttaactttgcctttttggaaaaagttgtaaaaggttagaaagtaatttctaactgacaattaattgaggaaggtaaatgtatctcatactacttaaaaaataaatatccggcctctacaaaacgtaggtgtactttggtattaaggccagagattatttggtgaagctagttatcatcagatttttctgattattcagacatctgaagaagctacattatgctgctgtcatttttattttcatgagcatcaacttttctcttgtttcagctgaatgtcggatatgtcctatgttatttctacaataactggcttatttctcttcgtacctcagcaaatattgagcagtttccccttgaagaggaggctgtgatggttttagtttcaacagggtgaattcattgtgtttagtgagtaagatgttgtgaaaccttgtgactaggcatatattcaaaaaacccggatgtcctggagtaattttttttttttttttgagacagagtcttgctgtgttgcccaggctggagtgcaggcgtgatctcagctcactgcaacctctgcctcctgggttcagatgattcccgtgcctcagcctcttgagcagctgggattgcaggtgtgtgccaccatgctggctaattttttgtattttaagtagagacagggttttaccatgttgaccaggctggtcttgaattcctggcctcaagtgatctgcccaccttggcctcccaaagtgctgggattataaacgggagccacatgctcagccgagtaattttactgatgttctatgtgatatatttaggaattctagcttaaagaagtatagacctttagagctgaaagtgaatatattgatttagtccaacccttttgttttagagaaaatcaaggcctgagagaggaactaacttgtgcaatataatgtattaatatagcaaatatttactgagttcctgccgtgccacatatactgtattaggtgatgtaccggtatacagtgagagcaaaacagaaacaactcctgctctgaggaatcagatagtatattagtagtgtggaatctggggtgatttgggccctagtgcctttgccttcattgccagggctggcccagcatatctagctgcctatgtgggtgagccttgcttcattcaacatgtctcacaaacctcaggatccatttaggaaatggctatcctaataaggctgatgaatagccacatccccttccaaagcctcgttattgtgagacctactctggacttgttcatggagtaagatgcctttttttttttttgagatggagtttcgctcttgttgcccagggtggagtgcaatggcacaatctcagctcactgcaacctctgcctcttgggttcaagcgattctagtgcctcagtctcctgagtagctgaggttacgggcatgtaccaccatgcccggctaatttttgtatttttagtagaaacagggttttaccatgttggtcaagctggtcttgaattccagacctcaagtgatccacctgcctcgccctcccaaagtgctgggattacaggcctgagctaccgtgcctggccgcctttttttttttttttttttttaatcacagtgcgctgatttgtatgccatttgcctaccgttctttcttcacagttttgaagacattgtaaaaatcatatgatgttttggtatgtttattccaaagcagatttaataaaaactgaactgtagttttaggtcaacttttaagccatggcgtgtgcttgtagtcgcagatacttgggaggccaaggcgggaggatcttgagttcaagcccagcctgggcaaaataatgagaccctgtctccaagaaaacaaacagacaaaaaagaattgccttctttcaaattatacaatttaaggaagggcaggcaacgtatagttgaaattatttgatcaaagatcatagttttatgtaacttttagaagttttcttgggcagaacattgttatattttattttcttgcagatagaagaacagtagaaggcagtgcaatgtagtggcaaagagagagctttggaatcccgttgccttaggttggaatcacaactctgccttgactagctgtgtgcgtgtgtgtgtgtggtgtgggtgagagacaaattaatgaatttctctaagcctcaattcccacttatataaaattaagataaatactatctactcacaagattaggaggctcaagtgagaatgtgtgtaaagcactttagcctagcatctggtgccatggctacttatatctactagagtttaaacttactcttgaagatagggactttgttttattccattttctatttctagcacacacaaccatgcctggtatatataaggtaaataatagtctttttggaataaatgaatttttgccatccgaaacataaatacatagttatttgatctttggataatcttttttttttttttttttggagacaaagtctcactctgtcacccaggccggagtgaagtggcgcaatctcggctcactgcagcctctgcctcccaggttccagcgattctcctgcctcagcctcccagttagctggtgttacaagcatgcaccactacgcctggctaatttttgtatttttagtagagacggggtttcaccatgttgaccaggctgctctctaactcctgacctcaggtgatctgctcgcctcggcctcccaaagtgctaggattacaggcatgagccactgcgcccggcctaaaatcttagatctttagttaatcttataacaatttataaaaatattcttcctagttttgctcctactctgagtaaataagcttgccttactggtagatcctagatcagtattatttgaacttttttttcttacttttaacctataatatgaaataccttttagttgtgtatgtacatttcatatatatgtgtgtacattaaaaaatttcatggaacaatacttttactatacattctggtattatttcttttagtttgttctatatcattctttaaaaaatatgtctgaacccactaatatatctcacaacccactaatgcatgatgaccttcagtttgaaaaaacactattcttgatcaccctgtggtagaattcatttattttcaaattctaagtaggaacaaaacaccttacaagttgtgtgtgataacttattatttgggtttttcctcccaacttgtttatatgtttcagttatttgcagtgaggactgggccacagatatttatctcagatgttctacttttagattgctttccctaaaatacgaatgagtgttgagttaggaaattggtcagaaatatagttgtcaggcctatgtattgctcatgtgagtctatggattctattattagttaggacagctgccataaagctttatatttgtcttcttaagccactataaacttgaggctgagccttttcaaactagtaattatgattgttttctcctctggaagaagaataaactgttctttggatttatcaaattttcttccctctccttttatacaatggacagagttatgaaatgtggccagaaagcatataatgtaaccaattcagttttttgtgtgaatatcaactccttttatcatgcagacaactattctttccccaaactggaggtcagactgagcagtagcagtgtgctttaaatattgaagtatgtttggctggaagtagattgttgatggaaaaggaagagcatggggaaaataattacccacctgttttcaacaatgctgttgaaagtttagatttggtccagaaatggaccagaaagcttatttttgaggagtattttctgtgtcattaaataggatattatgaattaacccagtaacaccagaaaattgtaatctaaaacaaaaaggaataagatgaacagtatgtaactataaaaatacaatatctgatattaagaaacagacaaatccataaatatagtaggaagtttaaaataggcctctttcagaactagtaggtcatagagatcataactgttagatcacaaaaatgtgagtaaggatacagtggatttgaataacataaataaaccaatctgacctaatgaacgcgtacagaatactgtccttatatctaattttcctgcagagtctgtttactaatttgaggtgtggatgactaagaaaccagctgtcacgcttagggaagatgcatctggttctgttagcgcttgtgttactttgtttttaagattatatattaaaaactaaacaacaaagatacacaggtaaaataggcccaggagcagtggagcacacttgtaatcccagcactttgggaggctgaagtaggaggattgcttgaggccaggagtttaagacctgggcaactggtgagacctcatctcttaaaaaatacaaaaattagtggggcatggtgatgcacccctgtagtcccagctacttgggaggctgaggggctgaggcagcaagatagtttgagctcaggaatgtgaggctgcagtgagctatgattgcaccactgcactccagcctttttttttttttttttttttttttttttgacaggggaagacccgtgtcaaaaaaaaaagaaaaaaaaaagcttataatacagggttcataggatcaagtctaatacttcttagcatgggagcgaagatcccacagtctgactcaagcctataagtttagcctcagctcctacctctcctctgccaccggactacttgtccttcccaaatgtgaaccttcacatgttaggctatcctctgtctgaagtgcttttcaccagtttagctgtaacctcttctgaaacctctcctataataactgtcactatcctaccttcgagagctttttgtttatacagtaccatcagtataatacttatccacttatgttgttaatagtttttttgtttcctgttagtgtgtgaattctttgatgataaggacagtgtagtgctattcgttttggagttatctttgtgcaaaatgtattggcaggaaagagtcctagaggagggaaaactagagaggtgtttacagtcatctgggatgaggtctctttggagataagggctttacctagagggcatgtaggggaatgaaaagggagtataagatacatatataagaagttatgcaagaagaactgcagaattgaccatcgtttaaatagcagaacagaatgtcaaagagaggatgtcaaagatatgactttgaggattttgagcttggattagaaagaatgggagtgggaaaaactaattggatggtggggattgggagacagcaagcgagtgagcatgtgtgtatgtgtgtgtgtgtgtgtgtgtgtgttcgttcaggtgaaagaggagtgaaaactggaaatattaatagtacttgatgtactagtcacaagtacccaatgggcagttagggaataggttctagagcttgggagagaggtcaagatgagaaagagatttagaagttttgagacatttggaaagcatatggcagtgtagatgattttgaaaattgaattaatagtgttttctggcataatttaattgcgtggagctagaagttcaaccagaacatatatataaatgaacagatgggtgctttttttttttttttttttttacctctaaagtgaatgcatttcgtactgggatgttttccttaaggaatgccaacaattcagatattaattctcagcctgatcatattttaaaggtacagttgataatcaaatgtgcattagtaaagtgcttttggtcttacctgatcttgcacattaaagacctggttgaggctttttcttccctttattttctcttttaaaatctgagtgctgcctaatttaaaaggaaagcaaaaaggtaaaacaatactccaaaacagaatatttgcttggagtcacgagttggctttagtaaattgaagcataacctagtataaagactgacctttaggagcagtgcagttgtgtactttgtaacgtgataataggcctaaatgaagagaacctaacactcctttaggatttggcccccagtctttagatctaatgtgtataaattggatgtacttttttcttttccttttttcctgtttaactcaggtggtagagaatgggagagtacatttaaaaaaaaaaaaaaggaaaatacagttcaaagagctatgtgggagacagtgttaaccaagttagacaaaaatgaaaacagatgtaggactgtgtaatttagtttaactctgtagaatcatatcattagcaaatatatattcagtgggagtggtgaaggaaatagattttcacaagataggttgctcagaatacaaagaccaggttcagttagttaagatttgatcaatgtgaacttgaatttaaaaattaggaatttggggaatttttttaagagcaacctctgatttttccattgatttggcccagattttccacctaaaatttttttacaaacgttatgctcattagcttttaaaaatatctcagaaagtacaaaattatcacttaataactcacttattgcctataaaaaattgttcaggaaattcaaagtcgtgagagaatttctcactatccttcaaagtagttttaataaagtaatatcattaagctccaagttgaaatatagggtagaaattgtctgtctatattcctagactttaaaatgcttttcctatttaaaaaaacacattgtagtttccttgtaaaagattaatagggttcttgtgtaatgcagtttgacactttatagttggcctgcagaggcaagtaaaaaaaaaaacaaaaaaaacttgctatgtttcttaacactgaagcattggctgtattttttcttttggctttctgtttgagacagaagagtgaatctttagtatctttgaatgaaggattgaatttattaatctcccctccccttaaaagctagatctttctgtggtgaaaagagtgataagagacttgtttcctaatcaagacggattgagtatcttaaaacacatgaagattagttgtgctacaaatcgattgaaagagtttaatgggtacgagtagatcacttgatcagaagatttagctatccgtaacaattagcattggtattgatcacaatttgcagtattactagacagattcctaatggttacactttgagtcttgttctttgatactggtaaatgaatggtaggtttctttctttcctttcctttcctttcatttcctcttcctttctttccttctttccttcctctctctctctctctcttaatttttagatctcagttttcatacgtattctttcctaaaattaatctgcctgagaaagatacttgctgtggaggttctatctcatattctcttctcccaattgactgaagacaggcatacttttctacccacctgaatcacattatggtgtattgccttggagttttacaaacttccagggcactaaaacaaaaggaacaatttggtgattactttaatggttaaacagtaccataagagcatcacccccaatttttctttgaaagatgtattttcagtaattatttcttatatttactattttattatttaccaaaatttgtaaaaaaaactatgcctttttgataaattgtgtgctagtgactattgtaataattcaatttagaggacacagaattaatacttagagcattacagtcattggaaattaagaaaaatttaaatacactaacatactatagattgaaaaattatagaatgattggtgaaagactttcaagcatgcaggtatatcacattcaaatagcattctgtggaggaagtagaatggaaaaaaagttcaaagagaaaaagagaagatgtggctgggtatggtggctcaggcctatgatcctggcactttgggaggccgatgcagaaggattagttgagctgaggacttcaagaccagcctgagcaacatagtgagatatgtctctacaaaaagtaaaaataaaaaaattagccaggcatggtggtgcacatctgcagtccagtctactcaggaggctaaggtgggaggatcacttgagcctggagggcaaggctgcagtgagctgtgactacgccactgcactgcagcttgggtgacagagcaagactcctgtctcaaaaaaaaaaaaaaaaaaaaaaaaagaagatataaaattccttaaagaggcatgttcaggcaacttttaaatagatatttctagaaatcaaatctctggcatttttatttggatatatttaaaataataatataaaagttttatttaaaaaaaactggtcatggtgcagtggttcacacagtgtaattccagcactttaagaggccaaggtgggaggattgcttgtgcccaggagttcgagaccagcctgggcaaaatagtgagacactgtctctacaaaaaaaaaaaaagagaaaaatttacattatgcaggatattcctttgtttacaactatttaaacttaagatgaaaacttgtgaataccaacttaaaaatttgtgaagcgtcgcatattttttcagttattttagtattaacaaacaaattgaagatcattggtttatataaccccctgagagactaatagtagaatagaacagaataatagaatagaatagaacagaatagaataatagaatagaataataatagaataatagaaactcgcttatttatgattgttaataagtaggataaattgcagatcatttatactattaaagtgctttattgctttgaggtgtgcctgtaactgaatgttttacttccaaaattaaaattttctttggctgaataaagatattctgaaacctgacatttctcctttaatctttgttgagccaaatgacatatcaacttaaaaagataagcaaatatattaactgaatctggcagtagctgcagctgttattaatgtcaggcctatctacagatcagtggctgctccctgtttgggtgaactctagctttgggtaagtaggttttgtgttgagaaaaaaaaaattaagacaacaaacctgaaccagctacttagttaggattacttattatacagtctttgacatttggtttcagaaaaataaatgttaagtttaacatagatggcaaataatgcctatctgtgacatctcacaaaaaattcttgaattattcataacttaatgtccccatttggttccatgttttaaaataattaaaaaaataaatttaaaaataattttaaaaataaaaaaaatttttttaaataattaaaaaaaaattcctaaaccaaaacttgaagttgatgaataaagacgttttgatattctaatgctaggatagtttatctttttgtcttatgaaataaaaattagtttgctactcttcagacatttatgagtttgaagaagataaaggtagacatcacaactcattaattgccttctgaaaacagttcattattatagactcagaggaaacgtgctttacttttatgagattgtatcaagacagagataaatattttataatatatttatgttattgatttcaatataataacatcgtggtcagagaacaccctttgtatgtaagtttgacctaggtcaaacttaaatcatacaaagtttgacctaggatatggtcagacttggtgcatgttccatttgtacttgaaaagcatgtgtattctgccattgttgggtggggtatagtataaatatcatttatagatctagttagttgatagtattattacatttttctctatcctttgctgattgtcttttctgctgattactgagagaagaatgttgaaatgtgcaaccaaaattgtggatttacccatttttccttttagttctataaatttttgttttatatatttcaaaattctgattgttgcatgcacatctagaattatgtcgttttggtgaatctacacttttatcgttatgtaatgtccctctttatctctggcatttttccttgctctgaagtctattttacctgatagtcatatagctactccatcttttgatttgtgtgtgtatggtgtatttttttcctttcttttaacttacctataccattatatttaaagtgagtttctgacctggtgcggtggctcatgcctgtaatcccagcacttttggaggctgaggcaggtggatcacttgaggtcaggagttcgagaccagcctggccaaaatggtgaaaccccatctctaataaaaatacaaaaattagctgggcatggtggcaggcacctgtaatcccagctactcgagaggctgaggcaagagaatgcttaggaaaccgggaggcagaggttacagtgagccgagattgtaccactgcactccaacctgggtaatacagcgagactctgtctcaaaaaataaataaataaataataagtaaataaattgtgtttcttgtagttgcatagagttgggccttgttttttaatgagttttacaattcctgtcttttagttggtgtgtttgcaccatttacactgaatataattattgttatgtttggatttaggtctactttctcatttttcagtttgcctctctcattttaatcccactgcttcctttttcctgccttctattggattgtgttttcaacgatatcttttagttgctctagtaaatacaagttactacttaacttttcacagttctacctaaaattaatattttacttcaagaggaatgtacgaacctacccaccataccctttatcctccccttttatgttgtacttaacttatatatatatgctgcactgaaaaccctactagacaatgttataatttttactttcaactgtcatacacagtctaagggacttaaggggagaaaaatagctgattgtatttaccatttctgttgcttttcattcattcctgaagttctaagtttctctgtggtataacttctcttctgcctgaagagccttctttagcatttcttttaaagcaagtatgcttataatggattatcttagttttccatctctgagaatgtgtattttgccatcattcttttttttttttttttttttttttgagatggagtcttactctgttgcccaggctggagtgcatggcgcgatctcagctcaccgcaagctttgcctcctgggttcactccattctcctgcctcagcctcctgagtagctgggactacaggcgcctaccaccacgcccggttaatttttttttttttttttttgtattttgtatttttagtggagatggggtttcaccatgttagccaagatagtcttgatctcctgacctcgtgatccgcccgtctcggcctcccagagtgctgggattacaggcgtgagccactgcacccggccttgccatccttcttgaaggacatttttattggatataaaactcggggttgtggattgtagtttgttgtttttgctgtttgttttttagagtgctttaataattttgtgccattgccttctggcctccatggcttctgctgagaaattcagtcatttgaatttttcttcccctttatacgcacatcatttttctatggccactttcaagactattttattgctgctgctgctgctgcttctgcttctgcttcttctgcttctgctgctgcttcttctccttctccttctcctcctccttcttccttctcctcctctttctcctcttactcctcttcctcttcctcctcttcttcctcttcctcttcttcctcctcttcctcttcttcctcctcttcctcttcttcctcctcttcctcttcttcctcctcctcttcttcctcttcctcctcttcctcttcttcttcctcatcttcttcttcttcttcctcttcttcttcttcttcctcttcctgttattattattgtgagacagagtttggctgtgtttcccaggctggagtgcagtggtgcggtcgtggctcactgcaacctctgcctcccaggctcaagctattttcttgcctcagcctcctaagcagccgggactacaggcacgtgtcacaacacctggcttatttttttgtattttttgtagagacaggttttcaacatgttgccccagctggtctcaaactcctgggctcaagggatccgcctgcctcggtctcccaaaatgttgagattacaggcatgagccattgtgcccagctgactttttttctgtctttggttttcagcagtttgattataaaatacccatgcatggatttttttgcacttatagtgtttgagatttgctgagcttcttgaaatgtaagtttttgtcttttgccaaatttatggtgtttctagccattatttcactttttttttttttttaaatagcatggcgccatttttttttctctcctgagactccagtgataacaatagtaggccttttgctattgttcttaaaattttttcttcttttttttcagatctttttttcttctttctctgttattcataaggcaatttctacttacccatcttcaagataactcactttttcctatcatttccattcttccattaaacccattcagtttatttttttaatttagttactgtatttttctgaaattctgaaatttctacttttttctattttgcatgtttggtatctttcttttactttaagactgtttaatcttacttccttggaaggctgggcgtggtggttcacacctgtaatctcagcaattcgggaggccaaggtgggtggattacttgaggtccagagtttgagaccagcctggccaacatggtgaaaccctgtctctactaaaaatacaaaaattagctggacatggtggcacatgcctgtaatcccagctactcagaaggctgagggacgagaattgcttgaacctgagaggcagaggttgcagtgaactgagatcgtgccactgcactcaagcctgggtgacagagcgagactctgtctcaaaaaaaccaaaccaaaacaaaacgaaaaccttaattccttgtaacatggttataataactgctttaaggttagtctggtaattccagcatctgtgtcacattggagttggtgtctgttgactttttttctttataatatattgagcttttactggttatttgaatgtcaaataattttggattatatcctggacattttgaatcttatgctatgagatctgggtcttgtttaaatcctattaaaacataatacttgttggctgggtgtggtggctcacacctataatcccagcactttgagaggccgaggcgggcagatcacctgaggtcaagaattcaagaccagcctaaccaacatggagaaaccctgtctctactaaaaatacaaaattagctgggcatggtggcacatgcttgtaatcacagctactcaggaggctgaggcaggagaatcgctttaacctgggaggtggaggttgcggtgagcagagatagtgccattgcactccagactgggcaacaagaatgaaactccatctcaaaaaaataaaataaaataaaaataataatacttgtctgtttgtgccatcagggaatgacccagttaggttcagctgcaagttttgactcgccttatgtaagctgtaattccaatgtcagttcagttttcaaagcctttatagtgctattcagatctgtactgtatgtgcaccactcaggggccagtctgggtgctgggcagtaacctgttttgtagttcagttctcagtgcttttggtgtgctgtttaaggtcagacctgtacatgtgcagtttagagatgatcccaggtggtcacaggcaattttatgagatccctttctcacattccctcatatctgccatctcactaaagtctctgtcttccagggtctccagtatagaagataaataaagacatgaaagatctcctttcatgggaaagaaaggatgtgcaatatcatttgttatcagtgaaatacaaattaaaaccacaattagataccactcgtcttccactagaatgcttaaaatttaagagactttccagtggcatgagcaacttgttaggtgatgatgcagaataactaaaacatggatacattgctggtggtaatatgaatatggtacaaccactttagaaaacaatttcttacaaagttaaacttactataagatccctccatgccacctctagatatttacccaaaagataggaaaacatatgcccacattaagatctatgcacagctttaatcaccaaaaaacaagaaacaactgaaataaccatcacatgatgaacagataagcaaattgaactacttttattcaatagaatacttagtaatgtaatggaccatttatatatgaagaatatagatgagtctcaaaagcattatgctaagtgaaagaagcctaatacaaaaggctatatactatatgattttatttatatgacattctagagaaggcagaaatatagggaaagaaattagattaatggtaacccagggtctgggaaccttctgggatatagaaatgttctgtatttttattgtggtggtagttatgtgactgtatacattgcactgtacatgtaaatgggatgaattttatagcatataagttattatacctccataaacttgacttttaaaaaggctttaaagcaccgtgttaactagattgtcaaaattcttttgaatcatttacttaatacttaagtgaaaggaaattatttaagaacctctgtatgcttcaaagaagaataaaattcaaagtatcatgcaaaaatatttgccttgtatatgccgttttataaccttttttgatgcatggtaaatatcgtgacaataaatatatgcctgcagtaatttaaatggctgcatagtagcccattttatatcataatttactaaactggtctttcatttttgaacatttagattgcttccagttttatgctctttcaatttgaatactatagccctcatccttatagctattatcttggaataaatttctagaaaaggaatttctggttgaggtcatacctattttaaagattttatattcatattactaaattttcacccagaaatgttctataatcctttgtcatctcttttttttctttctttttaatgaaagacacttcatctttcattttctttaaaatttctgatggcagctttttggccaacagatattttactagctttttggtagttgaatctgttaggtagttaaatcttttaggtagttaaatctattcatctattattcctctcatggttttatactactttgttgtcatacttagaagggctttcctcattctgagagagtaaaaacatttatgttggcttctggtttcattaatggcttcatttttatgttaaattccatatggattaaagagtttacttggtatgatactgtaaaccaaaaagtatctgtctctaagatgggtctcaatcaatttagaagtttattttgccaaggttaaggacatgcccggaagacataaatacagtcacagaaaccgtctgtggtctttccctttctccaaagatgacttttgagggcttcaatatttaaaggggaaaagtgagctggaggggaaagagtaaaggtcatccacatagtgcaagagaaaaggagcagttgggggaatagtcaattatgtattcatctcatgctcagtaaatgggcacttttcatgagataaggtgaacatgaaagagctacctgtggagatatttacccctttatctgtagctatctgcttaggaacaaaaggaaaggcagcttcttgcatgactcagctttcagcttaatttttttcttttggcatagtgaattgagtgaatttggcatacctttcacaatatgatgtaaaactccaccagtattttttgccacctagttaacctagtcaaccacttttaaccatgtaagagttactaattttttcccccattggttttaaataccttgatcatattccaaatgcttttgtttcagttactgtgatttctatgttgttccgttggtctctttatttttatacctgaagtgaactgctttagtaagtgtagttttattatatgtattttagtaatatggcaatgcaggtcccctcttaaaccactcttattttttaattttttgggagatattctcagccatttctcagaaattctcacaaagttactggtacagtttaacttctaaatcattatgtccagttgcaacaaaaaaatctatgttttcataatatttataaattaatttggggaaatttgatatttttataagcctcttatctagaggcataatacactttactaaaatctcctacatccctcagtagcattttataatattgatttatattatgcattttattatacttcatcctatacattttgtgatttcgttgctggaaactttttaaaaattatatttgctgattattgctgaaatacagtaaaaaatattgatttttatattgtttttaagtagtcatctttttatttccagtgtcattttacatgactttttatttaacttaaatatggtcttatcaaagaaaaatttggggactgtatgtcaggattcaactaatattttctatttccattagattttacactgtgaagctaatattaaaatcagtctataagacctaaaataaaagaggcttgtctccatgaatctgacttttagtaattgtttgtagagatatatattaaaaagtcaatatttatattatatgctctgtcaaactaaggatgctaaatgtattttcttctcttggaattaagtcttattttaaaatgatttctgtccttcctccctacttgctacctgggggatatatttgtatgtgtcattagatggaattcacaagttatggtccaattaaagttacctttaaaaacctgattaggtaacactctaaaatgttactgtaaacttgatcttcttgctgggtcttagctagtatttcttaaattgctgctaaaataggacaattaagggatagacaaaagaatgctaggactcaagcctggggattatagtgttactctacgtcattgccttctagcataatgaaagtgtgagttggccatgtttgcaaattaacacagctattaaattttacatatgcaaaaaaacccttagattagtttacatttatatggccctgaaattgttattattattttttcttttttattatactttaagttctagggtacatgtgcataatgtgcaggtttgttacataggtatacatgtgtcatgttggtttgctgcacccatcagcttatcatttacattaggtatttctcctaatgctatccctcccccagtaccccacccgcctacaggtcctggtgtatgatgttccctgccctgtgtccatgtgttctcattgttcaattcccacctatgagtgagaacatacggtgtttggttttctgtccttgtgatagtttgctgagaatgtggtagtttccagcttcatctatgtccctgcaaaggacatgaactcattcttttttatggctgcattgtattccatggtgtatatgtgcacattttcttaatccagtctgtcattgatggacacttgggttggttccaagtctttgctattgtgaatagtgccgcaataaacatacatgtgcatgtgtctttatagtagcatgatttataatcctttgggtatatacccagtaataggatcgctgggtcaaatgttatttctagttctagatccttgaggaatcgccacactgacttccacaatggttgaactaatttacactcccaccaacagtgtaaaagctttccagtttctctacatcgtctccagtatctattgtttcctgactttttaatgatcgccattctaactggcatgaaatggtatctcattgtggttttgatttgcgtttctctgatgaccagtgatgatgagcattttttcctgtgtctgttggctgcataaatgtcttcttttgagaagtgtctgttcctttcctttgcccactttttgatggggttgtttgtttttttcttgtaaatttgtttaagttctttatagattctggatattagccctttgtcagatgggcagattgcaaaaattttctcccattctgtaggttgcctgttcactctgatggtagtttcttttgctgtgcagaagctctttagtttagttagatcccatttgtctattttggcttttgttgccattgcttttggtgttttagtcatgaagtctttgtccatgcctatgtcctcaatggtattgcctagattttcttctagggtttttatgcttttaggtcgtacgtttaattctttaaaacatcttgagttaatttttgtatgaggtgtaaggaagggatccagtttcagcttcctacatatggctacccacttttcccagcaccatttattgaatagggaatcctttgcccatttcttgtttttgtcaggtttgtcaaatatcagatggttgtagatgtgtggtgttatttctaaggcctctgttctgttctgtatctgttttggtaccagtactatgctattttggtgactgtagccttgtagtatagtttgaagtcaggtagcatgatgcctccagctttgttctttttgcttaggattgtcttggctatgcaggctcttatttggttccatatgaagtttaaagtagttttttccaattctgtgaagaaagtaattggtagcttgatggggatggcattgaatctataaatgaccttgggcagtatggccattttcacgatattgattcttcctatccatgagcatggaatgttcttccatttgtttgtgtcttcttttatttcattgagcagtggtttgtagttctccttgaaaaggtctttcacatcccttgtaagttgtattcctaggtattttattctctttgtagcaattgtgaatgggagttcactcatgatttggctctctgtatgtctgttattggtgtataggaatgcttgtgatttttgcacattgattttgtatcctgagactttgctgaagttgcttatcagcttaaggagatttggggctgagaccatggagttttctaaatatacagtcatgccatctgcaaacagggacaatttgagttcctcttttcctagttgaataccctttatttctttctcttgcctgattgccctggccagaacttccaacactatgttgaacaggagtggtgagagagggcatccttgtgttgtgccagttttcaaagggaatgcttgcagtattcaaaaaaactggcacagtattcttgtgccagttttcaaagggaatgcttgcccattcagtatgatactgactgtgggtttgttataaatagctcttattattttgagatacattccatcaatacctagtttattgagagtttttagcatgaagggctgttgaattttgtctaaggccttttcagtatctattgagataatcatgtggtttttgtcatttggttgtgtttatgtgatggattacatttattgatttgcatatgttgaaacagccttgcatcccagggatgaagctgacttgatcgtggtggataagctttttgatgtgcttctggattcggttttccattattttattaaggattttcgcatcgacattcatcagggatattggtctaaaattctctttttttgttgtgtctctgccaggctttggttatcaggatgatgctggcctcataaaatgagttagggaggattccctccttttctactgattggaatagtttcagaaggaatggtaccagctcctctttgtacctctggtagaattcagcggtgaatccctctgctcctggactttatttggttggtaggctattattgcctcaatttcaaaacctgttattggtctattaagagattcaacttcctcctggtttagtcttgggagggtgtatgtgtccggaaatttatccatttcttctagattttctagtttatttgtgtagagcggtttatagtattctctgatggtagtttgtatttctgtgggatcggtggtgatatcccctttatcattttttattgcatctatttgattcttctctcttttcttctttattagtcttgctagcagtctatcaattctgttgatcttttcaaaaaaccagctcctggattcattgattttttttgaatggttttttatgtctctatctccttcagttctgctctgattttagttatttcttgccttctgctagcttttgaatgtgtttgctcttgcttctctagttcttttaattgtgatgttagggtgtcaattttagctctttcctgctttctcttgtgggcatttagtgctataaatttccctctacacactgctttaaatgtgtcctagagattctggtatgttgtgtatttgatctcattggtttcaaagaacatctttatttctgccttcatttcgttatttatccagtagtcattcaggagtaggttgttcagttgccatgtagttgtgtagttttgagtgagtttcttaatcctgagttctaatttgattgtactgtggcccgagagacagtttgttgtgatttctgttcttttatatttgttgaggagtgttttacttccaattatgaggtcaattttcgcataagtgtgatatgatgctgagaagaatgtatattctgttgatttggagtggagagttctgtagatgtctattaggtccacttggtgcagagctgagttcaattcctggatatccttgttaaccttctgtctcattgatctgtctaatgttgatagtggggtgttaaagtctcccattatcattgtgtgggagcctaagtctctttgtaggtctctaaggacttgctttatgaatctgggtgctcctgtattgcatgcatatgtatttaggatagttagctcttcttgttgaattgatccctttaccattatgtaatggccttctttgtctcttttgatctttgttggtttaaagtctgttttattagagactaggattgcaacccatgcatttttttgctctccatttgcttggtagatcttcctccatccctttattttgagcctatgtgtgtctctgcacatgagatgggtttcctgaatacagcacactgatgggtcttgactctttatccagtttgtcagtctgtgtcttttaattggagcatttagcccatttacatttaaggttaatgttgttatgtgtgaatttgatcctgtcattatgatgttagctggttattttgcccgttaattgatgtagtttcttcacagcatgaatggtctttgcaatttggcatgtttttgcggtggctggtactggttgctcttttcaatgtttagtgcttcctttaggagctcttgtaaggcaggtctggtggtgacaaaatctctcagcatttgcttgtctgtaaaggatttgatttgcccttcacttacgaagcttagtttggctggatatgaaattctggattgaaaattctttcttttaagaatgttgaatattggcccccactctcttctggcttgtagggtttctgacgagagatctgctgttagtccgatgggcttccctttgtgggtaacctgacctttctctctggctgcctttaacattttttccttcatttcaaccttggttaatctgacaattatgtgtcttggagttgctcttcttgaggaatatctttgtggtggtctccatatttcctgaatttgaatattggcctgccttgctaggttggagaagttctcctggataatatcctgaagagtgttttctaacttggttccattctccccgtcactttcaggtacaccaatcaaatgtagatttggtttttttacatagtcccatatttcttggaggcttttttcgtttctttttactcttttttctctaatcttgtcttctcgttttatttcattaatttgatcttcaaccacgatagcctttcttccacttaatcgaattggctattgaagcttgtgca

SEQ ID NO: 198 - DNA, 3747 bp, Homo sapiens
  source 1..3747: mol_type = other DNA
cgtagaccgtctgctgggggcgccggcaccatttggagtacgtgaggtatacgggtagggcgcggccaggtcgggcgtctgttaggaaaaagactttttatttttatgtttattttttaagagacggagtctcgctctgtcgcccaggtaggagtgcagtggcgcgatctcggctcactgctgccttccacctctgggctcaagcgatcctcccgcctcagcctggcattacaggcgcgcaccaccacgctcagctaatttttaatttttctttttttttttttcactcctggccttaagcgatcctctctcctcccaaagcgctaggattgcaggcatgaaccacttctctcggctaggacttttatttttaatggtcaactgatttgagttggttactgtgagatattgtcacaggttccagacaggccataatgcacgcatgcattcacttacttattcagctcatggtacatttagaaactctaggttcatgtttaaccaacaaatgtgttcttccagtatgccgtttttcagacaatgatgtgtggcattcagaggtgttttacaacccttaataaaagagcaactaacactagtatgtgctatacatccattcttaatgcacccaccgtacctacttccatcctaacctgaaaacatagctgtctgtaaatgaggaaaggagcagcctggggatccagaaatcactgcaggggtcacgttttgtaccaaggcagtaggtttggagaggctctgaactggaaccaaggcccccaacttcaaaatgtacttggcccctagcgtttgaatttgctttaaggtcattagtaaatcctattcaatttgcatcaaagaatcttcatgatacgtactgtgctccataatagaaattcccatctgcctatgatgccattctcagagtttatatcccaaattcgctctcttttcctttgctttttcttttccttttttttttttttttttttgagatggagtctcactctgtggcccaggctggagtgcaatggctcactccaacctctgcttccccggttcaaccgattctcctgcctcagcctctaaagtagctgggattacaggcgggtgccatcacgcctggctaatttttgtatttttagtagagacgggctttcaccatgttgaccaggctggtctcgaactcctgacctcaggtgatcctcccacctcggcctcccgaagtgctaggattacaggtgtgagccaccacgcctggccccaaattcactttctttgtgagtctgtcttgtacagggaatagctgaagctttgtaaccaataatttcatattattagtatgacatttctatctgaacacattagtgttaagcttcttcccacaatccttggaaggggaatcacaaatcctaggtgaactcattagggcccaaagttctgctctgaaatctagtaataagagtaaaattaagccaggtatgctaattacacaagaatgctgcttttcacaaatccattcctttgctcttgttttcacaggaagaaaaatgtctgaaaagcagatgaaggaagcttttgtcagtaacctcaatggaaccaccgtgctggaaatcacccagggattgtgctttcctgcattctgtatcctgtgcagagggttcctgatcattttctcacagtacttgtgttctttttcacctacctggaaaactagattcctcactgactttgttgtcctaatagttcccatggtagccactttgaccatttgggcttcatttatcctccttgagcttctcggtgtaattatctttggggcagggctgttgtatcaaatataccgaaggaggacctgctatgccagactgcctttcctaaaaatccttgaaaaattcttgaacatcagtctagaatcagaatacaatccagccatctcctgtttccgtgtaattaccagtgcgtttactgctattgctattttggctgtggacttcccactttttcccagaagatttgccaaaactgagctctatgggacaggagcaatggattttggagtaggtggctttgtttttgggtctgcaatggtttgtctagaggtcaggaggagaaaatatatggaagggtccaaattgcattactttacaaactcattgtactctgtttggccattagtcttcctaggaatcggacgattagccattataaaatcaataggctatcaggaacatttaacagagtatggagttcactggaactttttctttaccataatagttgtgaaattgataacaccactgctgttgattatttttcccctaaataagtcctggattattgccctcggcattactgtattataccagctagcccttgactttacctcactgaagaggttaatattatatggcactgatggtagtggcacacgggttggtctattaaatgccaaccgcgaaggaataatctctaccctggggtatgtggcaatacacatggctggtgtgcaaacagggttatatatgcataagaaccgatcacatatcaaagacttgataaaagtagcctgttttcttttactggcagctattagcctcttcatatctctttacgtagttcaagtaaatgtagaagcagtatctcgaagaatggcaaatttagccttttgtatttggatagttgcttctagcctgatccttcttagtagtttattactgggtgatataattttgagttttgccaaatttctaattaaaggagctctagtaccatgttcttggaaacttatccagtcacctgttacaaataaaaagcattcagaatctctagtccctgaagccgaaagaatggaacccagtctttgtttaatcacagctctaaacagaaaacagttaatatttttcttgctgtcaaatataacaactggcctgatcaacctgatggtagatacattacacagcagtaccttgtgggccttatttgtggtcaatctctatatgttttccaactgtttaattgtatatgtactatatttgcaagataagactgtacaattttggtgatcagcaggagtaggatatataagtatttgggcaatatttaatgaggaatattaattgtaaagaaattgtgcttttggcaacagtgttaaccatattttattataaaatagtttcagtcatctaaacagcagtgatgcttaattatttttttttttgagacagagtcttgctctgttacccaggctggagtgtagtggtgccatctcagctcactgcaacctccacctcccgggttcaagcaattctcctgcctcagcctcctgagtagctggcactgtaggcatgtaccaccatgcccagctaatttttatatttttagtagagatggggttttgccatattggccaggctggtctcaaactcctgaactcaagtgataacacccaccttggcctcccaaagtgctgggattacaggtgtgagccaccacactgggccaatgcttaatattttaatgtatctcaacaataaaaccaagaagaaacaaagccttttgacttgttagaatgtattaagtagtattttaaagaaactttatagttgtgacattgaaagactgttggggtggggggaggaaaatttttactttccatcttaatgtaaccttatgctattctgtatttttactgtatattgcttttacaataaatataaaatgaaatgtttatgttgacatttcagtgtg

SEQ ID NO: 199 - DNA, 3732 bp, Homo sapiens
  source 1..3732: mol_type = other DNA
ggccacgtgaggagggtgggcggggcgttaaagttcatatcccagtgtcctttgaatcgacttccttttttcttttttccggcgttcaagatgtcgaagcgaggtgaggttttgtttctggaggatcctccaccatctgtcgtgcagtggctggcggattcgtcaggagcggtggccctaggcagctggggcgctttgctctccttcaggccggagagagagagccaggccaccgcgagagcactgccagggccctcgaaagtggcagtggggtgctggagagttgagatggcaggatcccgacgtgaatgtagtctggataccgcgagatcgctccgcgaatagggctatcgtaatggggttgaagttagactggattaggccctggtttgcgcgacctctgcggttttatgccttgcaggagtaattgcgttttgcgaaagttagagcaagggttgagtcgtctaggtttcttaatttcgatgtcagagtgttaatagtaagaaataggctactttccgtgagaatcgggtggcacatggggacggcataagtaaaatccgagcgagctaatctatagcgtacagtctatcaaagcatgtgcggtgaattacagcttgagtatgagggggaactccgaaccatgtctagattgtgatctctttatcctgtttcccttccctttatatccacaggacgtggtgggtcctctggtgcgaaattccggatttccttgggtcttccggtaggagctgtaatcaattgtgctgacaacacaggtgaggtctttgcacgttgctatactcccccttttaaaagcactcaatgggcctgtggctaatgacctattgagccgtcaagaaaggggagagtgaaaacatcgcttttgggtgaagtggcaacatgtgttgtttgcttcaatcggtggtgtgacaaggcgttcttgcggactaactgcttgggcagtgagtggagggaggggctttggaagtgtttgggaaatgttatactgatggaacggcctgatggccctcaacattttttatttttatttacattcttttgtaggagccaaaaacctgtatatcatctccgtgaaggggatcaagggacggctgaacagacttcccgctgctggtgtgggtgacatggtgatggccacagtcaagaaaggcaaaccagagctcagaaaaaagggtgagtaaacactgagcccaccttaatactgatgagtagtggggggacgctttcctttattggaaaatggatcagttttcaaggcctcaagtttgttttccattgagaggcagtgtgagataagtatcttaagtttttgctcatattgtgttggaggggggaccatcatcttgtcacttccataccttagttgtttttttgttgttgtttttgttttgttttgttttgttttttgagatggagtctctctctgtcgcccagcccatactggagtgcaatggcacgatcttggctcactgcaacctccgcctcctgggctctcaaaaaaaaatatattacaaaacgaaaacaagctgcccgttgcttattttattatttgtttttgagatggagtctcacttgttgcccaggctggagtgcagtggcacatatctgttcactgcaacctccacctcccgggctcaagagattgtcctgcctcagcctcccgagtagctgggatcataggtgtgcaccaccacacccggctaattgctcattacttaatctcaggctccccactcaaaatttttcctgtcaggtgtatgatttaaagggggaggcctcaaaatacttgcagcttgtgtcctgtctggctttagaacttctggtgtttggtgcattttaacttcagcgcttgcacttttttcctgtgcctgcctaatctgtctctaccctgggatgtcttgctcttctaaagagttcctggccatcccttgatttacaaatgtgatgttgatttgtcagccctgtattacagttactcctattcctgtatccaccccacgatgctgtccagtagatttttagcctttgggttagaaattgttttttgttcaccattaatatccatttgagggctgggtagcactgtgattgtgattcagcaattgcatgggctttttcctcttctcagaacacttcctgggtctgattggtggcccagggagctgtcagagaagagcagagcaaatggccttcactttgtagatgagatggcaggagggtggattgttggtctcagtcagtggtgggacagaccagagctccgaacacttcagttttaaaactagttgtgagtttccaattctgttaatgtcttttttggtccttgtttctgctaaatgaatacatcccctccccttggaacttaatatcaataaataacaagcacagaaatatgcaaaaggaccaggtctacttgaagaatttgtgaggattaaatggtttatgagtagaggagggtcagtcagtaagtattggctacctcatgtgtgtcccattactaacttggttagacttatctattttttgtgtagtcttcctgtcataaaaattctgtgtaaggaccccatgctagtatcagtgaagattgtgaatccaggtgtgtctgactctacaatagttcttcacaagcattatatttcactgtgtagtgatacttcattttgaaagttgggaaaagcgtctttttcactttagtacagatgggtataaaagttacttaggacactagaaaacagttcattaaaagtaaaacaaagcctggtgcttgggcccaggaattcaaactgttttccagtgtaaatctgaatagcttggtctctgctcattgccaggactgggaggagttgggggtcccaggtcccatttctacatcccaattcagtgatactgggatcttaataacctacctgtaaggtgaagttggaaaaggcataggcaaggatagttgtcctgagagttttacacttgtgagaaaatactggcagctttgattttaagatgtgaatagatgatcgtggttcatgcctttactccctatactcccagcactttgggaggccaggcttgccaacatggcaaaaccctgtctctatgaaaaaaaaaaaaaaatctgggcatggtagtgtgcacctgtagtccaagatactagagaggctgaggtgggaggatcaccttgaagattgatatttacactgtcactgtctcaaacgctgagtgtacattctgtctagttggaaactgcttttgtggtggcactgcgacttgacaggttaatgactgctgtccttttttcttctctcagtacatccagcagtggtcattcgacaacgaaagtcataccgtagaaaagatggcgtgtttctttattttgaagataatgcaggagtcatagtgaacaataaaggcgagatgaaaggtaggaaatcagtccagcttgttccttaggtctctgaggttgggtggattgtctagaagtacaggccaaggatcttctgtgtttgacgatgtcttaatctgtcccccacatgtttttattttattttattttatttttttaatgcaggttctgccattacaggaccagtagcaaaggagtgtgcagacttgtggccccggattgcatccaatgctggcagcattgcatgattctccagtatatttgtaaaaaataaaaaaaaaaactaaacccattaaaaagtatttgtttgc

SEQ ID NO: 200 - DNA, 15267 bp, Homo sapiens
  source 1..15267: mol_type = other DNA
agcgcggctggagtttgctgctgccgctgtgcagtttgttcaggggcttgtggtggtgagtccgagaggctgcgtgtgagagacgtgagaaggatcctgcactgaggaggtggaaagaagaggattgctcgaggaggcctggggtctgtgaggcagcggagctgggtgaaggctgcgggttccggcgaggcctgaggtgaagtgaagggaaaagagctgagctcgctggaggtctgaggtcgggatcagggaaagggcaggtgccctcggggtagttctagcagttatgcgtggtgtgaaggaggtgaaagttgtaggaaggaaatattctggggtgcgttgagagctgcctagaatgaggactgagtgcaggggcggaaagaactgagggaagactgagctgcagtgtgagggcttgggatagaagagactaaatgtggcgggtgctgggctgaactggtgataaagacaccccgcgtgcctggagggaggaaactagaagttctatataaatcaattcatgtaacttttttttttttttgagacggagtctcgctcttgtcgcccaggctgtagtgcagtggtgcgatctcggctcactgcaacctctgcctgccgggttcaagccattctcctgcctcagcctcttcatgtagctgggactacaggcgcccgccaccacgtccggctaattttttttttttttttgagacggagtctcgctcggtctcccaggctggagtgcagtggcgcgatctcggctcactgcaagctccgcctcccgggttcatgccattctcctgcctcagcctcccgagtagctgggactacaggcgcccaccaccacgcccggctaattttttgcatttttagtagagacggggtttcaccgtgttagccaggatggtctcggcccgtctcggcctcccaaagtgttgggattacaggcgtgagccaccgcgtttggccgtaatttttgtatttttagtagagacggggtttctccatgttggtcaggctggtctcgaactcctgacctcaggtgatccgcccgcctcagcctcccaaagtgctgggattacaggcgtgggccaccgcgcccggcccatttcaggtaacttgttattgcatcgctcaattggttaagaacttgggctctggcaccagatgcccggggttacattcctgtttttctgtgactttgggccactgtttatctcagttttctcatgtgtaaaataaaggctaataatagtacctactcctaagatcgttgttaaacgagttggtacctaaagtgtttataacagcgcccttccacgtagtaggtagacaacaaatgtcagctgttcttgcatagatttggatgtgaagcaaaagtgaatgctaaaataagtgtgataacataattaggaaataagtgttaatcatcagtataaataaattccatgttagttattttctcttcactttcacatattgactagttgtcctcttattttttttaatctagctgtgctgtcgtcatgcctcaaacccgatcccaggcacaggctacaatcagttttccaaaaaggaagctgtctcgggcattgaacaaagctaaaaactccagtgatgccaaactagaaccaacaaatgtccaaaccgtaacctgttctcctcgtgtaaaagccctgcctctcagccccaggaaacgtctgggtaaaccatccattatatcactttttcactagcagctcgtgacctttcttttcttggtaagatgtgtgtcctttgaaggagctttctaagttcagttaagacttctttttttttttttttttttttttgagacagagtctcgctccatctcccaggctggagtgcaatagtgcgatcttggctcactgcaacctccgcctcctgggttcaagcgattctcctgcctcagcctcccaagtagctgggattacaggcgcccaccaccaagcctggctaattttttttttttttttttttggatttttagttgagacagggttttgccatattggccaatctggtctctgaactcctgacctcaggtgatccaactgcctcggcctcccaaagtgctgggattataggcatgagctaccgctcctggcctaagactactcttcattttagttattttcagaatggttgctaagtgcttaccgaactccagagttagacacttactgaggtcactctgaactacttaataagtctgatcttcaattccttaatactgaacttagttctgtcaatgttttaagttaccttgtagttacatggtattatgaaacttacctcaatatttgtgaaattaaaagaaacaaaaacgtgacatgatgaatattttccatcctttaggacagtgattggtaattctttcttgttttggaacatttatttttaaatggggggtaatttggttgtttctggagacatttttggttgttacagctgggggttgctactggcatagtgggtagaggccagggatgctgctagacattacaatgcacaggacagctccttgacaatgaagaattatttggtccaagatgtcagtggtgccaaggttgagaaaacctgtttcaaaatagccttacaatttcatcctactaaaacccatttggtttctactaaatgcagtagtccccacttatccatgggggatacattccaagacccccagtggacgcctgcaatcgaggacagtaccaaaccctacatatactgtgtttttgatttgataaccaagtcagctactaagtgactagtgggtggatagcatatacagtgtggatatgctggctgaagggatgattcatgtcttgggtaggatggtgcgggatttcatcatggcactccacagcatgcaatttaaaacttgtcaattgtttatttctggaattttccatttagtattttcagactgagggtaactagaacggtggatgaagggactactgtagtaagatcagtggtgccatctggtgaccaatatttgctgctaagtgagaaggcattttattttggtggttctgactaaggtagaaattcacctctttctggaagaggcagaggtcttgcacatccttttactatccaatgctatgagtgactacatttttattttattgtgtttcaggcgatgacaacctatgcaacactccccatttacctccttgttctccaccaaagcaaggcaagaaagagaatggtccccctcactcacatacacttaagggacgaagattggtatttgacaatcagctgacaattaagtctcctagcaaaagagaactagccaaagttcaccaaaacaaaatactttcttcagttagaaaaagtcaagagatcacaacaaattctgagcagagatgtccactgaagaaagaatctgcatgtgtgagactattcaagcaagaaggtttgttcttacatggcaactgttagtgcagccattgtaaccaaggctgatgactccaaatgaaaccacccactgggtcttctcattcaccttctgttgtgtctaattgaccttttatgtctggcacaggcacttgctaccagcaagcaaagctggtcctgaacacagctgtcccagatcggctgcctgccagggaaagggagatggatgtcatcaggaatttcttgagggaacacatctgtgggaaaaaagctggaagcctttacctttctggtgctcctggaactggaaaaactgcctgcttaagccggattctgcaagacctcaaggtacattgagagtctgaattatgatactcttggtaaaatgatacttgggtgtttttgtttgtttgtttgttttgttttgttttgttttgttttttgagacggagtctcgctctgtcgcctaggctgtagtgcagtggcgcgatctcggctcactgcaagctctgcctcccaggttcacgccattctcctgcctcagcctcccgagtagctgggactacaggcgcccgccaccatgcccagctaatgttttttgtatttttagtagagacggggtgtcactgtgttagccaggatggtctcgatctcctcacctcatggtccgcccttgttggcctcccaaagtgttgggattacaggtgtgagccaccgcacctggcctgttttgtttttgaaacagggtctctgttgtccaggctggagtgcagtgttgtgatctcagctcactgcagccttgacctcttgggctcaggtgatcctcccacctcggcctcctggatagctgggaatactggcactcaccactacacccagctaattttttgtagagacagggtttcaccatgttgcccagacttgtcctgaactcctgagctcaagtaatctgcctgcttcagcctcccaaagtgctgggattacaggtgtaagccactgtgcctggctggcacttagttaagaaagagggctaggcacggtggctcacacctgtaatcccagcactttgggaggctgaggtgggtggatcacctaaggtcaggagtttgagaccaccctggtcaacatggtgaaaccctgtctctactaataatacaaaaaaaaattagccgggcatggtggcaggtgcctataatcccagctactcgggaggctgaggcaggaggatcacttgaactcgggaagcagaggttgcagtgagctgagatcgcgctactgtactccagcctgggtgacagagtgagactctgtctcaaaagaaaaagaaggctgggcatggtggctcacgcctataatcccagcactttgggaggccgaggcgggcggatcatgaggttaggagattgagaccatcctgactaacacagtgaaaccccgtctctactaaaaatacaaaaaaaattagccaggcgtggtggcgagtgcctgtagttccagctactcgggaggctgaggcaggagaatggcgtgaacccacaggtggagcttgcagtgagccgagatcgcgccactgcactccagcatgggcgacagagcaagactccgtctcaaaaaaaaaaagagttaagaaagagtaggcctggtgcggtggctcacacctgtaattccaacactttgggaggctgaggcaggtggatcacctgaggtcaggagttcaagaccagcctggccaatgtggcgaaaccccatctctactaaaaatataaaaattagctgggtgtggtggtgcatccttgtaatcccagctacttgggaggctgaggcaggagaatcacttcaacccgggaggcagaggttgcaatgagttgagattgtggcattgcatttcagcctgggcaacagagtgagactccgtctcaaagaaaaaaaaaagaaagaaagaaaagaaagagtagaagtttagaagattgagggtttcttcaaaataaaacatttgtaatttcattgtttaaatctttccaaatgaaagtagagcttccttacgtgctgttagctcttcaaagacattttaggctctatcagatctttattttctgaggccaaaataactcccatatttgcatttttttttccagaaggaactgaaaggctttaaaactatcatgctgaattgcatgtccttgaggactgcccaggctgtattcccagctattgctcaggagatttgtcaggaagaggtatccaggccagctgggaaggacatgatgaggaaattggaaaaacatatgactgcagagaagggccccatgatgtaagtattgttctgcttcatgttgctctgtgaaaatctgcaaggtctgttgcccataaaaagtacattttgtatattttctctctgaaggatagttacataaacttaaagggaaagaagagaaggaagatacacctaattttaaattggattacttatagatgatgtggggtatccttgtagcagtaactagagataggttagattatgatctttaaactggtctcagctttaggaaagtgacctgaagtcagcctatatcaaacattagagggttaagaaggtgaatatggatactaactgtttctctttttatagtgtgttggtattggacgagatggatcaactggacagcaaaggccaggatgtattgtacacgctatttgaatggccatggctaagcaattctcacttggtgctgattggttagtgctcaattgttaatgttacatggtggttctaaagtattttttaagaatatatattcagcttatttatcagctattttatcttaaaccagctttctgccgtgtcaaaataagaaagttaaatgactatgtacatcttacctaatagatacatcttatctattgggatggggtaggagacaagtggcaagcaacaattagaatgctagattctataactggagatttatttagctttcagaagatttagttttccctttaggataatttgaccaatgatcaatgttgttgatctcctccttaggtattgctaataccctggatctcacagatagaattctacctaggcttcaagctagagaaaaatgtaagccacagctgttgaacttcccaccttataccagaaatcagatagtcactattttgcaagatcgacttaatcaggtcagtgccaactattttgccaaattatgtgttccttggatcacctgtgctaggaaaatttaacaatagttctaaaatatttttgccttgattgctttattaatggagcaaggagttcctatggaccatagtgagaacatttttatgtgaatttcagcttcattcatttactgggtgtctcagtgttgaaataaaagcaggagttagaggaatcacccaagcgcttttttttttttttttagatgagttttgctcttatcgcccaggctggagtgcaatggcgtgatctcggctctctacagcctctgcctcacgggttcaagcgattctcctgcctcagcctccccagtagctaggactacaggcacctgccaccacgcccagctaattgttgtatttttagtagagctggggtttcaccgtcttggccaggctggtctcgaactcctaacctcaggtgatatgcctgtctcggcctctcaaagtgctgggattacaggcatgagccatcgcacccagcctcaagtgctttctttaatgacctttaaaaaatagggcctatgaaaaaactttttctgttgaaaatgactaaatagattttttatttttgctaatttcagttctgattgcttttttccatttatgaacttctactgcatccgtacaaaaagcttaaatgtgtgaaaactctcaaacgtctccattatttatgagaagaaaaggcatctttttaaccctaaagagttgccaatcaagtttagggttaaatgtgaaaatatttatgcttgggacctaaattacagagggagaatcttatggttcaaactgtcatcttctatgtcttgtctgaaggtatctagagatcaggttctggacaatgctgcagttcaattctgtgcccgcaaagtctctgctgtttcaggagatgttcgcaaagcactggatgtttgcaggtgagttacggctctgttgcattcttttattaaaaaaaaaaaaaaagaaatgctgttaattgtctcatgtaactcaagtgaatgtggcttaagaggctctgttctgctacttttttacgctcagaaaggaggacttgtttctcagtggggagctctggatttccaccgtgttaatgtctgaaacattatcagtccattacctacagagggagaaacaaatgagatgttgctggcactccctgtggtgattatagattggttaattacatttgtattaaaaaagactccagtttacttttccattagctggtctcaagcaggtttatttatggacctgaaccgtctttgcctttagacttgttccccttcctttccttttgtgagcaccccttcttcccttcagttggtggtcccccacagttgtactccagacctctttctcccttcccatcctcctgcccctcctgctggggaaagcctctgtgccgactgatgaaatttcttccttcccagtagggacactgggtccattaaaatgatacttgctgtgctggcctgctggtccaacctccccctattgctatgcagaagacccaggtctggcttatggcttcctgtgggcaagtactttggagagagcagtgggagagtaagctcttcctattgctagattgcatgatcctgaatttgaaagtttcccctaatcagcaaactacttgggtaaagactgcaactatgagcaatagtcatgtaggctagcgtggtttagcctacacatatcctatgtatatataactgaagatatcccttttaggtttggtgtgtatgggtgatgctgactccctttagtcagtcacccacactacatatcctctctcctacccatgacattttctcctcatccaaaatgttatcattggcttaatgtatgatgacctacttggcatccattaggaggaaaccattgaagtttctcaaatctgatgtccatgaattatttcaaagcaattaagtccccttatctgagaaataacccagttttgtttgggggctttaaaattataaaacatcataattttaaagttacacgtaggatatgtgtaggctaaaccatgttagcctacatgaccattgttcatagttgcagtctttgagcaatggtcattaatgtgccgcttttgaggctggtggtttggtgtgtttggtttggctcagactaaattaattttagaaattttttttataggagagctattgaaattgtagagtcagatgtcaaaagccagactattctcaaaccactgtctgaatgtaagtagtttatctccttcctgtcttcctttgtaactagaagcttagcttttctgaggaaagaggtagaaagatgaaatgaacatagttaaatccaaactcacccatttttatgtgtgtctgtgtttttagtccgtttcgtctactttatttcaatcttgcctgccagtactatagttcgtgcattactggaaatgagttcccagggtattgattgcgtaaatggctgggacagagtaagttttttttccaagctctggaaatgaaacttgtagacaatgaggttggatcagctctctgggtgcttatgttgcgtgcactttaggtctcaatataggtgaaagcaaagcctgataaataagggagaattgggtaaaagaattgtgaagccaggtgcggtggttcacacctgtaatcccagcactttgggaggccaaggcgggaggatcgcttgagcccaggattgtgagaccagcctgggcaatatagtgagaccttgtttctacaaaaaattttaaaaattttgcagccattaaaaatatgagttcatatcctttttagggacatggattaagctggaaaccatcattctcagcaaagtaacacaggaacagaaaaccaaacaccacatgttctcactcataagtgggagttgaacaatgagaacacatggacacagggaggggaacatcacacaccggaggctgttgggggtggaggccaaagggagggagagcatgcaggacttaaaacctagatgacaggttgatgagtgcagcaagccaccatggcacatgtatacctatgtaacaaacctgcatgttctgcacatgtatcccagaacttaaaaaaaattaggcaagcatggtgtgtgcctgtagtcctagctacttggcaggctgaggcaggagaatcacttgagctggagaggcagaagttgcagtgagccgagatggtgccactgcactgccagcctgggcaacagagcgagaccctgtcccaaaagaataataataagaagaattataagttcaacttgggatatctcaagcttttaaacaagtctagagggtagaggtaaaaagatcatactgctacagtaagctgcatggtatcacaaatgacaaaattaatattccattccctcagccttgttttggttgtggcaaatgtaaaatggccatgaactacgtatcttacagtatttgatatccagtgttagtctttataaacagaatagtaagatttgattgtttctttttcactcctacactggctgggagtttaagtaaaattgtttctggcattatagttctgcatgaaattctttctttttttcatcaatttgctaaaataaaataattaaaaatgtttcagaagtagccaaaaatagtgcttaggctaatagtaggcaatatataccaatgtatagacttagatactggtttcttcctccttttcaacttttcagattatccccttttcctcctcctttttccccatcagtaacatttaggcttgtcactggcccctgtgagcaccactaacacaaacataattcaaaaaggtaaagaggttgtaagttctatcttttgacttctggtttgtgcgggattggcttttttctttcttttttttttttctttttgtgtaaaacaaggtcttgctttgtctcccaggctggagtccagtggtgcaattatggctggtgcgatcatggctcactgcagctgcaacctcccaggcccaagcagtcctctcacctcagcctccccagctccagctactgctaattttaaaatttttgtagagtcagtgggtggaggagtctccttatgttgcccaggctggtctcaaactcctgggataaagtgattctcctgcctcagcctcccacagctttggaattacaggcatgagccaccataccaggttgagattggctttcaagggctccagaaagctatagggagaatgactttaactaaatataagaagaaaatttataataactagaactaactgggcttccttgaaacatagtgggttctccagcattgaagatattcagacaaaagctggatagatgccacttgttgagattgttctagagaggactcggccagtggatagggagtaaaaatagacttctaaattcctttcaattttaagattcttttacttgatctgtgatctccggtttctccattagtcctctgcagcatccctttgtggtaatgtaatattatagaagtaaattgttgtggggcaactgcaagtgatttcaggaagtaacttcaggtaaaggttgttacagaacacatttctttgtcttggaattcatgcatctccaaacgataaggccatagtcttttttttttttttttttttttttttttgagacagggtctcgctctgtcaccaggctggagtgcagtggcgtgatcttggctcaatgcaacctcctcctcccaggctcaagccatcctcccaccccagcctcctgagtagctgggaccacaggcacacaccaccacacccggctgttttttttgtatttttagtagcgatgggggaaacccatcgccttgttgcacaggctggtcatgaattcctgagctcaagccattagttatttttcctgatcctctccctccaccctcctataggccccagtgtgtgttgtccccactatgtgtctatgtgttctcatcatttagctcccacttagaagtgagaacatgtggtatttggttttctgttcctacagtagtttgctaaggatatagtcttatgaagcttattggcagtttcccaacccctggcttttattaagatgatgatatctggccaggcatggtggcttacgcccataatcccagtgctttgggaggccgaggagggcagattgctttgagctaaggagttcaagaccagcctgggcaacatgatgaaaccccatctctacaaaaaataccaaaaagaaaaaaaaaaaaaaaaagatggtgctatctgctagcatatccaatgacattttctcaagtgttgctctactgctaatcagcttgggcaagtgaaccaaacctcaaaggtcatttggggaagccatctgaagggctgacatggcagcgacttcactctccacatttagccactcatttgatccaaaatattcggtaattttccaacttttttttccctttcttttttttttatatggagtttcactcttgtcgtccaggctggagtgcagtggcacaatcttggctcactgcacctctgcctcccgggttcaagtgattcttctgcctcaacctcccaagtagctgggattacaggcgcctgccaccacatccagctaattttttgtatttttagtagagatggagtttcgccgtgttgggcaggctggtctccaactcctgacctcaggtgatctgcccgccttgatctcccaaagtgctgggattacaggcgtgagccactgcacctggccttttttttcctttcttaattaccaagcacagtcaccatctttgcttcaaggttctgttattctatacctctgagatactaggaactagcctggcatggtggcacgtacctgtaatcctagctacacaggaggctgaggcaggaggatcacttgaacccaggaagccaaggctgcagtgagccatgatagtgccactgtactccagcctgagtgacagagatcctgtcccaaaaaaaaatacagtagttctctggtcctttcatgaggtgggttttgttcctctgacattaaattacattccataggacaaaacagctcactatttggcccagagaaagggtaaccctacttttcaagtcatcccacattattttgacatccttaagagaatagcattatctctcatcctttggcctctggttagagatttaaaacctctgctttgccaccatgtgactatacttgaatttcctttagctcaaacttagtatcatctgtctcatcatacatacacacacacagtattttagaaatcgaattaagcttggcttatttactttataggtaaatcaccttctgagcctctgattcccaagagggttggtcttattcacatatcccaagtcatctcagaagttgatggtaacaggatgaccttgagccaagaaggagcacaagattccttccctcttcagcagaagatcttggtttgctctttgatgctcttgatcaggcagttgaaaatcaaagaggtcactctggggaaggtaagttgggatggagcagatggaacggaggtagagatcagaatctgctttgcagagcaggtattttccaaaaggcctatgatacttcagctgataataaatttaaaatggattttaacagtaagaattaatactggtactatataaaaggcacctatttcccttggattgtggttgagagtttatcattaatcctttccctatcctccccttcatttctgcatctctctaggaaatatataaagcccctttcctacattactgtataggttttcgggaatatctacagaagcctgttcaaagattttattgaaaagaggaagaaatagggtattcagataagtttttgcaaacccagactcaggtttcttaaatgattaaaggctataagcaatgtgacttttaagcagcgtttgttctcccttgtttcctaccagttatatgaagcctacagtaaagtctgtcgcaaacagcaggtggcggctgtggaccagtcagagtgtttgtcactttcagggctcttggaagccaggggcattttaggattaaagagaaacaaggaaacccgtttgacaaaggtacaactgcttttttgtgacagtgtttttaattgtcctattttgtagagtgatgctaaagtaaaggtttattgttaaacaagatgaccacagttagttaaacaagtcgttttttgttaggtaaggtttaaggtgtgtaaagatgggagtgtgatatgaatattttttcaagccattggaaaaaaaagtgtttaacttgcttgccttttgtgagaaaaagtttaatatggtagaagtttgtatactgacaactttgcttttgtgagttccccagtgtgaaaaatccttttctcttctttccaggtgtttttcaagattgaagagaaagaaatagaacatgctctgaaagataaagctttaattggaaatatcttagctactggattgccttaaattcttctcttacaccccacccgaaagtattcagctggcatttagagagctacagtcttcattttagtgctttacacattcgggcctgaaaacaaatatgaccttttttacttgaagccaatgaattttaatctatagattctttaatattagcacagaataatatctttgggtcttactatttttacccataaaagtgaccaggtagaccctttttaattacattcactacttctaccacttgtgtatctctagccaatgtgcttgcaagtgtacagatctgtgtagaggaatgtgtgtatatttacctcttcgtttgctcaaacatgagtgggtatttttttgtttgttttttttgttgttgttgtttttgaggcgcgtctcaccctgttgcccaggctggagtgcaatggcgcgttctctgctcactacagcacccgcttcccaggttgaagtgattctcttgcctcagcctcccgagtagctgggattacaggtgcccaccaccgcgcccagctaattttttaatttttagtagagacagggttttaccatgttggccaggctggtcttgaactcctgaccctcaagtgatctgcccaccttggcctccctaagtgctgggattataggcgtgagccaccatgctcagccattaaggtattttgttaagaactttaagtttagggtaagaagaatgaaaatgatccagaaaaatgcaagcaagtccacatggagatttggaggacactggttaaagaatttatttctttgtatagtatactatgttcatggtgcagatactacaacattgtggcattttagactcgttgagtttcttgggcactcccaagggcgttggggtcataaggagactataactctacagattgtgaatatatttattttcaagttgcattctttgtctttttaagcaatcagatttcaagagagctcaagctttcagaagtcaatgtgaaaattccttcctaggctgtcccacagtctttgctgcccttagatgaagccacttgtttcaagatgactactttggggttgggttttcatctaaacacatttttccagtcttattagataaattagtccatatggttggttaatcaagagccttctgggtttggtttggtggcattaaatgg

SEQ ID NO: 201 - DNA, 29429 bp, Homo sapiens
  source 1..29429: mol_type = other DNA
gattggctggtctgcttcgggcgggctaaaggaaggttcaagtggagctctcctaaccgacgcgcgtctgtggagaagcggcttggtcgggggtggtctcgtggggtcctgcctgtttagtcgctttcagggttcttgagccccttcacgaccgtcaccatggaagtgtcaccattgcaggtacggctcgcgggggggactggcggtggagcctccgcgcggcccgggcatctctctggccgcccgtgacgggtgaagctctggggctgcggtcaggccggcgaccggcttgggagcccatattctccattcccggttccggggtgatcgtggagaggcggaagccccttctggtgctagtagtgaagtatgacccggcttccagggtgtcgtgcgttgttgccctgtttctaggggcaggagtccgttggtcccgtagtggatccatgttacagcggcccgggtgcgacgttattgagtcgcgcgtacagatgctttcccctcctgcccgctgcttgaaaacggtcttgaatgtccccgatcttggaaagggcagagcctagcacagtgtttctctggagcagctggccagcttacaaaagcgcccccttcctgagttcacaacgctcaggtggccaagggattgaacggatagccgcccaaactgctgctgccgaactagaattatttacggtgtcgtgtgctcgggacaccgtaaataatttataataataggcactcggtaaataatgtatgcaggaactgaaagaagtgggtgtattttattgatgacatctaccatgttgctcaagaaaagaggtttccagacagacccacttggtgagataatatgtgtctgtttaacctgacacctggggacctggccgcagcgaatttaaattgtcctatttgtacaaaactggcaactccaccactgcctactaacagattgcaatgcatgttgacatctcactatggtaggcattttgttcctagtttagggtaaacttatgattaaaaattcccttctttctctctttttttttaattgctagcctgtaaatgaaaatatgcaagtcaacaaaataaagaaaaatgaagatgctaagaaaagactgtctgttgaaagaatctatcaaaagaaaacacaattggaacatattttgctccgcccagacacctacattggttctgtggaattagtgacccaggtaaaatcaagctcatcaaaggcagttaacctagtagttgaaatggatactcttctttctgtacctttcatgtactgagtgtgacctttctgtatctctcatgtactgagtgtcactggaactggcctaaatatggtaatacttaatatgaacactttatggtaatcatgataacagaacaatgaatatagaataaaaataacagtatttctttgccttatttctagcaaatgtgggtttacgatgaagatgttggcattaactatagggaagtcacttttgttcctggtttgtacaaaatctttgatgagattctaggtgagtaaatcctttaatataaagatctggtcaaatctttcataagaagtatcattccaaataaaaatttaaaaaagataaaagtaaaaacaaaaagtatcatttctaccaaacctgctgtagccagggctcctgtcatttcaatcagttgataaaggtgagctggtttcctggagcccaggaggttgagcttctcgtagaaacagtactatggacaaaaattgctaaattaacaccttgttaatgccactcctgtgctgtttgggaacttttttttctatatcttacttagagttacagaatgtttcttaaaacactaatttcttacaaatgtatattttattttctttcagttaatgctgcggacaacaaacaaagggacccaaaaatgtcttgtattagagtcacaattgatccgtacgtcttttgcttagtttttgttatgtagctcgttgctattgttagctgcatgtattttgattactggtgaagttggcttttcctaaacagaagttgagaaaagtacacaaaagcagaatgctaaaatgaaaaacctatggatacccaccacctagatccaacagttgccaacgtttttccatattttctccatcttttttttaattagttaatttttttagaggaaggggtcttgctattttgcctgggctggtcttagaactcctggcctgaagcaatcctccagtgttggcattatgggtgtgtgccatggcacgcggcctatttgctctggatcatttcaaaataaattacaggacttatgacacctaatccctaaatatttgagcaagcaccttcagtaattgctttaagtattctggcatctggagttttaactttttctcatgatgctattcaaacagtaaaccagtaggtggtggtagagaataatttgatctgacatttctgcttataaatgcggggtgtcccttagtgggtgatcagggtgcttatttcacttttttgttagtctgattgattatgacaaagtatacctggattttcctaaggactcaatatcatagtctttaaaaaatgttgagctagggccaggcacggtggctcatgcctgtgatcccagcactttgggaggccgatgcgggcggatcacaaggtcaggagatcaagaccatcctggctaacacggtgaaaccctgtctccactaaaaatacaaaaaattagccgggtgtagtggtgggcgcctgtagtcccagctactcgagaggctgaggcaggagaatggcatgaacccgggaggtggagcttgcagtgagccgagattgcaccactgcactccagcctgggtgacacagcaagactctgtctcaaaaaaaaaaaaaaagttgagctaattttaattagttttttttatagataataagtactatgtagaacaagaaccataatgtatatcgagttattaactaaaatatagtaccatccaagaattaacttaaaataactgaaataagttttcagcattttatttgagagcaaggcagtttatgattgatattggttttccttttttttttttttttttttgatggagttttgctcttattgcccagtctggagtgcagtggcatgatctcggctcaccgcaacatccacctcctgggttcaagcaattctcctgcctcagcctccagagtagctgggattacaggcgcacaccaccacacctggctaattttgtattttttttagtagagatggggtttctgcatgttggtcaggctggtctcgaactcctgacctcaagtgatctgcctgccttagcctcccaaagtgctgggattgctgggattacaggcgtgagccactgcgcccagcctgtttttatgtactttgttgagtgggaacgagatgtatagatgatcctcttgaaaggggtataataggcatgatgactcactcctgtaatcccagcactttgggaggccaaggtgggaggatcagttgagcccaggagtagtttgagaccagcctgggccatatagtgagaccctcatctctacaaaaaatttaaaaattagccaggtgtggtgatggacacctgtagtcccagctattcaggaggctgaagtgggaggattgcttgagcccaggaggtcaagactgcagtaagctgtgatcctgccattacactgcagcctgggtgacagagcgagatgctgtctcaaaaaaggagtgggagtggtgtataataatgtttccagattgtccttttctttccattgggcataaatcatttccctctgtttatcctaacattttaaaattttgtattttttcaacattatcagtgtctattcaggtgttggaaaaggtttttttttcctcttgactcctatttcaggaatgtcaggaactaagcatggtgggaaatgttcctgctgaatttcagaaggtatatatgaaaagtgccaaaaaaattgagggctgggtatggtggctcacatctataaccccaacactttgagcagttctcctgcttcagcctcccaagtagctggaatcacaggcatgcgctaccatgcctggctaattttttttatttttagtagagacggtttcaacatgttggccagaactcctggcctcaagtgatctgccctcctcagcctcccaaagtgctgggattacaggcacaggccaccgcgcccagcctgaatatacatattttagaaataatagtatttaaatatttttaaatgttaagcattcgtttaatgtgttgtaaaatacaattttcaatctttttttcttagggaaaacaatttaattagtatatggaataatggaaaaggtattcctgttgttgaacacaaagttgaaaagatgtatgtcccagctctcatatttggacagctcctaacttctagtaactatgatgatgatgaaaagaaagtgacaggtagagtattgaggggaaataacatatttgttgctaaaaatatatatatttaaatgactgtctgtggcatgagggttaaagatatggaaataaatctctataattgaatagctctgccagtgattaagaaataaagctgtcaatgagatagtaacaataaaatagtgtttcatatttatttgcccaggtggtcgaaatggctatggagccaaattgtgtaacatattcagtaccaaatttactgtggaaacagccagtagagaatacaagaaaatgttcaaacaggcaagtaaataagtgtcttgtaccttaatgataaatggtagtagtatagccatttataatggcattaatgattggtttaatttaacataatttataagctattgaagtatggaaaattataagcatatatattaggttattaggactcataaatttatgttatttacttccagtttgtgagatgacttgaatttttcatgtttcctattctttacttccatagacatggatggataatatgggaagagctggtgagatggaactcaagcccttcaatggagaagattatacatgtatcacctttcagcctgatttgtctaagtttaaaatgcaaagcctggacaaagatattgttgcactaatggtcagaagagcatatgatattgctggatccaccaaagatgtcaaagtctttcttaatggaaataaactgccagtgagtattttcctggatgttaaggataataagggattttgtaatcattgtcaagtgcaaaattgaattttttcccctcccatatgtttttgtttgtttgtttgtttgtttgtttgagacagagtctcacactgttgcccgggctggagtgcagtggcacgatctcggctcaccgcaacctccacctcccaggttcacgcaattctcctgcctcagcctcccaagtagctgggattacaggtgcctgccaccacacctggctaattttttgtatttttagtagagacaggtttcactatgttggccaggctggtctcgaacaccagacctcatgatccacccgtcttggcctcccaaagtgctgggattacaggcatgagccactgcacctggcccaaccatatgtattttcttaccacttctcacatatgttcttgaaaagagaatggtatgccacattttttaatcagctcattttaaacttaccgaaggaatttctttctcaaagaaacacctaaaataaatatttcatgtcctttttttattttcctttttctttcttttcttgataacctcgctgtgtcacccaggctggagtacagtgatgcaatcacggctcactacagcctggacctcccaggctcaagcgatcatcccacctcagcttctggagtagctggaaatgcaggcagcaccaccatgcccagctaatttttttttttctttttaatagaggtggggatctcactatgttgcccagggtggtcttgaactcctgggctcaagtgatccacccacctcggcctgtgtcctttaatgaccattcccttatgcctatcagtgaacatcattgcattggttttggaaagtcctcatagtctatcattgaacctattttttaataactttcttaatactgttacctttaattcctgtacaggtaaaaggatttcgtagttatgtggacatgtatttgaaggacaagttggatgaaactggtaactccttgaaagtaatacatgaacaagtaaaccacaggtgggaagtgtgtttaactatgagtgaaaaaggctttcagcaaattagctttgtcaacagcattgctacatccaaggtaattttattcttaaattattaatcatgatttatctttacatatatgtgttcttattgtttttaatatataaagtggacttgaatattgggctagcttagtataaaggaggttaaattagtttttaatgtttgattattataattttgaggatactgagttttacagtttggtatttttccttattagggtggcagacatgttgattatgtagctgatcagattgtgactaaacttgttgatgttgtgaagaagaagaacaagggtggtgttgcagtaaaagcacatcaggtatgtgcttttggcagttttctttttctaaagtcaaggaagaagagaaaggctataaataaagcatgagtacatttttagtggcttaatatcaacttctattgcaggtgaaaaatcacatgtggatttttgtaaatgccttaattgaaaacccaacctttgactctcagacaaaagaaaacatgactttacaacccaagagctttggatcaacatgccaattgagtgaaaaatttatcaaagctgtgagtacttagaggaaaataaaaatagaaacacctgactttattttccattgcacttcttagctctgcagaaacaatgattcttctcatagtgagcttctccaagtcttcccaatctgaaaaggaagtaaaaaagggctttactttaactgatttaccaaagacttaatgaccgtctatatttcagtatttcccaattacattttaccattaagcttagatcacttttgaattaatctagctgtttaacaaacaccctcacttaaatgcctaagacttgctttcagtcaacacatccaaaattgaatttgttacctccatactcactgatttgcccatacaagcagccccccactctccaacaaaaaaacaacttcctatcttagtaaaaagccccaaccaacctctaggttgtataaacaagaaagctgggagccttcctttatttcccctcctctctaatccggtcaataagaatcatctcttggatgctgcagtagcttctcaccattatctcttttttggtttactacaataggttcttaaccttcatactggttaagtcctttccttggaatgcttttgagtgacttttgtgttaaaacacccatttttatcttcactctcatttgaaatctttcaatgacttccactcagggaaagtccaaattccataatttggccaacaagaaagatctgctgtaatctaattacacctacttctccaactcatctcagtgccagtttttcgtatattgtcctgttgcttttaaattactgaaaagcacagtgctcttcccctcctcagagtttattcacatgctaatccctctgcatgaaatacatccttttcacctggctactttaggtcttgtcctttcctcaggaaagcctttactttctacccttccccccacctaagttggttccaatataatattgaacataccttattagcaaacttcttgcttatccataacacttataacactgtaacttattttatttctgtctttttttttaggcagagtctcgctctgtcgcccaggctggaatgcagtggcacgatctcggctcactgcaacctccgcctcctaggtttcagtgattctcttgcctcagcctcccgagtagctgagattacaggcatgcatcaccatgcctggctaatttttttgttgttgtattttcagtagagacagggtttcaccatgttggtcaggctggtctcaaactcctgacctcaaatgatccacccatctcggccttccaaagtgttgggattacagccatgagccactgtgcccagtcttttttttttttttttttgagacagagtcttgctgtgttgcccaggctacagtgcagtgacgtaatcctggctcattgcaatctctgcctcccaggttcaagcgattctccttgcctcctgagtagctgggattctccagcctcctgagtagcggggattacagacatgcaccatcacatccagctaatttttgtatttttaatagagatggggttttaccatgttggccaggctggtcttgaactcctggcctcacttgatccaccatcctcggcctcctaaagtgctgtgattacaggcgtaagccactgcacccagctatgtctgtcttctatgttgtgtcttaaacttgatgaggacaagtgtctcaatttgttttatttgtgtctaattttatttatttatttttaatttttttttttggagacagcttctcactgtttcccaggctggagtgccgtggcttgatctcagttcactgcaacccgcgcctcccaggttaaagcaattctcctgcctcagcctcccaagcagctaggattacagccatttcaccaccaccatgcctggctacccttttttttttttttttttttttttttgagacggagtttcacttttgtcacccaggctggagtgcaatggtgcgatcttggctcgctgcaacctctacctcctgggttcaagcgattctcctgcctcagcctcccgagtagctggaattacaggtgcccaccaccacgccagctaatttttgtatttttagtagagccggggtttcgccatgttggccaggccggtctcaaactcctgacctcaggtgttctgcccaccttggcctcctaaagtgctgggattataggcgtgagccaccgtgcctggtctaatttgttttaaccactatatctccaacaagtagctcagtgctagcacaatataattatatagtaaatatttattgaacgaatgaaccaaaaggagcagctccctcagtggtgataacctgacatgggaagatgtgccaccctctatccagaaattattgttctacatctttttaatttttgaatcatttttatttgtattaaggctcatttgtattctagatttctgatagatcccttcttccctaatatgatccctaatatgaatcttctcgttttcaggccattggctgtggtattgtagaaagcatactaaactgggtgaagtttaaggcccaagtccagttaaacaagaagtgttcagctgtaaaacataatagaatcaagggaattcccaaactcgatgatgccaatgatgcaggtatatatttaataatgtttccaaacttttaagtcttatagttgttattttattcattaatggcataccacggatatttatttttcccttgacagaataactatattcaacagaataacttgttaaaaatcggcccgtttcctattatggaagatttaggtcatttccatgttataaataatattgaggtgattattttggagtataaaacaagaatgtttatattatgatctattacctaacaaataattttgctcattatatagtaaattgtgttttatcacaaggctataaacagcatgttcaagttagtatatttgaggttgaactaaatgtgctaatattaatatgtatatttttattttagggggccgaaactccactgagtgtacgcttatcctgactgagggagattcagccaaaactttggctgtttcaggccttggtgtggttgggagagacaaatatggggttttccctcttagaggaaaaatactcaatgttcgagaagcttctcataagcaggtagaatataagacgatcttcagaatctaaatctaatttataatacaagactttatgcttatatttaattccctcattaggcattttaaaatatattttagacaatttgtgcttattttgagaaattaggtacattgtagcctattttaacagacctttctgatgtagtaaattataagctaatagctcaaaatactggagctcaagaaaatccaagcaacatatactgttaaatttctttgttcttttcaaatttataaacgatgctttttttggtatatgtccatttcagatcatggaaaatgctgagattaacaatatcatcaagattgtgggtcttcagtacaagaaaaactatgaagatgaagattcattgaagacgcttcgttatgggaagataatgattatgacagatcaggtcagatttgttattaaatttttagattgttcaactaaattaagcatgtcttaatttaatttcattgttttttgccatgaaaataaattagttaaataggagctttattcatcatctctaatcaacatctaatcagatatgcttatatcatatgtatgttgcaaatacaggttaagtgagtctggatttgaacagaccttttttgattcccatagaaaatttgacaaattgccagtaggtcagtcataatatttttttatttctaaacaattctttgtttgtttgagatggagtttcgcccttgtcgcccaggctggagtgcaatggtgcaatcttggctcactgcaacctccgcctcatgggttcaagcgattctcctgcctcagcctcccgagtagctgggattgcaggcggatgccaccacacccaactaatttttgtatttttagtggagacagggtttcaccatgttggccaggctggtctcgaacgcctgacctcaggcgatccgcctgcctcggcctcccaaagttctgggattacagatgttagctaccacgcccagcctaacagttcttttgaactttggctttcaaatctttctaggaccaagatggttcccacatcaaaggcttgctgattaattttatccatcacaactggccctctcttctgcgacatcgttttctggaggaatttatcactcccattgtaaaggtacgctaatttctaagtaccatcatggatattttaagaccctactcctcaaacctggatatacatataagccccgtcacatgtagtggtatacaggggaccccacagtgtacaaagccacagtcattgttttttatcacaggtatctaaaaacaagcaagaaatggcattttacagccttcctgaatttgaagagtggaagagttctactccaaatcataaaaaatggaaagtcaaatattacaaaggtttgtaatgaaacccatatagaacttctcattttattatacaccctgtacaagactatatgaaggaacttggtatttttggttttataggtttgggcaccagcacatcaaaggaagctaaagaatactttgcagatatgaaaagacatcgtatccagttcaaatattctggtcctgaagatgatgctgctatcagcctggtaggtttgagttgtattttatatacattctaattttagaaatcactactttagccagttgaaacatttacatttttgtataagactccgtatcaaaaaaaaaagaatgttttatagaatagaatgtttccagtaagcatatcccagagaaggaatcagatattttagaaaattttgatttttggctgggcttggtggctcatgcctataattctaggactttgggaggccaaggcaggtggatcacctgagatcaagagttggagaccaacctgtccaacatggtgaaaccccctctctactaaaaatacgaaaattggccgagcgtagtggctcacgcctgtaatcccagcactttgggaggcagaggcgagcagatcacaaggtcaggagatcaagaccatcctggctaacaaggtgaaaccccatctctgctaaaaatacaaaaaattagccggccgtggtggcacgcagctatagtcccagctacttgggaagctgaggcaggagaatcgcttgaacccgagaggcagaggttgcagtgagccgagatcaggccactgctctccagcctgggcaacagagtgagactccatctcaaaaaaaaaggaaaaaggccaggcgtggtggctcacgcctgtaatgccagtactttggaaggctaagtcgggcagatcacaacgtcatgagatggagaccatcctggctaacacggtgaaaccccgtctctactaaaaataaaaaaaaataaaaaataaaaaattagccgggcttggtgacacgcgcctgtaatcccagctactccggaggctgaggcaggagaatggcgtgaacccaggaggcggagcttgcagtgagctgagatggtgccactgcactccagcctgggcgacagagcgagactctgtctcaaaaaaaaaaaaaaacaaaaaaggtcgggcgcagtggctcacaccagtaatcatagcactttgggaggccgaggcgggtggatcacctgagctcgggagttcaagaccagcctgaccaacatggtgaaaccccatctctactaaaaatacaaaatattagctgggtgtggtggcacgtgcctgtaatcccagctacacgggaggctgaggcaggagaatcacttgaacttgggaagtggaggttgtgggagccgaaatcgtgccatcacattccacaagagtgaaactccatttcaaaaaaaaaaaaatacaaaaattagctgggcgtggtggcgggcgcctttaatcccaggggctcaggaggctgaggcaggagaatcgcttgaacctaggacgcagaggttgcagtgagccaagatgacaccattgcactccaggctgggcaagagaacagtaactcccgtctcaaaaaaaaaaaaaaaggaaaacagtatttttgtttttctgttgttcgttctttgtagaaggatattttggaacctattagcctattagtaccagtgacatcttttcatcctttaatttataggcctttagcaaaaaacagatagatgatcgaaaggaatggttaactaatttcatggaggatagaagacaacgaaagttacttgggcttcctgaggtaaaagttttaaatatatgccacaaaatggattgttagactgaccttttggtattgatactatagcaaattaaacttactgaatagttattttagtaaaaaatttgatatgatagagttgtgcagcagttaaatttgctttatctttaaaacatataaaatatttctgtattattcaatattttttaaagacttaagaattacagaaataattcttagttctgaaaggtttctgtttgatttttgtgttgagcattgtttagaccggtagactcatgtaatactatttggtccttcaggattacttgtatggacaaactaccacatatctgacatataatgacttcatcaacaaggaacttatcttgttctcaaattctgataacgagagatctatcccttctatggtggatggtgagttccaatttgttagtctgttttcattgtaagatggaaatcaaattccaaaattggttaaattgaggatacttacgtttgctcttatttcattttaaaggtttgaaaccaggtcagagaaaggttttgtttacttgcttcaaacggaatgacaagcgagaagtaaaggttgcccaattagctggatcagtggctgaaatgtcttcttatcatcatggtgaggtaaacacacaatccatgtttccagaaagcattatatcagaaatccctgcagagtcattctcaaaacagatttggtgaaagtataagctcatatattcatagtaaagaacaagttggtaaaacctgtgaaagaataaaactgcttgccctttgatttctgaaagtaatattcctgcagggatattcataagtctgcaaaggtctacattaaaaaatgcttagtatgtttattataactttgtgatgtcaaaatttagacctccactgatttgaaaattgttataataaattgtgacacatgtatgcatggaatcagtgctgtaacttcagtaaaactgtgtgcactgacactgaggaatatccagggtctattctcaggtgaggaaaaaaagagacagaacaataactaaaaatgtctacaaggatatgttccaaattgttcactttagttacccctgagaactggaaagggcaactttcactttttatatgtgtctgaattgtttgactttacaccaatgttttgtgattactttttgcattaattatgtaaaacagttttaaagaactagattgcctacaggtttctagaattttaaatataatggttgtcttgttgctttcaatcaaaatatagtagggatacaataaattttcacccaacgaacatttgttgaatgcctaccatgtaccaggtatacaaaaataaataaaaatatgttccttatccccaagatataataacaatttagccagagggccaatacacacacagctatagaataaagtgatacatgctagaatagaaatgaacacagcattgtaacacaaaggaggaaatatttcattttgctgaggataaggagaagaactatgccttcaaagttgagtgggatttaatagaaattgttggacggcagccctaaacttggagccagaagttgtaggttcaagtactatttctgccatctattaatctgaggaaagtcactaaacaactagacctcacaaaatgttacaggattatagtgaggttaagtcataatgtatttgtattagtaaaagcctcagcttaatgaatctttttttccccacagatgtcactaatgatgaccattatcaatttggctcagaattttgtgggtagcaataatctaaacctcttgcagcccattggtcagtttggtaccaggctacatggtggcaaggattctgctagtccacgatacatctttacaatgctcaggtaggtatgctttcactttctagtgacttgccatttccagttttgaaacaatgtgagatttagttcaccaaaaatacaaaaactcagttaatcagaagatactggcatctagtggcagaggccaggggtgaggcttatacaggaaagcccccccataacaattatccagtgcaacatgtcaattatgctaaggttgagaaatcctgatgtagagcttgggactgagtaaaggagactttgattcttcctaaatatcacaattgaaattttactcctttacaagcctatggaaagtatattatgaatggtcaattttcagctgtcatcccagtcaccctttcagtggcattcaaacagttactaattgctccatccttcttgaaactctttatttggcctctatgactgtagactcttctggttctcttctaccttattagctttctctgctgggtccttctcaccttcccaacctctaaatactggcccattccagggctccttcatcagatctctttccaatgcctacactcaattcccaaatgatctcccattcatccgttctatacctttaaatctccagtcttggtctctcccctgaactcccaacttttatgtctgactgccctcttaacatttcccacttggatatctagttaagtatctcaaacataagtctaaaaccaaatccttagttttcctgtctcagtaaatggaatgccatgccatccttctaattgctcaggctaaaaaccttgtcacccttgactcctttgcttgatacttaacatccagttcctcagccaatcctataggatctgcattggaaaaatactaagccacccccatctcatctaaactattgtaacatatcatcttttcttaaagcagccaattattttttaaaaaataagtcactctgattcagaaccttcaactgctcagagtaaaatctaaagacctattttagctaaccagacattatgtgatccgtgtccccaccttccatgtcttttgattccttctcataccatctcctctccagccacactgtccttggcctatactcaaatataccgagcacatttcctcttcagggccttttacttactggttcctttgcctgcaacactctttctctagatatccacatggttcagtccctcagtttgttttttgttgtttttttttcttttgagatggagttttgctctttttgcccaggctggagtgcagtggcgcaatttcggctcattgcaacctctgcctcctgggttcaagtgattctcctgcctcagcctcccgtgttgctgggattacaggtacacgccaccatgctcagctaattttatatttttagtagagatgaggtttcaccatgttggccaggttggtcttgaactcctgacctcaggtgatctgcctccctcagcctcccaaagtgctgggattacaggcgcgagttactgcacctggcgccctcagtgtcttttctctgctcaaatgttttcctatcagaaacggcttaactttccttagcacctcttcagtcactttcccactttttcttctcttgtttatcccaccacctaacaaaatatgtgttaattgcaaacttctactggactgtgagctccttgaggattgagactttatgtccatgtgcgtgacacatagcaagtgctcaataaatattgttaaatgtatattagtcagcaagtaaaaccaagataattttcatgtataatacatgtcctttccataaaagttaagtgtgaaattcagtatttttgtaaaataacattctttgtttcttttctttagctctttggctcgattgttatttccaccaaaagatgatcacacgttgaagtttttatatgatgacaaccagcgtgttgagcctgaatggtacattcctattattcccatggtgctgataaatggtgctgaaggaatcggtactgggtggtcctgcaaaatccccaactttgatgtgcgtgaaattgtaaataacatcaggcgtttgatggatggagaagaacctttgccaatggtaagtattctgtgtgtgttaagagccttaacttttccttgggtttcagttgaatagattgtatgattaaagatgatgcaaacataaaatttaatttcatactttagatttattgttaaacgctgttgtgatttccgtctagtatcacatttagaaaacatactgtttttttaaatgccaatttagcttccaagttacaagaacttcaagggtactattgaagaactggctccaaatcaatatgtgattagtggtgaagtagctattcttaattctacaaccattgaaatctcagagcttcccgtcagaacatggacccaggtaaataattatggatttcttttttaggtttgtgatcaaaagaaataccttttgtactattgctgttgactattcagaagcctatattttagaaacttcaggattatttctttctttagacatacaaagaacaagttctagaacccatgttgaatggcaccgagaagacacctcctctcataacagactatagggaataccatacagataccactgtgaaatttgttgtgaagatgactgaagaaaaactggcagaggcagagagagttggactacacaaagtcttcaaactccaaactagtctcacatgcaactctatggtatgtatttgttttgtgagatgtacacgtttcaatttatattaaagattaatatcaattttaaaagtatatcttagtctacctttataaagtttagccaatttgtctattcttggctctaatcttgttttcctttttcaggtgctttttgaccacgtaggctgtttaaagaaatatgacacggtgttggatattctaagagacttttttgaactcagacttaaatattatggattaagaaaagaatggctcctaggaatgcttggtgctgaatctgctaaactgaataatcaggctcgctttatcttagagaaaatagatggcaaaataatcattggtatgttttgggaataataactgcttactaaaactctagttacgccaaactttctttaaacatttttggtgagagtaatggtggagaaagaggcaaaatccatttaattcacctggtcacttatacacgcatttctttaaaatatctgattaggtatttatagtttgaaagagatgatgtttccttgactgagcatcttgagaaatcaagatttagttgacaattagacatgaggagaatagagagctagaagaccttgcataaactgattgaccaagagaatagatacactaatcatgtctacaggaacagaaaataaaagagacagagaagagataataaatctgatggtaaaaaaaaaaaaaggcaggaagattacgaatggcttctactctctgggtgtggtggcgcatgcctgtaatctcagcacttgagctggggaggtcaaggctgcagtgagcctaggtagtgccactgcactccagcctggacacaagagtgagagagaccctgtctccaaaaaaaaatgatttgatcatatatgatttgactgcccccttgtggtaatttacatttgtcaatggtttagggagacttgcctgtataccgggatatacaaatttatgcaagcacgaagacagtttaatttccagttttaaacttttgacttgtgtaaaaccttatccccttcctaaaatattactcaaaatcattatctctgtttacttttttaaaaatagaaaataagcctaagaaagaattaattaaagttctgattcagaggggatatgattcggatcctgtgaaggcctggaaagaagcccagcaaaaggtaatcttgggtggcacttttctatattgttaaagactatgtattgtacaatgtttatgtttcacattttctaataaagctagattttaattaatcctttaggttccagatgaagaagaaaatgaagagagtgacaacgaaaaggaaactgaaaagagtgactccgtaacagattctggaccaaccttcaactatcttcttgatatgcccctttggtatttaaccaaggaaaagaaagatgaactctgcaggctaagaaatgaaaaagtgagttgatagtaggatggtacatgctgcttagttttgttctattctaatggtaaaagtaaaattgtgtgttgcatgaaaatgctgcttgtatacatatattaactcaattttgtaattatcttatgaaggaacaagagctggacacattaaaaagaaagagtccatcagatttgtggaaagaagacttggctacatttattgaagaattggaggtatgtagtttataatgcccatgttagaatttttattaatgaaataatatattccagcagtatacctttgtcaagatagttcacaattggcaataaaaagaaaataagaggcataaggataaattccaaatagcgtataaaagaacagattattggccaggtgcagtggctcacgctggtaatcccagcattttggaaggctgagttgggtggatcacttgaggtcaggggttcaagaccagcctggccaacatggtaaaaccccatttctactaaaaacacaaaaattagccaggcatgatggtgcataccagttactcaggaggctgaggcaggagaattgcttgaaccgagaggcagaggttgcagtgaaccgagatcacaccactgcactccagcctaggcaacacagcaagactccgtctcaaaaaaaaaaaaaaaaaaaaagggacagattattaaatactacttagaatacaaggccgggtgcggtggctcacacctacaatcccagcactttgggaggccgaagcaggcagatcacctgaggttgggagttcgagaccagcctgaccaacatggagaaaccctgtctctactaaaattgcaaaattagccaggcgtagtggcacatgcctgtaatcccagctacttgggaggctgaggcaggagaatcacttgaactcgggaggcagatgttgctgtgagctaagatcacaccattgcactccagcctgggcaacaagagtggaactccgtctcaaaaaaaaaaaaaaaaatactatttagaatacagtaaatgataccaggagactgcccagacattcagacatttctggacaaaaaaagaaaagagcaggagttgatttttgataaagggaagaacatattaggactgagaagataaaaagagcctaaatgtggaagaagaccaccaacccagtcccccaagtcaacttaaaaggacaaagccacagggcatggtggctcatgcctgtaatcccagcactctgggaggctgaggtgggcagatcacttgaggtcaggagttcgagaccagcctggacaacatggtgaaaccctgtctctactaaaaatacaaaaattagttgggtgtggtggcatccgcctgtaatcccagctactcaggaggttgaggcaagaaaattgcttgaacccagaaggcagaagttgcagtgagccgagattgcgccactgtactccagcctgggtgacagagcaagactccatctaaaaaaaaaaaaaaaaaaaggagaaagcagggctatccagatggtttcagaaggttatttgttacttaaatcttcctaataacatttgtttctcaacattattttaacataagaaaaaaggccagcactgtggctcacacctgtaatcccaatgtgctttgggaggctgaggcaggaggatcacttgagattaggagttcaaaaccagcttgggtaacgtagcaagacctcatctctacaaaatgttttttttaaatagccaggcatggtggtgtgggcctatagtctcagctactccggaggccaaggtgggaggatcacttgagaccaggagttcaaggctgcagtgaactatgatcatgtaccattgtactcagcctgcgtgtctcttaaaaaaaaaaaaacaaaaaaaaaaccaccaaaagctttatttcttaaatttaacatgcaaatttgtattactgcacttcagtatagatgcctagctcattgtaatcagttggttggataagtgtgcatcacttcctttcatattttgtatgtgagtttacaaatatatatgtatatacatgttttatttttagtttctcccttgttttcctcaaaaaggttaagtggtagaatcaggaataaaacccagtccttctgtctccacaccttccttttcaaggtgtgttttaattacatcttcactattgttgatagtatactaggttatggagcaatttatcactagtttttaagatgtaacaaaatgaaatcagtttaactgttgggtgtttagatattgtaatgtttttgttaacatttaaacttgctttcttatatcccttctgtaggctgttgaagccaaggaaaaacaagatgaacaagtcggacttcctgggaaaggggggaaggccaaggggaaaaaaacacaaatggctgaagttttgccttctccgcgtggtcaaagagtcattccacgaataaccatagaaatgaaagcagaggcagaaaagaaaaataaaaagaaaattaaggtaatactcttgtggtggctcacacctataatcccagcactttgggggccaaggtgggtggatcacttgaggtcagtggttcaagaccagcctcccaacatggttgaaaccctgtctctactaaaaattaaaaaaattaggcgggcatggtggcaggcgcctgtaatcccagctactcgggagactgaggcagaagaatcgcttgaacccgggaggcagaggttgcagtgagccaaggtcacaccactgcactccagcctggccaacagagcaaaactccatctcaaaaaaaaaaaagaggtaatactcttaaaaatattatgcataaaatattgatgcatatgtccacttaaaattgaaaaaaaaatgtataaaatttttttgttgttgttgttgagatggagtctcgctgtgttacccaggctggagtgcaatggcaggatctcagctcacagcaacctccgcctcccgtattcaagcgattctcgtgcctcagcctcccaagtagttgggggcacatcaccacacccagctaatttttgtatttttagtagagatggggtttcaccatcttggccaggctggtctcgaactcctgacctcaagagatctgcccaccacggcctcccaaagtgctgggattacaggcgtgagccaccgctcccagccaaaaatgtataaaatctctaatcccatagttcagaatttattctatatccaaccctaactttgctatcttttagaatgaaaatactgaaggaagccctcaagaagatggtgtggaactagaaggcctaaaacaaagattagaaaagaaacagaaaagagaaccaggtattacaacatttttagaaaaatggtataaagtgaagattaaattgtgtttgttacctagtacattccacatagatgttcaaaacctttttgttgaattgagaaacgtgaaagaggactgtatctcaattctacttggacctctttttttttttttttttttttttgagacagtttcactcttgttgcccaggctggagtgcaatagcacaatctcggctcactgcaatcttcacctcctgggttcaagcgattctcctgcctcagcttcctgagtagctgggattataggtgcatgccaccacgcctggctgctttttgtatttttagtagagacggggtttcaccatgttagtcaggctggtctcaaactcctgaccttgtgatttgcccgccttggcctcccaaagtgctgggattacaggcgtgagccactgcccctggcctggacctctttaatatcgtccttgggatttgattcattatagaaaatattttgtaatgaagtagtttgttaatttgaattccttaattgggatctaagaaaatacccagtttattagatttcattttctagccacttacgaggttctagtatacaaagtttcttaagaaaagtgactacatattagtaatgtttgtagtatctctagagttcaacatcatgcttcggatataaataatgtccactcaatgaactaaatagaattaataattctgttaatcatttgataatgcctttactgtctactttttttgaaacatctttattgagatattcacatgccaaatttgcccatttaacgtataccatttggctgggcgccatggcttatgcctgtaatcccagcactttgggaggctgaggctggcggatcacttgaggtcaggagttcaagaccaccctggccaacatggtgaaaccccatctctactaaaaatacaaaaattagttgagtgtggtggtgcgtgcctgtagtcccagctactcgagaggctgaggcacgagtgtcgcttgaacccaggaggcagaggttgcagagagccaagactgtgccattgcactccagcctgggtgacagagcaagactccaactcaaaaataaaaataaagtatgccattcagtggttttagtatagacaaacagttttaatacaatttattgccccccaagaaaactgaactcattaacaatcatttgccatttgccaccaactcctctccactgggtgaccactaaaaaatctaggggcatttcctataaattaaatcatataatatgtggtcttttggagctgacttctttacttaacacattttcaagggtaacccatgtggcagcccatatattagtacttcattctttttttttttttttttttgaggcagagtttcgctctgtcgcccaggctggcatgcagtatgcagtagtagtgagatctcggctcactgcaacctccgcctgctaggttcaggcaattctcctgcctcagcctcccgaggagctgggattacaggcacgcaccaccatgcccaaataatttttgtatttttagtagaaacagggtttcaccatgttggccaggatggtctcaaactcctgacctcaagcgatctgcccacctcggcctcccattttgctaagcccgtgaaggtaaacctctgtgttttcttctaagcattttatagttttagctcttacatttaggtctgtgatccactttgaattagtttttgtatatggtgtaaggaaggtgtccaacctgattctttgcaggtagatatccaattatttcagtatcatatgttaaaaagacttctttctacaatgtttgtcttcacccttgtcaaaaatcaattgactataaatgttaaggtttatgtatggagtctcaattctgttccactgattgagctatatatgtccttgagtatctactttttttgagacagggtttcactcttgcccaggctggtcttgaaatcctggctcaagcaatccttctatctcagcctcccaagtagctgggactataggcactcgccaccatgactagctaatttctaaaagttttttgtattttgtagagacagtccttttttctttttttttctttttttgagacaagatttcactctgtctcccaggctggagtacagtggcatgatcacagcccactgcagcctcgacctcccaggctcaaacaatcctcctgcctctgcctccgcctccctagtggctggaaccacaggcgcactccaccatgcccattaatttctgtattttttgtagagatggggttttgccatgttgaccaggctggtctttagctcctgagctcaagcgatccgcctacctcaccctcccaaagtgctgagattacaggtgtgagccaccgcacccagccaagacagggtcttatatcttaccccagctgatctcaaacccctgggctcaagtaatcctcccgccccagcctccctaagtgctgggattacaggcatgagccactgtgcccggccacatttatttatgagattaagtgaccaagctatatgcaccacaaaaacagagaccatatctgtctcttttcacgattgtattctcagaactatcacaggagttaataaatttgaaggatggatggatgatagatggagaaaagtgggtctaatatataaaggtgattaatttctatctcccctctaggtacaaagacaaagaaacaaactacattggcatttaagccaatcaaaaaaggaaagaagagaaatccctggtctgattcagaatcagataggagcagtgacgaaagtaattttgatgtccctccacgagaaacagagccacggagagcagcaagtaaggaaaactaaagaacattatagataaactgtaagagtggaatggccaatatacttcagggtactttgccccagaaattactgtgtcttaatagagcagtaaattatgttaaagctttgaaacactgaagcatctttcaggagatttaaaaactaaaatattcatgaaatgttatgtcaacctatgaattgtttctcctactaccctctttgatttttttgtatatggtttttttactagcaaaaacaaaattcacaatggatttggattcagatgaagatttctcagattttgatgaaaaaactgatgatgaagattttgtcccatcagatgctagtccacctaagaccaaaacttccccaaagcaagtatcttatctaatatgggttttgtcatgattgtttctaatatattgttttttgcttgacacatttagaattggttgtcaggatttttttttttaattctagacttagtaacaaagaactgaaaccacagaaaagtgtcgtgtcaggtatgtatttaagtaaaagtagtgagacatctgccttactgggacactcagatccaactgggttctaatcctggctacattatccaagtacttcctttggaaataaatttgagttcttattaacattatgttgatactgttcactgggtttagtttcacatgtaaataggtactgcattcagtatactaaaagtaatcatagtgcttgccaggtactttgctaggtgctagagatacaaaaaataaaaactgttcttgctgataaaaaattcagaaattagaacaaagttttaagagtatgttttaaatattccagaaaagtcacatatttggtgtttaaataggaattcataccagggacaaagcagaaaatggattttcatgtgttgcttaaatgtactattttcctttccatttgaaataatagaccttgaagctgatgatgttaagggcagtgtaccactgtcttcaagccctcctgctacacatttcccagatgaaactgaaattacaaacccagttcctaaaaagaatgtgacagtgaagaagacagcagcaaaaagtaagcctaaatctttgagatgggttaatgttgcaattacctaactggtttccacgtgtctatttcaatttttttattgccaaaacttactattgatattacagattaaatgttttccaattggaagcaatttcttttcgatctttataatcaaaattagtagtcaaggctgttccaaaacagtaagttatctctattgattgttcagttacagatcaaactccttgttctactcttttccctccttctcactactgcacttgactagtcaaaaaacaaaacaaaagccaggcagagtggctcatgcctgtaatcccagcactttgggaggctaaaacaagaggattgcttgaggccaggagttcaaggctgcagtgagctatatgatcaagccactgcactccagcctgagtgagagagcaagaccctgtctccaaaaataaggtagtccaaatgtttaaaatcagtgagtttctctcagtaccaggcttcatctagttcatttctgtgacaaggataggatttataagcaattgcaatgtttaacgtaaaacgtattcttgaaattgaattaagtttaaggctgggtgcagtggctcatgcctgtaatcccagcactttgggaggccaaggtgggtggatcacctgaggtcaggagttcgagactagcctggccaacatagtgaaacctcatctctactaaaaacacaaaattagccaggtgtggtggcacatgcctgtagtcagctactcgggaggctgaaacaggagaatcacttgaacccaggaggcagaggctacagtgagccgagatcgtgccactgcactccagcctgggcgagatagagcaagatgctgtctcaaaaaaaaaaaaaaaaaaatagaatgtttaagaatactttgattctctgttttcacctctcttagattgtcttttcctatgttaaatatacagtcatcacattgctgaagaaagttcgcaatgagaacaattcatctaagagtggctgtgactaggtcaggcgcggttgctcatgcctgtaatcccagcactttgggaggccgaggcgagtggatcacctgaggtcaggagtttgagaccagcttgaccaacatggtggaatcccatctctactaaaaatacaaaaaattagccgggtgtggtggcacacgcctgtaatcccagctactcaggaggctgaggcaggagaatcgcttgaacccaggaggcagaggttgcagtgagccgagataacaccactgcactccagcctggacgatagagtgagaccccatctcaaaaaaagagcagctgtgacaaatgcctgtattgaattgcaggtcagtcttccacctccactaccggtgccaaaaaaagggctgccccaaaaggaactaaaagggatccagctttgaattctggtgtctctcaaaagcctgatcctgccaaaaccaagaatcgccgcaaaaggaagccatccacttctgatgattctgactctaattttgagaaaattgtttcgaaagcagtcacaagcaaggtgagtgttgatcctagtcagtccttttgctgtagatgttctgaaacacgtaactaagccattgctcttaaaaatttggcatatctttaagaaaattaactctcatattctgttagcttttactgtacatatttagttttaacaaagttaaatatgccacttatttgggcaatggaagagttggccttagatctgcttcttattacttggtagaaaatagaaaactccttgaatatagtgtcttgatacatttttttacattacaattatgttgtcagatttacaatgtgcaagttacctgggcttttctcttttagaaatccaagggggagagtgatgacttccatatggactttgactcagctgtggctcctcgggcaaaatctgtacgggcaaagaaacctataaagtacctggaagagtcagatgaagatgatctgttttaaaatgtgaggcgattattttaagtaattatcttaccaagcccaagactggttttaaagttacctgaagctcttaacttcctcccctctgaatttagtttggggaaggtgtttttagtacaagacatcaaagtgaagtaaagcccaagtgttctttagctttttataatactgtctaaatagtgaccatctcatgggcattgttttcttctctgctttgtctgtgttttgagtctgctttcttttgtctttaaaacctgatttttaagttcttctgaactgtagaaatagctatctgatcacttcagcgtaaagcagtgtgtttattaaccatccactaagctaaaactagagcagtttgatttaaaagtgtcactcttcctccttttctactttcagtagatatgagatagagcataattatctgttttatcttagttttatacataatttaccatcagatagaactttatggttctagtacagatactctactacactcagcctcttatgtgccaagtttttctttaagcaatgagaaattgctcatgttcttcatcttctcaaatcatcagaggccgaagaaaaacactttggctgtgtctataacttgacacagtcaatagaatgaagaaaattagagtagttatgtgattatttcagctcttgacctgtcccctctggctgcctctgagtctgaatctcccaaagagagaaaccaatttctaagaggactggattgcagaagactcggggacaacatttgatccaagatcttaaatgttatattgataaccatgctcagcaatgagctattagattcattttgggaaatctccataatttcaatttgtaaactttgttaagacctgtctacattgttatatgtgtgtgacttgagtaatgttatcaacgtttttgtaaatatttactatgtttttctattagctaaattccaacaattttgtactttaataaaatgttctaaacattgcaaccc

SEQ ID NO: 202 - DNA, 32744 bp, Homo sapiens
  source 1..32744: mol_type = other DNA
gcgagccgatgggggcggggaaaagtccggctgggccgggacaaaagccggatcccgggaagctaccggctgctggggtgctccggattttgcggggttcgtcgggcctgtggaagaagcgccgcgcacggacttcggcagaggtgagcacgggaggctgttttcgctggctggagcccgctcgccctaggagcttcctgcctccgtcccccaacccggaaccgccttccccgacgcgggctcggtgcccacgcgccctgctcggaagttttgagggtcttagctttaggttagccttcgcccggggtcccggccggtggccgcgtgtcgacgcccctcccctccccccgcgcgacacacacatattccagttcctgggagtttgcatggggcttgccgccatccttgcctcttctgcctctgccacattgcatggtccccctcctggcgcgcctcacccctcccgggcacagctatcgaggctcctcgggctcatcgggacgccttttggctccatccgggttcccccatcggatgccgggacgggaagtagagaaagcggtggcgactggtcccactccgattcctcactggccgggctcaggcccttcttggttccgtgggtacaaaattgagctccacgcccaagtggagagaatgagctatgcgcgcctccggggcgggccacgcggggccaggctgccccagggtgcccgaggcctcgcctcgtctcgccgcgaggactggaatctcgcagcaaggaccctcctcgcactggaggtatcgtcgagtccagcccctaagtgacagatggccggggtgccaccccacccttgagctgacgccaagtctggccggggaaaggtcctcaaggggctggaggatgctgccgccgccctcctgtcgagcctggcaatgggccagtcccagcgcctgccgcggtctccaaccttggcagataccgtgcagtgccgagttctgccgttatggggtccctggaggtcttcctgggaagaggattttggaagagacgataaggaaaagtgcacagcacagtttggccagctagcctactcctctccacccttaactttcctctgtgttttcagctggctcagctgaactaaaatgtggggtgagggacagctggtaggtctcatttgcccagatgggtgattttcacctcttagaaaccttcctaaacagcttggggggcggtagtgggaagacccctcagacactggacagcttatggctccatccccgttctgacactatgcctgccgcagtaaggggcactcacagaattctgcctctctagaatttactccagggattgcctgtcttctcaaaaaataaataaataaatacctacatacgtaagtcccaatcctgcagatactaaccttcaaatgagtgtttttgtctttcccagaggcacccttagtagcatccccagtgattcccttcccctggctgtgtcccaggggcgtgttctggggaacaggcttctttcattcagcctcctgtgtgggctgcttctctcagtgtctgctaaaagtgaactcaatcctgggtcactcacccgtctgcagaaagactccattcagctcataaggcccctcccttagagaatgtgtgtatgtgtgtgttttcaggttccttggcatgatttcccccaaatggtttacacatttagctgttaccaagtaacagttcctggagtccaagctcagcccaatcatctgttacttgtttgacagcacattcagctactggggaggcagactaagacgttctggggagcggtcccaaacccagataggtatttgtaggtatttgctgattccactagagcaaatattcttttttttttttttttttttttgagacagagtcttgctctgtcggcaggctggagtgcagtggtggatctcggttcactgcaacctccgcctcctgggttctagcgattctcctgcctcagcctccccagtagctacaggtgtgcaccaccacgcccggctaatttttgtatttttagtagaaacagggtttcaccatattggccaggctggtctcaaactcctgacctcgtgatttgccctccttggcctcccgaagtgctgggattacaggcgcaagccaccgtgcctggccgcaaatgttcttaactggtggtcagtctgtgggccatcggatcattgtcacaggtgagcaccttgaaacaatatgcacaattggatttgtgtacctttttctggggtttttttcagtctcagaagagtctgaggcctcaaagaggttaagagccactgccttagagagactttaagacctcactgaaggccgggcgtggtggctcatgcctgtaaatcccagcactttgggaggctgaggtgggtggatcacgaggtcaggagttcgagaccagcctgaccaacatggtgaaaccccgcctctactaaaaatacaaaaaaaattagatgggcgtggtggcgtgcatctgtaatcccagctactcaggaggctgcggcaggagaatcacttgaacctgggaggctgaggttgcagtgagccgagatcactccactgcacgccagcctgggcgacagagccagagtccttctcaaaaaaaaaaaaacaaaacaaaacaaaaaaacagaagacctcactgaaccactaaagttgcgatttatctctactgagtccactccctgggtttgtgagccatttgccttctctttattggtgaatttgcagaggccttatttttattatgttgtatacattccttgtctcaacctcccgtctctaagccagaatgctctagtggcaaatctcttgttttctatcctgtattatcccattgtgtcttctctcctatcccccttccaaagaccctatggagatgggctcttggacctgaaatttgatctgggtctcaagaaaactgtgatttctcagctgcaggggtccattttttctcccttgtcctttccaaagttgggtcttgtgtctgttttggaggtgccaggttcaggggactgttttactgggagtctcagacttctttcttctagagaggcatagcccagggacttcctttcccctggagttatggaaggagtctgaattgctgaggatggtcagccactgccccctcctctctgagtgttccttgatctgccctgggctgcactctctttggaagggggtgggggctgtacccattcaatctgaggaccagtttttctggtctgagtcaaaaatattgggaaatggagcagtgggtggggggtggaggaccgtggggcagtgaggtggttgggacgtctctggaaactcatactgagaaggaatctcaagtcattccaggggaaggccagaaaagggaacatctctgagccccttcccagctaccccactttaggcagacaccaggctgaatacacccattgtgccatgctggatactagctaggaggccgacagaggcagccaagccaggatgagaacctgaagccccaccagcctggccgattgggagggggcgcaatgtagcccctggaatgttggccttctctgagttgggaacggagacccaacttccagcacgtgtaaacaagccggctccttcactctgccctcctttatttgtacttgacttttttctcccccagcaaattaaacagctttgcttctgggctttgggggagtcaggagtgacttttcctgatccggccaagctcttggcctgaatttccatgcccacctcccccgattcccctccccagctcagtccttgagttacccacaggagaatgggtgtatcaggacagagtcttggagaggggagatgatgaaattcttatcatagactctttgaagtgaaaaggacacatgggcctggctcttggaaaaatggtcttttcttgggctggtgtggatttttctggggacctaggtgtaagagggtttgggttcgagtcttgggtcataaccttgcttattattaggtgggcttcttgggcaagttatcctaacgcctctgagattttattcctcatctaagaaatggggttataaatctcagtgtacctcccagagctcatatgagatgagtttctttttatctttttttagacacaaggtcttgctctgacacccaggctacagtgcagcggtgcaatcatagctcactgtagcctcgaactccaagatgagttttcctatacatgtgatggaggatggtttctgcctcttcctcctcctcctctcagtccgccccagttagaagtgaccactacagggtggtccccagagaggcatctgttcttcttagtgagttttgctctaaattagcagctggatgacgcagtggggcgggtggaatgtgctaaaggtcggtttccctgccctgtgtctgctccatactcaggattgggaggctagtgtccaggagaaaagaggagaaaagagcttagcgatgatcctcccccctcccctactccccttctaaccaggacctgggggtgtgaccctttttgaggctaagtaaacttgctggcttggccattggcccggtggtgtgtaagggtgtgtataggggtaaatctgggtgtgggggagatgaaacctgtagggagagaaaggctagccttttgcaatttcagccgtactctgcactggtcagagaacagaaaggtgtttcagtgtctgcccacctcagatgggaccagcactcagatttgggtcaaagcaccggttttcttggccttctagccagctgccttttgctccaggatgagtgtggttgtggatcagctagtttgcctagagggaatggggcagggtaaggcaagagtcccaggggaaatggcacttttgtttttctctatcttccctcacccattatctctggatcttcttcctctgctggcaaaagtgctgcttgatatctctcttccatccctcccgctgggacagcattttttccttcctcttgagaaaagctgagatctggttttattgtctgggggcaactgggagtgggtctgccctgctggggaagatagtgcctccacacgcctgcccccttctgaccagcttctctctcccagacaggtagagcaggtctctctgcagccatgtcggccaaggcaatttcagagcagacgggcaaagaactcctttacaagttcatctgtaccacctcagccatccagaatcggttcaagtatgctcgggtcactcctgacacagactgggcccgcttgctgcaggaccacccctggctgctcagccaggtgagccctgcctccactttgggcctttcttccaggcccggggtctgaggaagagaaagccattggtttgttggtgatgccgatagggtcatggggttggaggctgccagcagcagctgtgggaagcatgccatgggctgagcagggtttgtgttcatgctgagccctgcatgttgaggtaccccagcatggtataccctgccatgggcttgaaactggacaaactggtgtccaaatcaaagctgtgtttattaaccatgtggcctggggcaagccatttcacctcttttgagttttagattccccatctctccaatgggataatactcactttgagctgtaaagattagcaagaagcatttagcgtgcttggtgcctggcacatggtagatgctcagtaaaaagtagggatgtgccctctcctcccctaagtggagtatatcaggaatgtatcaaggcaattaggaagtgtgatgttgtactttgtgaagaatggccccgaccctggagggtcagcctggaatagagggctctgttcttgagatctttgcagggccattgttagaaagctcttagatttccttggcagggctcagagagtaagcctaggactagtggtggtgtttcttcccactaggaggcagctcaaccacaaagggatggagggagtttcctggccctggagatgtatgagcagtggttaggggctgcttattgggcctgttgtagacagggttcaagcacagggatggggttgaccagatgacctctaaggttccttgctgcctcaaggctctgtctctctgttttcctctttggaacacatgttctggtccatattctgaggggcttactgttgaatgaagaagctaatgtatcacatagggagggtagagaatcacttattcactcagcaggtatttgctgagcgcctactctgtgccaggctccatctgggcacaaatgcctctagatacctggttgtcaaaagcaagatattggctagggtaggtggaggaagcatccaggagttgactctgaaggatggttagggctggctttggagcagagtgaatgggaagtcaatccctgctgtcctctatttggatccccaaaatactacggtttatctaattcttcctcactctaaatacaaaccgcttttgttccagaacttggtagtcaagccagaccagctgatcaaacgtcgtggaaaacttggtctcgttggggtcaacctcactctggatggggtcaagtcctggctgaagccacggctgggacaggaagccacagtgagtgggcatggggtcaggatgaacgtgtgtggtaacagaagcaaatatggtcacctccaggtcagcagctctgtggatcacccccacagccagtctcattgtagctcagggaaggcaggagtcctgtggcgctgacccactcaggtggctgccagcagtaggctcagtcttgatgcccattcccagctccctcatcatccaaacttctttgttttattggtttgggcaagatgtgctgcagaggtaacctcaatataattcaagagccaggtggaaatggtctgattctttttttttttttttttgacagggtcttgctctgtagcccaggctggagtgcagtggcgtgatcttggctcactgcaacctccgcctcctgggttcaagcgattttctagccccagccttctgagtagctgagattacaggcatgcagcaccatacttggctaattttgtatttttagtagagacgaggtttctccatgttggccaggctggtctcgaactcctgacctcaggtaatctgcctgcctcggcttcccaaagtgctgggattataggcatgagccactgcgcccggcctactttatttttttttaagacagggtctcacactgtcactcaaggctgtagtgcagtggcatgttcacatctcactacagcctccacttcccaggttcaagttatcctcccacctcagcttcctgagtatccgggactataggtgcatgccaccatccaggctgctttttaacatttttttatagagttagggtcttgaatgttacccaggctggtctcgaacttctggcctcagggaatcctcctgcctcagcctcccatgtagctggaaccacagatgtgtgccaccaagcccaaattcaattattaacttctcccagcttggtgatgaatttcaaccacgtagatgagagagttaaagtgaaacatggtttaggaagggtaagagatgcctggaataaaattatgtttcttcttattccccaggggagctggaggactaagggagggagtggagctgaggcctggcctagcctgggaagaatgtgccatccacacctggctctgtagagcacgtggctctgaagggcctggtgctcatctggggtgaaactgtaccagggatgagctgttctcttccttggctgcctcgagaatagcaatgaaggtggtgatggagatgtcttcctccctcattgggcttcctcagagtagcccttaaatgttaatttcccagtttctggccctcatgggtaaagcgggatccttgaagttgcacatggacccaggcgtgaagcgacctgtcccttgagttcccaggcctttggagagaggatggtgggattggagggagggatgctgagcatgtccccagggagcacatcctgcttccttctgctggcctctgggaggggaaggtgggacatcagacatctgagctggcagcagcgttgggccagcaggagtggctcattacctcttatggattgctgtctggtccctgactcagcagtgacgcacaggccaggcgggggttttgggacttactaggatgagggctgtctcgccacagccgccgccagggaatcactcgaactgattagctctgcaggcctgtggtcctcagccaggagagtctgcgtggagaagtttccctgattaagccctggctccccacttctccacccattccctgcgcccggacccatgtcctgaggctgagtcactgtgccttcctcaaggctcatgaagcagaatggttacctcccttctacccggtttcccctccccgtcaagctctgccacagccgtgacttgttggagccctttcacttgcgcaggtcctgtgtcaccctccagaggaggccaagagtgggcaaggtcggtgcctgttcaggcacagcccgcaccagagcaaggggtgaaagggcatctcctgaggacttactgagcttagggatctgtgaccccattttttctggaaaaatctctctttgctgggtgtggtggtgggagtgcttgggcaccacccctgtgcagtccctccttctgccctaggggcaagacgtgctgtccctctgagtttcatctccctcaatttttctgtaggttggcaaggccacaggcttcctcaagaactttctgatcgagcccttcgtcccccacagtcaggtatgtgtgaggcggctccaggctgggtcttctccctcctggaaccttgggtttgtccaccgtaacctgaggaaagaagtcaagctgatgaggacagtcagagggaccagggtccctgaagctgcactgaggatctgagggtgctgcggactcgggagtccagaggggaaggaaagggcttggtctacagcagagaggagttaggactggtaacaaaggggacttccaagtgcagggatgagaacgacctgcaggcaggccccacccctcagctggggttggtcatactgattcagtctggaccaccagccagtggggtagaggcttcttcctcttgtcctcggggaaaagatggtggacaagtctctggatgaatggttttcactgggttttagaaaatgagaccgtggggattggtttcctctcccagtacatggtagaccatcttccccagttcagcgcccctcaccagcttcgcccccacaaccccaatcccactgtcctgtctcttcacctgcaaggctgaggagttctatgtctgcatctatgccacccgagaaggggactacgtcctgttccaccacgaggggggtgtggacgtgggtgatgtggacgccaaggcccagaagctgcttgttggcgtggatgagaaactgaatcctgaggacatcaaaaaacacctgttggtccacgcccctgaagacaagaaagagttgagtgagagggacggtagggaggtggcagttcggatgagaagaccgacaggctctgggcacagactggggagagcagagcggtctcctctctgggagccaggtggtagacacggccctgtcctgaggaagacagctgggtgcagggcggggactggcttggaaccagactgaaatatgccgccagcatccctcacctccttgcccctgtctgtctgacacctctgcctccagcttctcgcctgacagctcctttccgcctcagtggctgaagagctatgtccagggagcaggggttgcagaggagatggaagggccagtggggtgcgtttagggaaatggagctgtcggtggcagtgagagattgctgcggggcgcctggggtgctgccgagctgctccctgatggatgaactgtccctctctccctcccacctctagaattctggccagttttatctccggcctcttcaatttctacgaggacttgtacttcacctacctcgagatcaatccccttggtaactgggtgtgcttggctgggagggggcaagggtcccagtgcctatgacagccctggccttggcattcagagaaccagactcccacttgccagagggtaacacaagacagatgtgcacaagcagaggggtccccatgcaggtttagtgccagttcctgtttctgagctctcagaagactgtagttcttctcttagtcaactccaacctctctctttggtcttagagacagagtcttgccctgtcgcccaggctggagtacagtggcacaatctcagctcactgcaatctccgcctcctggtctcaagcaatttttctgcctcagccttccgagtagctgggattacaggtgcccgccaccacgccaggctaattttttatttttagtagagacggggtttcaccatgttggccaaggctggtctcgaactcctgacctcaggtaatctgtccacctcggcctctcaaagtgctgagattacaggcgtgagccaccacgcccggccagaagtcctggttttgatctgactgtgtgcttctgctcctcccgccaggtcaggctttctgacagcaggaggtgggcagcctctgcactgctctcaccctttggcccttcattcctcctggtacactcagaggcctcacacttgcctccctctgtgggagttggtcaatcattaacccttgatgctgggaagagcttggtctcagtctcttgggctgtgaaggaagcaggtggtgttgagggagagtggcgtgggctggctctggccaggacttctcagggcagagtctaggaaggcgagaaatcaaatcattccagctgaggatgcagcccctctaatggaccagatggccttgtgctaactcaatcagctaaatggccctgggggaggaggaagatgggtgtccagtgaggtggtataaacgaatcctgctgattgggagtccagtgcaccctgcggcccctgctccacctgacactgaggcttcccctagccagaccctgggagacatagatgtgcataccggtggggggtcttctgtcagcaacatgtacctttaaacactttttaaaagtggccggaccatgggtttgcgcatggttagatactcaaaagcagggagtgtagcgttttgtaaagatgtttgaaaattgccatggcaactaatacagacctccatgtcccattgcctataggtcagggagaggggaatggccttgtagaatttgttttgcctttaatggggaaaagctctgtctccataagggcctctctggtttcttactgagcttagagagttctgaggcctgaatgggccaccatgggatcggtgtttgtggaggggttggaggttggtggttgtctctacccagagccggtgtctgatgattgcctctgctccccttgaagtagtgaccaaagatggagtctatgtccttgacttggcggccaaggtggacgccactgccgactacatctgcaaagtgaagtggggtgacatcgagttccctccccccttcgggcgggaggcatatccagaggtaaggctggtttagagaggagatggggactggggggagggcggtggggaggtgactcatctttgatgtgcatttggccccccttcatgagctgtttatttggcagggaaaggaagactgagaagcatttaattttcttaaaacctcaatggggtgggggtgggagtgagccaagcctctgaatcccagccagaaatccttttagatttctctctcaatcagcctccctcgactcttcacttgatttgttgcctctccatgattccaagtgtctcgccttaatcctgatggaaggtcattctctccgcgtctcactgagaattttaattgctctttcccactctgtcctctgagaagtcctcacagcaggactgggctttctgggaagtaccccaggcccagggaagaggctgggctaggagacggtctcgtctggggaggcctggggttggggggacgtgtgatgggccgagcaggcagatgctggggtgagggcatggttgagcagagggacatggttaggctcaggacttaggcagagggccaagtacttgacgtcagagaagggagatgggaagtttgtccctaggcagtgactgtgactatgggtgtttttggtacttggagacaccatcaagtgtcttcaaggcatgtggggccctgcgtagccccttcttcccaccccattaaggcaccttttcatgtgcttccagggaaagcggggaggggtcctaggatctgggacctggtaaagggggtaccccaagggcctacctgttgctgtctggtccccaggaagcctacattgcagacctcgatgccaaaagtggggcaagcctgaagctgaccttgctgaaccccaaagggaggatctggaccatggtggccgggggtggcgcctctgtcgtgtacaggtgaccgaagggggttgctgaagggatgccagcccagtctacccagcatcaacatgtgtgtagcctgggtgggtggggtcctgtcactttggtgtgggaatttggggcagaggaaagcagtggcatcccagagggcttcgagggatgttggtgagggcctgtcctgcacccagtgtcttctataaccttcttgtttgtgtcaaaatgaagctgttttatgagttttaattctgaaaattacgtgctccatacaaaggtacagaaaatgagctagaaagtgaaagttgcctggacatttccccatcctctccctgaccaggtcaccccagttagcaagttactgtatgtcctgtcaagcatatataaatatttatactctttgctttatagaatattaggatcatattctacaccctttacaataattagcagtttttttcactttaagcatggtagacacctgctcacttctagatgtgcaatctgccattcccttctgtgtgtgactggcactatttcctctggctgcagcacactttctcttgggtagcccgtcagggactcctgcagtgtgtgattttgcttgtctttgtgttagggaggtgctcattgttcattttacctgccattgtctgtccagggctccccagtgccttagggctggcagagtgcactgcccagaagagtctgatgtagcaccattaacctgcaggccagacttgcatgggaattgggggctggagatccaagaggccggttccacaggctaactccagtgttttgagggatccgtgtgtcctcccaggcaccaggctgccactccctgccccaagtgtgagagccatcactgacttctgtctccttggcagcgataccatctgtgatctagggggtgtcaacgagctggcaaactatggggagtactcaggcgcccccagcgagcagcagacctatgactatgccaagactatcctctccctcatgacccgagagaagcacccagatggtgagatacttgcacacacacatacctgtccccacttccccaggacagcccagcaggctgcaatgggacagcttcgtctgaggagtcaccaaggctgtgtgtggtcctttgcaacttgaggctaatcattgaactttggctctcagtttctctgactgcacagagggcagggaccacatctatcagtgggaggggactgagagggcaagaggtgatgtgtgataaagcccttcaaacaagtgcaggggaggaggtggctgtggcatgctcctgctacaattgcagtaaactcagtttatccgattgcgataaactctgattgcaataaactcagtgaccctcttatattacctggcctctgtgagtctcagtgcccctttaccacctgtgttttggagctctgcataccagttcttctttccttgagccagagagggagagagattccctccagagatatctagaaaccaacctggatttttggatgttggttaggagttatgtagtgctcctgtgggtttgttctgacccctgtctggtggcataggtaatggagagttgagctgataaagtggaatgtctggagagactgtcctactcactccccagtacctcctggcagatgggggaccctcattcaggggaacaagaacttcctcagttggattgctgggaagatgctcaagtctacctatgtaactgtttttgattctctcttactccaaatccaggcaagatcctcatcattggaggcagcatcgcaaacttcaccaacgtggctgccacgttcaaggtaacagttgcaacagtggtgcagtttctggggaaagtggtttggggaaagcagggaaggggccttgaaagcagagtttgagccagagccaagttaccatgagttcccaggtcaggtagggagctcttgccccagggtctcttaaaggggtggagaagacactgggacaggagctgcccatctgcgctgtgtgtctctgggcaagcagctgctacgctgaactataactctcccacctgaagcatgggaggcgaatttctgctttcttccttctcaggaccaatgctttggagcactggctcaatcgatcctttctttctttccttcccttctcttcctttcccttcccttcccttcccttcccttcccttccttcttcccttcccttccttcttcccttccttccctttccttcttccctttctttcctccctccctttccttcctccctcccctcccttcctccctcccctcccttccttcctcccctcccttccttcctttcctccctcccttcctttcctccctccctcccctcccttccttcctttcctccctccctcccctctcttcctccctcctttcctccttccctcccttcctttcttccttccatggagtttcactcttgttgttgaggctggagtgcaatggcacgatctcagctcactacagcctctgcctcctgggttcaagtgattctcctgcctcagcctcctgagtacctgggattacagacacccaccaccgtgcccggctaatttttgtatttgtagtggagcaggggtttcaccatgttggctaggctagtctcgaactgacctcaggtgatccacccgccttagcctaccaaagtgctggtattacaggtgtgaaccaccatgcccaaccgatcctccttactttcaacactctcgtgagactctgggttctctgcatctctttttttttttttttttttttttttttttttgagacagagtctcgctctgttgcccaggctggcgtgcagtggcgcaatctcggctcactgcaacctccgcctcccggattcatgccattctcctgcctcagtcctccaagtagctgggactacaggtgcccgccaccacacccggctaattttttttgtatttttagtagagacggggtttcaccatgttagccaggatggtctcgacctcctgacctcatgatctgcccgcctcggcctcccaaagagctgggattactgacttgagccactgtgcccggccatcctggtcttatatctttctgtcatgagccctttttccaaaagattggaatgaagaaagtgctttgatgatccggggctcctctcatcctactggggtcttctcaacctgggtgcctgttcacgagtcagggctgtgtgtgcacatgctttaaagcacatgtgactgctgtcaacaaggaagacagagctaacgtgtctcaagagtcatccctttcaagatagccacccaaggaggccatttattaatattccatgctgtcagatgctcagtgagtgtattcaaaagagtgtgtgccacatctggtggtggatccatgtgagttttgagaataatgactagataagtgtcaaacttgaaagtctgaggtctcaagaagtgagaggctgggcgtggtggcttataactataattctagcactttgagaggctgaggcaggcagatcacttgagctcagaagttcaagacaaggctgggcaacataatgagatctcatctctactaaaatttaaaaaaaattagtgggttgagctaggaggattgcttgagccccggaggttgaggctgcagtgagccgtgatcgtgccactgtgcttcagcctgggcgacaatgagaccctgtctcaaaacataaataaaatgtggggccagaccccatcagtcctgcccaaaacagggtgtccataactggacctgatttaacagacaaatctgggacaggggagcctcagcagcttttatttaacttctgagctgccctgtactgacccttggttagggcacttggtttggagcaggtactgtacatggaactttgtgtaaaatgccttgggtgacagaagtcagactctaggctcaaaaatctagcctctgtcttgagaaacagaactaggacacacctttccaccctctcatttttccaaagtggatatccattgtaagaactgttcttacaccgcgctgggcgcggtggctcacgcttgtaatcccagcactttgcgaggctgaggtgggtggatcacctgaggtcaggagtttgagattagcctaaccaatatggtgaagcctcatatctactaaaaataaaaaaattagccaggtgtggtggcagacatctgtagtcccagctactcgggaggatgagacaggagaatcgcttgaacccaggaggcagaggttgcagtgagccgagctcacaccactacaccccagcccgggtgacagagcgagaatttgtctcaaaagaaagaactattcccgcacatcacttaagaagcttttgtaggacattgactatgtcttagtacctctgagaacccttgcatagagcccaacatagatatccccaccaaaaacaaaaatgtagtaagaggcagtaatgactgcagaagggacaaaagagagaccagcaaggccttgctgatgatggaggcctggagcaccatgacattaagggatgtcaatcccgggtaccccacgttcccacctcagcaacattctgagtgatcatatcccaggccgtggctgcttatgcgtagtcctgtgcttcctgaggagcagcacttgtcacatatacctggtatgtttgtttatcacggttataaatcattgacttgtggctgccttgtttttagtcacatgtcactttgggcttccagggcatcgtgagagcaattcgagattaccagggccccctgaaggagcacgaagtcacaatctttgtccgaagaggtggccccaactatcaggagggcttacgggtgatgggagaagtcggtaagatgaggaccttttctctccccctcaccctgagtgtgggtggccttcctctttgggatttctgattcctgagcatcagtcttaggctcttttgctctctactccccttcctgggtgtgcagtttgggtttccattccctgtcccaacacagagtgctatcctaaactttggagtggtcaggaaagcattttcattgagctctacacttaacagatatttattaaagatcactcgctctgtgctgggctttgtgctggtgacgagggttacagccacaaatggacagacagcaagccttgatggaacggaggacacaaactgctatgtcagggggtgccgagtgccaggaaggaaaacaaagcagggaaagggagaatgcatgtgggaggggtcggggcagccttcaacagggagatcagaaaatgcttgatcaaacttgatcaaggctgggcacaggtggctcatgtactttgggaggtcgaagtgggaggatcccttgagctcaggagttcaagaccagcctgggcaacatggcgagaccctgcctctacaaaaaaaaaaatacaaaaattagccggtcatggtggtacacacctgtagtcccagctacttgggaggctgaggtgggaggatcacctgaacctgggaggttgaggctgcagtgagccgtgatcatgccactgcactccagcctgggtgacagagtgagaccctgtatcaaaaaaaaaagaagaaagaaaagaaaactgacatttgagcaaagacctagaatgagggagcagcgccatggtgactcttggagagggaagggcaaattcccataccctgcagtggtaaggggctgggactgagagagtggcagcgagacactacaggtcacaggaggacttggccatcactgtgagacagcaggcacaagaagtgttcaagcagaggaaccacatatttattattattattattttttgagacagtgccttgctttgtcacccagacttgagtgcagtggtaccatcatagctcattgcggcctccaccttgtgggctcaagtgatcctccctcctcagcctcccaagtattggggaccacgggtgtgcaccaccacacctggctaattaaaaaaaaaaaatttgttgtgagatagtgtctcactgtgttgcccaagctgatctcaaactcctggcctcaagtgatcctcttgcctttgcctcccaaagtgctaggattatagacgtgagccactacaaccagccaagtgacacaatttgacttaggtttgaattgaatagggttaattttttttcttttttttcttttttttttattttgagatggagtctcgctctgttacccaggctggagtgcagtggcgcgatctcggctcactgcaagctccgcctcccgggtccacgccattctcctgcctcggcctcccaagtagctgggactccaggcatctgccaccacacctgtctaatttttgtttgtatttttagtagagacggggtttcaccgtgttagccaggatggtctcaatctcttgacctcgtgatcagactgcctcggcctcccaaagtgctgagattataggcaatttttttttttttttttttttttttttggagacagggtctcactctgtcacccaggctggagtgcggtggtgtgatcacagctcactgcaacctctgcctcccagactcaagggatcctcccacctcaacctcctgagtagctgggactacagatacatgccacaataaatacacaatttttgtacaaaaaattagcacacacctggctaatttttttgtagacgaacttttgccatgttgcccaggctggtctcgaactcttggactcaagcgatccacctgcctaggcctcccaaagtgttgggattacaggtgtgagccttttgttttctttttaatagagctggttcaaagctgaggatctgctatgtgcagtggggcaggcctggggacagcacagtgaagttaccagatcatgctcttaaaattagaacattccacaagtaaacagtaggagaagatgctaggggtctgtctgtacaaggaggaggggagcgtggcatgggagagtgaccatcaaggtcagagggggcctttctcaggaggtagtgcttgggttgagctgggagaccagagagcagccaggtgaagctccatggagagctccacgcagagggagaagcagggccagagccctgggggaatgggctcagggtgtttaggaacagagaccaagcactggtggatgcatgcgatgagggctaaggaaagctggagagctggggtccagactgcgaacaggaggaatatgggctctgataatttggttacttgaatcttgccagtaaatatgtttcttatgtggttttttttttttggagacaagagtctcactctgtcacccaggctggagtgcagtggcgcaatctcagcttactttgcaacctctgcctcccagtttcaagggatcctcctgcctgagcctccgagtagctgggattacaggcacacgccaccacgcctggctaattttttgtgtttttagtagagacagggtttcaccacgttggccaggctggtctcaaactcctgacctcaagtgatctgcccgcctcggcctcccaaattgctgggattacaggtgtgagccactgcacctggcctgtttcttgttcttgttatcagcaagtggcctttagaaagatttgtctggtggtgaaattatgacagctgatttgtcctggatattggtcttgcactgaatgcgccaaacactgatcatggctgtaaaaggccctttgcagggtcacatggacttgggcccttatctgcagacttgaattatggatttttttttccttcccttgcagggaagaccactgggatccccatccatgtctttggcacagagactcacatgacggccattgtgggcatggccctgggccaccggcccatccccaaccagccacccacagcggcccacactgcaaacttcctcctcaacgccagcgggagcacatcggtaggttccagcctccccaaaccttacaggaaggaaccatctcatcttttccactaggatacagtcttcttcctctgttccctgggggcatagaggaaatacagcgggagttagtgcatggttggtttgtggatctctgccaatttttttcctgtcctgattaaagtagtataatggaaggacaaaggattttaaaattggatccaagttcaaattgtggccgggcatggtggctcatgcctgtaatcccagcactttgggaggccgaggctggcggatcacctgagctcaggagttcgagaccagcctggccaacatggtgaaaccgtgtctctactaaaaatacaaaagttagccagacatggtggtgcatgtctgtaatcccagctactcgggaggctcaggcatgagaatcacttgaacctgggaggcggaggttgcagtgagctgtgatggcaccattgcactccagctctgagcaacagagtgagaattcgtctcaaaagaaaagaaaagaaaagaaaaacttaaaaatcgttactcttactttttgctgagagagcaaccttagccagtaccttgtccacccagggcctcagtttgctgatctgtaacatgggataatattaattcgtatcttagaggattattagtacttttggaagcagcttataaagagcattgctgtgcataatttttattacgagttttctttggggcctttaaggaccagtggcttttttcccaggtgtgactcttacctcttacactctctccttatctcaccccagacgccagcccccagcaggacagcatctttttctgagtccagggccgatgaggtggcgcctgcaaagaaggccaagcctgccatgccacaaggtaactccctgaggcttcaggcatgttgcagggagtggccttgcggtaccctctgtatctctctcccctttccctttcccccctgggctggcagaggcagatgaacagcggtttgggttttgcaatgggagtgcacctgggacacgaggatggtatgacttgagccttccctgtgggcgctcctgaggcagaggacccacgccgtgcctggtcgcctcaactccccctattctcttctacccctggttcttcttatgggggtgtggactgggcagggaggctgtggaggagatagggttacagaaatcccaggaagtggaaagttctctgagactcttctcctgagtggagggcagacaccgggaccccaggacggcagagccagctcatacaacagcagttcccaggccacccccaccatcttggggccctaacagacattccctcctttgaatccccagcaagaaaagcccccgcctgtcagcccatctgtatttcaactaatttttctctccgtgtagatgtgattcctgccggccagcccttgcagccagctctacataagtggtgttagttacccctgggctggtatacctgtgcagcctcttcctgggacacactttgctatggcattttggaaaatagtgacactgtcccaaatcagcatccttgtccatggcacgggtcaaccccatgctggccaatcatctcatagtgtttcatggagacaaaaagggattggcattaagagggtgggactgcgccagctagagagcccagagttcaagtcatccagctgtccctgcagagggcctgggggaggcgctggtgttgagcacatctgcccagcctttgtcctcctcctgccccctctctgcccgtttggtctttgctctttcttgcttccattctgctcatcggtgctttcacctcttctgctggccttactccgttgtccattgcagaacaggagagggatgatgagggctttagccctgaaaggcttgtccatgggacccttccctgttcccaccctctccctccaaagcctccagccatcagtgggtcactcagttgccttggtcattttctttgacagattcagtcccaagtccaagatccctgcaaggtaggatgcccccaccctgcccccactccgcgtgtggctttgttagcgggtgacagttttactgtgtgctctgtttccccctcccctggtgggttgcagtgtcgtctggtctattttctgtccctgccttgatgtggcctgaccccaagtcctaagtcttcgctcttcctcccctcctatccgtgctcagtacgcgccccactcagtcctctcctcactgtgtggctgtttctggctccaagcttgggaaggggtagagattttggaaggagcaagagccagacccacagccctggagagtgtagtggtgtcaaggagagagtgtcgcctgggaaggagggagccatccaactaaatggggagtggcagagagtcgtgggcgtctgtcactgctggggtgcagaaggggagccacaagtcacccctgcttctcatttacatctcctgatgtcattttcccacctttcctgcctcggcttcaccactgccagcttcatcctcaagctccagggaccagtttatctttttctggggttgtggtggaggaacaaaagaggtgaagaaggaggtagacggaagcgcagaagggtgtgcagcggatctagtgactgggtaattggaaggggtatgagctttgtctggtgtatgaggtcacattttacagtggatacttctgtgcatgcgcattcacccaccagcctagctgagtagattaattggttcatggcatcagagcgtccatttaactttgacattcacagccgtggaggcggggaagtctttgttgtccccttgctaaggggaggggaaggagtaattggcagggtcgataaccagctggaaaggcctggaatgcagcactgtggccacctggctttaatcctgatgtttttgcctctggaaaaagttaagagcagagtgagcccagtgtggaaagaacagggaccagccctggttctccaggagctctctgtgctctgaaggggaggagggttatgaggaggggggttatccttgttactttctggagtgagagaaataaaaggagggtgtgtcagggagaacagattatggctgagcgagccctcccctcagcgaggccagaggaggcctggtgtagggggcatagcccctggcacagaggttctctctggagcctctctgctgctggtgggctgaggatacacccttcagctttggtttctctgtgcttgaggaagggccactttacctccacccttcctgctggagatgctggtaggttggtagattccaggctttgtcttgatttctgtagctggcagggtagatagatcagaggcatgtgcacgtgcgtcacctggcgggggtgacatgatgcaggcttcccctgaggatggcgggtcatgaactcacacttatattctccctcctcactttcacagttgagctgcattttaagtgattgtgtaatcctggctctgatgctggatgacctcggacctcaatcatttggcatctctgggcttcagtttcctaggactgggaagtgggagaactggattaggtggctccccttgttctgtgatctcatgtctcagcagaacccggggggtctaggtgacagtaaatcccaggtatttgcaacatcaggaaccttctgtcatgagaagctgtaaggctgtgatggaagaggcaggcctgtacagggatttaatgagaccatgaacttggttagccaagcctgctctagtacagtaggttaattaatacgagatgccactgggctagatgcatcattcttcctaggggagctcagaacctccctgagggctgctttcctcctcttggacttgcagggacccagaggggaaagtcaactgcctgaagcgtggtaaaagtcctttccctttaggctaaggactgcacttttttctttttttttttaaatatacttgctgcattaaaattttctttttaaaatttttgtgggtacatagtaggggtgcatgagatattttggtacaggcgtgcaatgcgtaataatcgcatcatggaaggtttttctttgttgtttttttttttgaggtggggtctcactatgccgcggtggctggtttcgaattcctgggctcaagtgatcctcccatctcagtctcctaagtagctaggactcaagcacgcaccactatgcccacctagagaactgcacttctaccagctccttttgttcccttaccctttttttttttttttttttttttgagacagggtctcactctgtggcccaagctggagtgcagtggtgcgatcttggctcgccgcaacctctgcctccttggttcaagtgattgtgtgttggtttcccaagaagctgggattacaggtgcatgccaccacgctaatttttttttttttttttttgagatggagtcccgctctgtcacctgggctggagtgcactggcacgatctcggctcactgcaacctctgcctcccgggttcgagcgattctccctgcctcagcctcctgagtagctgggattacaggtgtccaccccaccacacccagctaattgttgtatttttattagagacagcgtttcaccgcgttggccaggctggtcttgaactcttgagctcaagtgatccactggtctcagcctcccaaagtgctgggattacaggcgtgagccaccacacctgacctgcgccttacctcttaagtgcccactggagggtctgtccaagagcactgtcctgagcaggaaagagccacctggtagaagggagaaggacaggaaaaacaggagagcaggttgagggcactggccctgtgtaactagcttgctgctcctgccttgtgcagagccctggccagaaccacagttagcgataaggctgctgtgtcctcagccccggctgcacaaacctcttctttggacctacactgacctagaattcatgctgattcaaaccctgactggagctggttttatgtccagatttacagggtaataagcattgttggaacataagtcctgaacccaccaaaattgggcgagctaagcatttttttccaatgactttaaaaataatttgttaagacctcatttgcatataagctgatgacacaccttgcctgggaaatgaagcaggtcctataggaattatcctgggcatctttgactgtggggcccttctttctccattctttgcagagctacttaccagctagcaggccctcttagcttgatttgctctttctgccaccttcttccagaaaaatcgaggcacctcctccccaagttctcagaattctgtcctcttgacattcctttacggttgtgatgaggcatcaccctgtggacatggggcgtggaggggtctgtcaggcagccctggcccctgcaggtctcctgggggtatgtgttctgggtgcactctctgtgtctttgcccaccaggaaagagcaccaccctcttcagccgccacaccaaggccattgtgtggggcatgcagacccgggccgtgcaaggcatgctggactttgactatgtctgctcccgagacgagccctcagtggctgccatggtctaccctttcacgtgagttaccccatggcgggaaatatctccttcctctgctaagacaaagcttggggctgggcacagtggctcatgcctgtaatcctagcgctttgggaggtcgaggtgggagaactgcttgagcccaggagtttgagaccagccctgggcaacatagggagacccccatctctacagataatttaaaaattagccggatatggtggtgtgcacctgtagtcccagctacttgggagggtgaggcaggaggattgcctgagccttggaggttgaggctgcagtgaactctaattatgccactgcactccagcccgggtgacagagcaagaacctgtctcaaaagaaaaaaaaaaggcaaggcttgaggagtcagtgagctcattccctttgctggggaaggctttgcccatcctagagacagaggcagtcagtattcctgggggatctttgtcccttagatgaaaattctttgagggcacagaccatgccttttctatcttctaggtgaaattcctcccctcagcttccccttccccagtcctgacaggttgaggatatcctaattcttcttttactttctcacagtggggaccacaagcagaagttttactgggggcacaaagagatcctgatccctgtcttcaagaacatggctgatgccatgaggaagcatccggaggtagatgtgctcatcaactttgcctctctccgctctgcctatgacagcaccatggagaccatgaactatgcccaggtagatcactgggctctggagggtggggggtggggaccatgaactatgcgcaggtagatcactgggctctaggggacagagggtggggaagcaggaatggctcctggttgatgtcccgtcactgctgcctgggacaaagggctggggatttgggagtagccagtggtttaggtggaaatggttggagacacatgatcttcagaagtcaggatagtgacttagggcaggtcagtctgggcagaggctgcttatctgggcttacaaagaggctgctcaggcctgggacagtgacttatgcctgtaatcctaggactttggaaggcagaggcaggaagattgcttgaagccaagagttcaagaccagcctaagcaataaagcgagacccattctctacaaaaagcttaaaaattagtcaagccaggcatggtgactcacacctgtagtcccagctactcaggaagctgaggcaggaggatcaattgatcacccaggagttcaaggctgcagttagctatgatcattccatggcactccagcgtgggtggcagagcaagaccctgtctttaaaaaattaaataaagtaaaataaaatatacgctgggcatggtggcttatgcctgttattccagcactttgggaggtcaaggcaagaagattgcttgagcccaggagtttgagaccaacaaagcaagaccctgtccctataaaaaaattaaaaaaaaaaaagaattagctggacatggtggcatgtgctggctgaggtaggatgatcacttgagcctgggaggtcaaggctacagtgagttgtgatcacaccactgcacttcagcctaggcagcagagtgagactctaaataaataaataaataaatgttaaataaataaatgaggtggctcaggctccaccccacccccactatatcctctctgtgctatgcataactggcttgaaaactgggattggctggatgccatggcttgtgtttgttgggcggcagaggcgggggtattgtttgaggctaggggttcgagaccaacttgaacaacacagcaagaccttgtctgtacttaaaaaaggattagccaggcatgatggcactcactagtcccagctagtagggaggctaaggtaggaggatcgcttaagctcaggaggttgaggttgcagtgtgctgttatcatgccattgcactccagcctgggcagcagagtaagtcccagatcctgtctcaaaaacaaacaaaaaaacaaatcaggattaaagcactttattttatgtatgtttgtatttatttattttttttttttgagacagggcctcactctgtcacacagcctccacttcccaggctcaagtgattctcgtgcctcagccttctgagtagctgggattacaagcacatgccaccacacctggcttttttttttttttttttttttgtacagatggggtttcaccatgttggccagactggtctcgaactcctggccttaagtgatccactcaccttggcctcccaaagtgctgggattacaggagtgagccactgcacctggcctattttaattaaaaaaaattttttttttttgagacagagtttcactctttttgcccaggctggagtgcaatggtgcaatctcggctcaccgcaacctccgcctcccgggttcaagtgattcttctgcctcagcctcccaagtagctgggattacaggcgcctgccaccatgcccggctaattttttttttgtatttttagtagagacggagtttcaccatgttggccagggtggtctcgatctctcgacctcgtgatccgcccgcctcggcctcccaaagtgctgggattacaggcgtgagccaccgcgcccggcaaattttttttttttttttcaatcggtcagcttcccaagccagaggaggctcagaaagactccaacatttcattataaaaatattacatatttattatagaacagtttcaaaatactgataaatactgttttgttgaaaataaatacttgaggtcccatttcagaaaaacatgactgctgctatgacggtatgtccttatctacccccttttctagatttgagcaaagggaataatactgtatgccactcatataatctgctttcttcagttgctctttccacatcagtaagcactaactggcagcatcacttttgcttttgcaaatcttgtgatgggcaatctcggattaacatttgcctatatccttaattattccctaagcataaatttctagaagttgaactactgcatcagaaggtgcaggtttgaggctgggtgcggtgactcacatctggaatcccaggactttgggaggccaaggtgggtggatcatttgaggtcaggagttcgagaccagcctggccaccgcctctactaaaaataaaaaaaatagctgggtatggtggcagacacctgtagtgccagctacttgggaggctgaggcaagagaatcacttgaatccgggaggtggaagttgcagtgagccaaggtcgtgctattgtactccagcctgggcgacgagagactccatctcaaaaaaaataaaattaggatattgattattttgttgaaaattatcatctgatcccagactggcttatttcagtttatgactggagaatataaaattgtcttgatacctagaggaagtgaaaaaatacatttgctgaaaatgagctacttcttttttttttttttttttttttttttttttttgtgaaatggagcctttctccatcacccaagctagagtgagtacagcggcgtgatctcagttcactgcaacctccacctcccgggttcaagcaattctcctgtctcagcctcccgagtagctgggactacaggcgcctgccaccacgcccagctaatttttgtattttcaatagagatgggattttacctttttgatcaggctggtcttgaactccaggcctcaggtgatccaaccgcctcggcctcccaaagtgctgatattacaggcgtgagccaccacgtccggctgctgcttctttagtttagggcagaggttggcaaactatggcccaaggcaaaacctagcacatcacctagttttagggctgttttttgtttgtttgtttgtttttgttttttgttttttgagacagagttttgctctcattgcccaggctgtagtgcagttgtgtgatctcggctcaccgcaacctctgccttccaggttcaagtgattctcctgcctcagcctcccaagtagctgggattacaggcatgcatcactatgcctggctaattttgtatttttaggagagatgggttttctccatgttggtcaggctggtctcaaactcccaatctcaaatgatctgcccaccttggccttgcagattgctgggattatagatgtgagccaccgcgcacagccaggggtttttgtttggttttaaagagacacacatactgctctgtagcccaggctggagtgcagtgatgcaatcatgcaactcactgtagcctcaacctcctgggttcaattgatcctcctaccgggtctccctgtgttgcccaggctggccttgaactcttgggctcaagggatccacctgccttagactcccaaagtgctgggattacaggcatgagccactctacctggcccctacaatactatcttgaccctttacagaagtttgctggccctggtttagagccaaagagaagtgattcctggatctgtcccatgcccctcccaccccgcctctgggctgagtgtagaagcagctcatttctcttaaacgctgaccctgtcctgtggggatggtgacaagactcggagggtcccatgaagaaaagccttagatagctgctttatgagcaggcacaggaacaggtagacaacaggagggtgtgagcttttgggtgagagtgaacgtagctgctatgactgtagcagggcttccgaaatacctgcctctcttgggtggatcactgtggtgttagctagtggagatcagtttcggctatccaccacttgtgttttcaggagatggttagagtgattacgagcagaggcctgtgggaagaatgagatgcatattggttttgttttttcgttttgttttgtttttgtttttgagatggagtctcgctctgtcacccaggctggagtgcagtggtgccgtctcagctcactgcaacctccacctcccgggctcaagcagttctcctgcctcagcctccctagtagctgggattataggcgcgcaccaccatacccagctaatttttgtatttttagtagagacggggttttgctacgttggccaggctggtctcgaactcctgaccttagaagatccaccctcctcggcctcccaaagtgctgggattacaagcatgagccaccgcgcccggctgatatgcatattgttaacattactttgttcttggaccctggaagaggacatgtggaatgggaggtgggcccttaaacggtgctgtcttgttgccctttctgaggcagagagttaacaggaagggacttttgtcatcctctagatccggaccatcgccatcatagctgaaggcatccctgaggccctcacgagaaagctgatcaagaaggcggaccagaagggagtgaccatcatcggacctgccactgtgagcttcccctccggaaagccttttacgttcgatgctatcttatgaagttcaatgcccttaggaagtttactttttgactcctctatctccctcctaggttgagaagattcaggaagtatgtgttgaaaatcagtctgtccatttttagctttttttttgagacacagcctcactgcaatgcctaggctggagtgcaatggcgcgatcctggctcactgcaacctccgcttccgggttcaagtgattctcctgtctcagcctcccaagtagctgggattacaggcacccgccaccatgtccggctaatttttgtgtttttagtcgagacgggatttcaccatgttggtcaggctggtctcgaactcctgacatcgggtgatccacccacctcggcctcccaaagtgctggagttacaggtgtgagccaccgtgtttggcctttttttttttttttttttttttttttttctttgagacggagtcttgccctgttacctaggctggagtgcagtggcacgatcttggctcactgcagcctctgcctccttggttcaagcaattctcctgcctcagcctcccgaggagctgggactataggtgtgaaccaccacgcctggctaattttggtatttttagtagagacagggtttcaccatgttagccaggctggtctcaaactcccaacctcaggtagtctgccccctacagcctccaaaagtgttgggattgcaggcgtgagccaccatgcctggctgaaattattctttgaattattttttgtttgtttttttaagaagcagggtcttgctgtgttgctggagtgcagtggcttttcacaggtgcagttataacacacttcagcagccccgaactcctaagctcaagcaatctccctgcctcagcctcctgagtagctgggattccagaagtgttctccacacctggcttatttttacttcttactgtattaaaaaaatggagctagtatttatttccaaagagctgagattacagacctgagccactgtgccgggccaagtatacgtatctgaacctgaattagtgagccatgctttacaaataaggctctcttttgttctgtatgtctcttgagagagagaggagactttcctaagcaggaaacccagtgggcaagtgtgatttctcttggtcattctctccccagcctggccagaaggggctgggcagtaatgcaggggctttgtgattctttgtggtgaatctggaagtcaccttcctccctgattgtggtttctgcccccacaggttggaggcatcaagcctgggtgctttaag

SEQ ID NO: 203 - DNA, 8530 bp, Homo sapiens
  source 1..8530: mol_type = other DNA
cagaagcgttccgtgcgtgcaagtgctgcgaaccacgtgggtcccgggcgcgtttcgggtgctggcggctgcagccggagttcaaacctaagcagctggaagggtaagaggtgttcgggatcctgagaggaaaaagaaaggagtgtagtcgcgggagtgggttaggtgaggagttagtgaagagatgagttcagctctaagaggcggcgaggaggatcggatgggaggaggggcagggagcgcctgtggacaagtgcagaccggtcggcgcacgtcccacgccacgtggactcgcctttgtcggtggccgcctttctcgtcaggccgcgacgacagggctgtgccttatttgtgtctgtcgagagcagtgccgggcacggagttggcgctctgtaagtgcttgctgaataaatgacgggtgtgtgtgtcattcattcagcaagcactgagtgcttactgttgtgtcaccgggaccgatgtggagggacatttttagggtgtatttctggcgctttagtcctgttttctcctggacaatttatgcttgccccgcaccccatcgtgcgattctccgcagtctttgggctttgtctctctctctttttttttttttggaagttgcagaatggtgataaatgattttctttgctcctattgactgctaggccctgtggctaggtaccatagagtctctacacaggactaagtcagcctggtgtgcaggggaggcagacacacaaacagaaaattggactacagtgctaagatgctgtaagaagaggttaactaaaggacaggaagatggggccaagagatggtgctactgtctactttagggatcgtctttcaaggcgaggggcctcctatctcaagctgtgatacagggtaggtcatgagcgcagtcttctgtaaaatgagggatctggacggaatagttactctctaggcttcctttcagtatgatgtcccgtatcagatattcctaatgtctgtagttctcccacaccccaccgtttattggctagtcaaaatattctttgcattgtaaagtgtagcataacattacaagaatggattaatgggttgggaatgctgggttttggccttcattctggtgctgtggtcctgtttcctcatttgtaaaatgaagggggttgtaaagatatattctctaaaacccctaatgctatggctgtggcattaagtcaaactattatttcttactgctttgtaccggacatcactttcacattagtaaaacttttcatcagtgtagtttctcccaagcttgattattgagaaagatagtgccttgtttttaacatcctgtatcctagttccaccgcagtgtttggtacacagtagatgtttaaaagaagcttattaaatcaaatggtggccaggctcatggggctcacgcctttaatcccagcactttgggaggctgaggtgggcagattacttgaggtcaggagttggagaccagcctggccaacatggtgaaaccccatctctagtaaaaaaaaatacagaaattagctgggtgtggtggcacgcacctgtagtcccagctatttaggaggttgaggtaggagaattgcttgcctgggaagtggaggttgcagtgagccaaggtcgcaccactgcactccatcctgggcgaaagagcaagactccataccaaaaaaaaaaaaaaaaatcaaatggggctgggtgtggtggctcatggccataatcccagcactttggtaggctgaggtgggcagatcacttgaggacaagagttcgagaccagcgtgggcaacatagcgaaaccccatctctaaaaaaaccccacaaaaaccaaaacaaatgaaaataaaataaatcaaatgggatagaaattatagtccttgcttttggatcctttcccacattgacatattagttcatagatcaggggactggggaggaattgggtttttaccagagggagacctggagctgacctgacagatttaaaccagctttatgggataatccgcttgagacggatgacgctgtaggcaagtgattcactgctgtttcattcctctacctgcctatccccagaaccatggccaactgtgagcgtaccttcattgcgatcaaaccagatggggtccagcggggtcttgtgggagagattatcaagcgttttgagcagaaaggattccgccttgttggtctgaaattcatgcaagtaagtggacttcattgttcccattttgattccttcatagtataggagaacactgtgattaacctgtttctccccgtctttcttatttaaagttctccacggtagagtgaacacaagtgtcttgagacctggaaactcctcagtgccctagcgtttggctacatcttggaacaaaccaagttatttaggattttccaaaatagtctctgtaataggaggtgcattgctacgggaaaagcagtgcagagttccacatatgactgcatctctgtaatttctgactgagagctgagcatgtttgagttcttggtcttgagcttcctgagcagataattttagagagatttttttccccctttgagacaggttgttttttagcaagaaagtctttccatcatcaattactagacactaataaatgcttattgtttagcatatattaggtatcataggagctggtggaggaaaactatggttttggttttggggaggttcttcagaaacagcagagagcagatgtacctgcaagctacttacaaagcaatcttttgataaatgcaaaggattgattgaccaataacccttcttcaaacaaattctagagataatccaaattctcggctgggtgaggcatagtggctcatacctgtaatcccagcactttgggaagccaaggcaggctggtcacttgaggtcaggagttcaagaccagcctggccaacattgtgaaaccccgtctctactaaaaatacaaaaattagctgggcatcagggtgggtgcctgtaatcccagctattcggcaggctgagacataagaattgcttgaaccagccaggtgcggtggctcatacctgtaatcctagcattttgggaggctgaggcgggcggatcacctgaggtcaggagttcgagacagcctgaccaatatgatgaaaccccgtctctactaaaaatacaaaaattagccaggcgtggtggcatgcgcctgtaatcccagctactcgggaggctgagacaggagaatcgcttgaactggggaggtggaggttgcagtgaccgagatcgcatcattgcactccagcctgtgcaacaagagcaaaactccatctccaaaaaaaaaaaaaaaaaagaattgcttttgaacccaggaggcggaggtttcagtgagccgatattgcaccacactgcagcctgggcaacagagggagggagactctgtctcaaaaaaaaaaaaagaattccaattctcaaatcaaataggggatagtatgttttctaaaagggaatcaattttggacccttctagtgcattttaaaatttagtttgacttgcaatttacttcctatgtgatattttagaaaaactgctttagggctggcacagtgactcgcctgtcatcccagcactttgggaggctccgtctccaaaaaaaaagaaaaaaaagaaaagaaaaactgctttaatgtaaaagagggtagactgatgttcatgctgagaggagaatatggtgtccaaggtcaaggagctggcatctaatgaaggttttcttgctgtatcatcccatgacagaatggaatagcaagagagtgcaagagtgagagagagcaagagggggctgatgttgattttataacaaacccactcctgagataagacattaatctgttcatgagggtgaagccctcatgacctaaacacctcccattaggcctcacctcccaacattgttgcatcgaggattaaatttccaacatacgaactttgggggacacattcagatcacagcagaaggtaacatgagatggatgtgttgttgatcaggcatttaccatatgctgggcacatatgttttctgatttagtcttcatgccagccttgagaagtacttactcctgttctcgtggttgttagtgatgagcaacctaaggcttggagaggttcagtgatgtgcctgatagcatacagtgatgccactggaattttaacttgagtctctctgacccctgagtgcagatactttctcctttacattgaatttcctattaaggatatatgggtttggtgaagaatggacggaaggatagctgccatgactctaaaggggcatttaaatctggtgtggaggcaggaagcaagggagaacttgaggttcccaacccccaagcccttaaaaaaagcccgtgatctgttttgcagactaaagataatcagttagggcctggcgtggtggctcacacctgtaatcccagcattttgggaggtcaaggtgggtggatcatctgaggtcaggagatggagaccagcctggccaacgtggtgaaaccccgtctctactaaaaatacaaaatttagctgggtgtgatggcgcatgcctgtagtcccagctaccagggaggctgaggcgagaggatggcttgaactcgggaggtggaggttgcagtgagcggagatcgagccactgcactccagcctgggtaacagagcaagaccctgtctcaaaaaaagataattagccgggtgtagtggtgcacacctgtagtcctagctactgagaatctgaggcaagaggattgcttgagcctgggagtttgaggccgcagtgagctatgatcatgccattgcactccagcctgggtgacagaaagaccctgtctcaaaacaaacaacaaaaccaacaaaaagataattggaaccaattaatagaattaaaaaagtattctgataagggaaggtcacctcagggtctgttagacttccacaacaaaagtcttccatttggataggaaaggacagggcgagggttggatccctaccacggagtgattatatggccatgtaattttactttggcaagtgatgataactggtggctgaatgatggggcttctgggcagccagtctccacatctgtgtgtgtctctgatgtgtgtgatatgcgtcatacagtgcagtaccacagagctggaaaaaccatgggaccctgttagattttaacaagcgtatatgcagtacaagagagaacacagccaaactgagttgaaactgctaagcagatggtttgttctctagctaacttgattcgttcccacatattagccttgcagtatgagaggttctaattcatttttcagcaaaattatttattactagatgtcatgcacttttgggtgatttgcagatacctttggtaatcacatggtcatcactgctgggcttttatcctctgaataaacgtgaagcatccctgggtaatggcctggtttagtttgctgctcattaaatgccaagacttgcttcctggtgtccttctaacattttatttggggtttgctctgggaatggaaatttattgtattgttgattttcctgtctaaaatgagatagttgagggccaggcatggtgggtcacgcctgtaagcccagcactttgggaggcggaggctggaggatcacttgagtccaggagtttgagaccagcctgggcaacatagtgagaccctatctctacaaataattttttaaaattagccaggtatggctgggcgcggtggcttacgcccgtagtcccggccctttgggaggccaaggcaggcagatcacctgcggtcacctgagaccagcctggccaacatggcgaaaccctgtttctactaaaaatacaaaaattggccaggcatgatggccgccacctgtaatcccagctacttgggaggctgaggcaggagaatcacttgaacccaggaggtggaggttgcagtaagtcaggatcacgccactgcactccagcctgggtgacagagggagactctgtctcaaaataaataaataaataaataaaattagccaagtctggtagtgtgtgtctacagtcctacctactcgggagtctgaggcaggaggatcacttgagcccaggagtttgatttttttttaaatgagatagctggatttaattttaatgttctgtggttttattatcagtcagtgccaatagggagacaactgatataaaattggagaagtacatttagtcctgtcactgctcccttccagtgtggagaatgaattgggttataacagaatcagtgagcccaaccgctcatgttttacatagcagggtggatgaggggaaattaaatggattatatgtccttagatggtttgggggttattctcattctctgtcctgttgaataggcttccgaagatcttctcaaggaacactacgttgacctgaaggaccgtccattctttgccggcctggtgaaatacatgcactcagggccggtagttgccatggtgagtgtgcctgtgtgggatactccaagtatgcattgcttgtcatctgtgctaggctctcttctagacactggggatacagccatgaatgagaccaaatagatacctgttttcatataccagctaatggttagtgataggcttcagaaatgaaatatgcccagaaatgaataggagtagcaaatgatcactttagattgggtgatcaaagaacgcaatttttaagctgtgatctgaatgacaagaagcagcgatctgaatgacaagaagcagccagccatgtacagaatcacagtgaaaaacatttccagccaagcaaacagcatgtgcaaaggtcccagggtgggaatgagcttggctttttgaagtacgggaggagagttgaaatgcccgaagcctgatgggtgggagggaagttgggaggtgaagagttcagaggcatgggcaggggccttctctcttaggggtgtgttgaccatatacttcctgagtgctgggaagctatgggacacttcacacttggcatttctttttttttttttttttgagacggagtcttgctctgttgcccaggctggagtgcagtggtgccatctcgtctcaccgcaagctccacctcccgggttcacgccattctcctgccttagcctcctgagtagctgggactacaggcgcccgccaccacgcccagctaatcttttcgtatttttagtagagacagggtttcaccatgttagccaggatggtctcgatctcctgacctcgtgatccactcccctcagcctcccaaagggctgggattacaggcgtgagccactgcgccctgcccacacttggcattttaaggaggctgctctggttgctgtatggagaatacattgtagaaaggcaagcatgagggcagggagatcaggatcctcagtgctggaataagtggatatactctataaacatttgttcagtgaatgaatataatcttaaggggcctttttatttttccttttttgaattaatagttgccagattttctgctgtgattggttttcttctttgaccatatcttcttctgtccttggaggtctgggaggggctgaatgtggtgaagacgggccgagtcatgctcggggagaccaaccctgcagactccaagcctgggaccatccgtggagacttctgcatacaagttggcaggtgagattttggtatttttcccccttttccaaaatctgatttagttgccacaaggatttgggtttccgaggctggaggtagacatgataccatatgcaggttgattttatcggagtttattgttttcctccctcttaagttggcgtttggctttggttgttaacatcacttagtcgtacctctgttacacgaagtgtagaacctggtacaacacactttgctggccagtctttcctgaaggctctcactgtttgcaccagcgtggccgggagggctggatgtggggagggcatttttcagccttaagtgaatggccattgtaggctttttcttttaacatggtctaatgtccatggagcttcagcttttatgctgctgtggctgtagatttctggcaatgggcgcattttaatccttctggtcttggtcatgtgactatctctttctccacccaggaacattatacatggcagtgattctgtggagagtgcagagaaggagatcggcttgtggtttcaccctgaggaactggtagattacacgagctgtgctcagaactggatctatgaatgacaggagggcagaccacattgcttttcacatccatttcccctccttcccatgggcagaggaccaggctgtaggaaatctagttatttacaggaacttcatcataatttggagggaagctcttggagctgtgagttctccctgtacagtgttaccatccccgaccatctgattaaaatgcttcctcccagcataggattcattgagttggttacttcatattgttgcattgcttttttttccttct

SEQ ID NO: 204 - DNA, 14169 bp, Homo sapiens
  source 1..14169: mol_type = other DNA
agtgtggcatggtggaaaaggtagagggcgaagactcaggccacctggtccccgtcatcatttctgcatctatctgtctatatgaagtgggctgatggctgtgccagtttcctcatttgcacagcgcacgaggtcccgctttcggtgagcttttatcgcatacatggtaagcggtgatcggtaggaccccggagccctcttgggcgttcggcttgggctgcacttgcactgtgtggccaactgcgaccgtggcgccgtgacgggaacggcgggttgcgcgcgcagcacctccgtcgcctcccgatccagcgtctccgttgccaggaaaacagagcggcgcgctttccggcgcagtcgcggcgcgtcgcagctgtcatggcggagaccgtctggagcactgacaccggggaggcagtgtatcgctcccgggaccccgtgcgcaacttgcgcctccggtagtcgcaccgccccagccccgaggccccatgcttttgtgtccttagatcattccaacctgagctcggtgttctgaggtccccactttctgcttacaatcccgaccacttctccgggctccccacttctttcactatccgtacccccatccactcacagcctctaagaaccccttacagacctacccaagtccattcacgtctttgttgctcccagtttctcaaagccctgtgcccccagtacaccctctccccttcattcttccccataggacggcgcacccacccacctcctctccgttgtctgcacccagcacaccttggcaaccctacctcctctgttttgtttcccccatccttgctttgtgttcatctcctggttgcgtgtctggtaacgaatattttgggcttttcttgacagagtccacctgcaaagaatcacatcaagcaactttcttcattatcagcctgctgccgagctcgggaaggacctcatagacttggccacttttaggcctcagccaactgccagtgggtgttacggtggtgatgtgccatctaatactaattatgatactaatcagaattgtggccaaatgtagtgagataacaaatactatacttctgatatgttatagagttgcccggcaacctacattctatttgtggctttttttttttttttttttttttttttttttttgagacggagtcttgctctttcccccaggctgaagtgcagtgtcgctatctccgctcactgcaagctccgcctcccgggttcacgcgattctcctgcctcagcctcccgagtagctgggactacaggcgcccgccaccacgcccggctaattttttgtattttcagtagaggcggggtttcaccgtgttagccaggattgtctcgatctcctgacctcgtgatccgcccgccttggcctcccaaagtgctgggattacaggcgtgagccaccgcgcccgtcctatttgtggcatttttaaaagagaaaacgtgccccaaaccctaaatacacatataaacacttttaaaaacaatttttaaactggagactgcttgcaaaatctgcatatgatgtgcatgtatagatcaactgtgttcttgtggttttccttatctgggaaaccaaaagaatgaggaggagaggacagagtggttgttgtcaggtcactagtctgtttgcttttattgtttctctttctgttcagagctgttcctgggcaagagtgtgggctcacaggttgtgaaacgtgtctctgaaaaaggcatacccaagagtgtattagattagatttgttttctttgtttttgttttcgttttgttttgagacagaatctcattcttctgctcaggctggagtgcagtggtatgatcatagctcactgtaaaccttggtctcccaggctcaagccatcctcctgcctcagcctcccaactagctgggactacagactcacactcagtttatttttttttaaagttttagtagagaaaaggtcttgctatgttgtccaggctggtttcaaattcctgggcccaagtgatcctcccaccttagcctcccaaaatgttgggattacaggcgtgagtcactgcattcagccagatttggttctgttaaaaaatcatttatttgccttcactgtcctctccttacacttggtctcctaaatttcagtgtttgtgattctacatatatggctttagaaatagtaaagataaaaatgccagggttattttctagcaaatgcagacagttgggactgaggaagggctggctattcagcttatatctaaatttcagtttcttatatccagttagattagatatttcctggagcgggctgagcgccgtggcccacgcctgtaatcccagcactttgggagaccaaggcaggtggatcacctgaggtcgggaattcaagatcagcctggctaacatggcaaaactccatctctactgataatacaaaaattagctgggttggtggtgtgtgcctgtaatcccagctacttgggaggctgaggcaggagaatcgcttgaacccaggaagaggaggttgcagtgagctgaaacagtgccactgcactccagcttgggtgacagagtgagactccatcccccccagaaaaaaattcctggggggtattttcttttattcaaattagagtcatgactaagacttcctgggttctaatcttggcttctactcatactaactctcatatacagcctctctagcatttctctaggttgagtgcttactaaattgctgaattccagctagtttttgtggcaaatataagaatagggactttggttataataaaccacagaacaagaagtggtgctggtttggctcaagcatttgattcactctgttgtctttggaggtggacaccgcccagaggaagacgaagaggaggagattgtgattgggtggcaggagaagctctttagccaggtgagccagtgtctcttgtcttctctgtctattccatctggtctacctccacatggctggtgatacatattgccaaagtgatttccagacaggttgtaacagtttatactttcccctgttgtgtttaaagggcattgtaacatagggattgccactactcagttttgtgattctgggtgaggaacttttcatctctgggctatatgccatctgtaatagcagacttggattagactatcagtctggttccttttagctctaatgttcttggttcccctgccattcattagtttagtgttggttatgaaaacatgtcagatagcatcagttctgtagaactgatttgattaaacagttacagaagcaaaagtttgatgtattataatgatgtacacatctctgtttccttatggtaacctcagtttgaagtagatctgtaccaaaatgaaacagcctgtcagagtcctttggattatcagtaccgtcaggagatcctgaagctggagaattcgggtggcaagaaaaaccgacgaatctttacctacactgactctgatagatacaccaatttggaggaggtattgttctttctagggtctcatagcttccatctttgcttcctctagcttttttgcctcactgagttctgtgtgttatgtcagagcctagtaaggggagacaagtagcctgtctaggaactgctgtgagctgctgctgctggcagccagcctggaatagaatgggcacagtctacaggtggtgaggctgctgctcccttctctgcctgctagagggcctgggggagctgccagtatctctgattatatgcttgcagagtgcatactgggagaagtaaccactgggcttgacttcctccatgcatcatgaaaaaagacaggtagtggagtctggaacaatatagataaaattcatcaggggattcagcccaaactctgagtatatgggtttgaagaggaattcagtatagctatggaaaatggcttatgtcctcaatttgcctatgacaaaaatacccttgtgaccttgttttacattttcttcagtcactgcatttcagttgcttctgtcttctcagtaagattttaagctcctcgagggtagagcctattttttttatttttgtctatgactctgtaggtctctgcaaggaacaggtattcaataaatgtttttgaaagattgacgtgctttcattattagagctgtggattgataacattagctgggcatggtggcatgtacctgtagtcccggctacgtgggaagctgaggcgggaggatcacttgagccaaggagttcaaggttgcagtgagctatgatagcaccactgcactgcagcctgggtgagaccctgtctcttaaaaaaatatataaattaaataaaatttgggttgtctgttttggaaaagcaaatgaaaatgcagttagtgctcagttaccatgtgaggatttcccacaaaatgcttgtatcccatttggcattttctaaccaccttgttaacttcaacatctaccaagcacactaacccaactttttgttggtttgtgctcagagaatgcagactgattttaatattaacataaataactcctttttaaaatccaaaggcaaaccatgatgtggtagaaatcttctttgggttgtttggctactgctccctccgttagcatgtataattgtgaggtggcggaacctgtggggttcaggtcctggatgaggtttcaggaggaagacttcccttcaggtacttggctccatgtggccctgaccagatggcgtacacagggctgcttgcttttcccagcactgtcagagaatgaccactgcagccagcgaggtgccttcattcttggtcgagcgaatggcaaatgtcaggcgtcgccggcaggacaggcgagggatgtgagtgcgggcatgggatgggggacaagcttttactttttatttcctaaagttgggtagttttgcatttttatcagtggttatatatagtattcaagtattactttgtaattaatttaaaaaataaatataaaaatataaaatatcttcctcactcttcatgtggacatttttccaaagtgcctcagagagagggaagggatgtcatttctgtttgtcaaatattttggctcttaaaaaacaaaacaaaacagtatgtccactagctcaaacttcccattctgaagtggctctccactggggtgctccattggggtgtgccagggaagtgacctttctgtggtgtctcccagggagggcggcatcctcaagtcacgcatcgtcacctgggagccctcagaagagtttgtcaggaacaaccacgtcattaacacccctcttcagacaatgcacatcatggcagacctggggccctataaaaagtgagtggcgcttctcactgccagcttagagcctcatccttttctcctctcaccagctctccccttcctgttattatcatcctaggttataggggagggagggactttttcttccttctcttcttagttatgagtgaagcttctcactgccaactcagatcctcatcttcttctcctctcaccagctatccccttcctgttatcatcctgggttataggagaggaagggactttttcttccttttttttcttagttgtacttggaagaaagttttaccatgacagctctccctatagcctctgttctctcccctgcagtgggctcagtatctcttcttgtttccctgaaggaccattgacctcaaccttggtgttttcctgatttctaggcttggctataagaagtatgaacatgtcctgtgtactctgaaggtggatagcaatggtgtgatcacagtaaagcctgacttcacgggcctcaaaggaccctacaggtgaggagaggaagaaaggggtagtggagactggcattccttcccttggttgcactttttgtccctagtcaactagactgtcagaaagtccttcatctgttctaacttttacattcccaggcaatggttcgtattctgttccaagtcatagggccttagaaaaccagggactcctttctcagaaaatgtgcaactgcaccaatttgaaagggatcacttcagtggtacagttaaatgacagtgattctctgtgctgctgaatgtaggacctgaccagaacagagtggggtgaactcagccaggcttttcctgtgggctgactgttcctcatctctgtatcttggaaatgacagaaatgtaaattagaaattatctggcccaacctgtccatttttcaggtgagagaactgggtggcaggaatgttgtgccttacagtttgactgtaacttcaagccagaaatgggcccagaacctatactttctgagtctagtctggtgccctctctgctttacccttttgtttctctctcctggtcgtcaatacagccacttttatcatcatatactttagtgaggtgtatggcccctgatcgctcatccctgggctgggagctatcccagggcccatctctcattattagagttgctcctttctgtggttttgaccttacaggattgagacggagggggagaagcaggagctgtggaaatatacgatcgacaatgtttccccccacgcacagccggaggaggaggagcgggaacggcgagtgttcaaggatgtaagcgcaagttcattccaagtatccaagggatgagcctcagtgcctggagctgagaccatttctgaacttgatgtcagcagttgctcgggaaaagccttgcccttcatggccccttctgacttaggcagcattgctgacatatcagacagaagtttttgatcatattataataataacaataaccatttatttgagcatttaccatgttctgtgctaggtactttacataccttatttcctttagtctttacaacaaccctttgaggtgaacacttattaccaccttataagtggggaaaccgagattgaggagctaagtagtctgcccaaggtggcatagcttgtaagggcgagagtcaggattctgccccagaccagctgactccagggcctctgcttcacggtaaaatggcggtgagtcaggtgcttacgcctccagctcttgctgacccttcccactattgcttttcttcttcccattcagaactgaactttggtctagcttgggttgcatcttgagttttggtttggtttgtttcctcagctttatggccggcacaaggagtatctcagcagcctcgtaggcaccgactttgagatggtgagtagcttggcttcctgcagcactgtgagctgtgtttagccggagcattctgactgtggatgagttacactacctctcttaaaggcccaaaggtatactctacagtgtgaaaaggaagtcaaagaatagcacatatagtccttgttatgtgttttgcaacattgcatgttgatagagaactgttaatgctaagaaaaaggtctgaaaggctatgcacatgctgtgggtggctttctctggggagggtgggattagatgtggtagaagggtagtgggtggtgagagggatatattagggatttttgctttttattccctaaacttaggtagctttgaatttttatcagttgtaatgtatttaggtattactttataattaatttaaaaaataaatataaggatgaaaaatgtcttcttcacctttcatgtggatattttttcaaaataccccatagagaggcaggggtgccatttctgtttgtcacatattttggctcttaaaaaatataggcctgatgcggtggcgcatgactataatcccagcactttgtgaggccaaggtgggaggatcacttgaagccaggagtttgagagcagcctgggcaacatagtgagaccacatccctacaaaaaaaaaaaaaaaaattagcaaggcatggtgatacatacctgtagtcccagctactcatgatgctgaggcagcaggattgcttgagcctagaagtttgagtttgcattgagctatgatcacaccactgcattccagcctggacaacagatcaagaccctgtctgaaaaaaaaagaaagtggtttagttcagctattctgttgtgctgttctttgtcttttctcattctaagagttctatctctagacctggaaacaaggatagaattacttcctggtctccctctctttctctgaaaaattaaccttcactatttccatattgcataagcaacagatattcagtatttaaaagttagataagacatgcacaaataattaaaaaagaaaactccctggtttcttgacctcagccatctaaagggaagagggcgttctggcttcccattgcacaccacaggacagttgctgttgcttgaataatttcccatagtgcattgtcctcactgccatttaaattatgtactttccccctacattgtgaatcttaggaatgaaggaaacagatctgtggagaagtgtcagggtggggagaaagtgcagtagtgacacccagggcctgacccctagtggcaggtcgtctgcagatttgtagatggggctggaggagaagtgccaattccctccaggcctgctgatcctttcccacttctcttcaccttagactgtcccaggtgccctccggctctttgtaaatggagaggtcggtaagtgtcttgctagcatagatctcttgatgcttaggcacgtgcctagatggagctgtgaatagtctcctccactctggtagaggccttgtctgctgtacttgggaaactcagtggtgagtctttcctggaaacgcagagggttcctggccctcaaaagacttgctctcagggtgtgtaggcccctcaggattgggttgggtgctaagggtggtaggagaaaaagctaaaatagcttcctgttttctctcgtagtttcagcccaaggctatgagtatgacaatctctacgtccacttctttgtagaattgccaactgctcgtaagtaatattcttaagtctctccttttatacccattcagacagatctagaggcatttggtcaggcttcctttcccactcctctgctgaaactgttactgttcttttcaaggtcatagatcacatccactttaccaaacccagtggagacttccctgctttcacctcgcttgaccttcctgaagcattttccagagcccactgtgctgcatgacacacttctctggcttctggctccacacttctctctcctatctcgctggtggcccctcatccttcttgggtgatgccttcccttctgttgatcttaaaccgtgagagtacccacagctaagccaaggccttctgttactctctgtctgcagtcttcctgggcaacgtcatccatcctatggcttaaataccatcaatacgtctcagactcccaggtttctgcctctagccttaaccttttccctggactccagactcatatccagttacctcttttgtcatttctgtctaacatgaccaaaaagaactcttgattcctcctcttccctcaaacctctcctccctggtcttccccatcctaacagaatggcagtgtcatctactgagttgttgatgccaaaaacctagggaacatccttgatccctcactttccctagctccctatagccagccaatctgtcaacagttcctgtccgttctgtcttcaaaagctgttgtgaacctatttgttctctccagcaccctacaccaagccaccaccatctcttgtctaggccagtgcattcaacttctgatgtatccccctgcttcctgccttgctcccatttgccgttgatttgccacagacaccaaagccaagttgagctttaaaaaatgtaaacaagttatgtcccttttgagctgaaaaccccaacagcttcccctcccacttagagtaaaatgtaaacttgataccctgaatgagctggcccctgcctatctcttccatacaaccttccagtcattcttcccagccaggttcattcccaccttgtagccttttaagggccgtttcctttgtctgaaaccctttctgccatatcttagcatggctggttctttctgagtttaggtctcagcctgtgtcgcctctgagaggccttctcttaccacccagtctaaatgagcctcccaatcactcagtcccttccccgttttgtttttagtatagcactcatcactacccaatagtctcttgttggtttggtttttgtctgtctccctgcttcccccagaatgtcagctccatgagagatggggatcttttctatctagttaccaagatacccctaagatatactagcacatagcaggcactcagtaaatggtaaatgaatgattgattgtgtgaataaatgaataaagaaactgtccgccccgtctgggaagtgaggagcgcctctgcccggccgccccatctgggaggtgtacccaacagctccgaagagacagcgaccattgagaatgggccatgatgacgatggcggttttgtcaaaaagaaaagggggaaatgtggggaaaagaaagagagatcagattgttactgtgtctgtgtagaaagaagtagacataggagactccattttgttctgtactaagaaaaattcttctgccttgggatgctgttaatctataaccttacccccaaccccgtgctctctgaaacatgtgctgtgtcaactcaaggttaaatggattaagggcggtgcaagatgtgctttgttaaacaggtgcttgaaggcagcatgctccttaagagtcatcaccactccctaatctcaagtacccagggacacaaacactgtggaaggccgcagggacctctgcctaggagaaccagagacctttgttcacgtgtttatctgctgaccttctctccactattatcctatgaccctgccacatccccctctccgagaaacacccaagaatgatcaataaatacaaaaaaaaaaaagaaaagaaaaaagaaactgtctttttctgaatgacttgctttcctcccaggcgagcttactatatttggtctttggctttcagactggtcaagcccagcattccagcagctctcaggagtaacacagacctgcaccaccaagtccctggcaatggtatggagaatgagagcgggtatctggaagggaatgagatctgctcctgggatggcatttgaggttttatcaggccaagtgctgtgcgccctggggaggattccagagttgggtgacttgtgtgtgggttctacagggccacctggtccggagatcctgtctgtctttttgagcatggcagcagcttgtatttgggtgtccttttgcatctcagactcctatttcccacctgggtgataatttttctttttcccttgtgaagataaccttgtcattggccacaaggagaacagattccaagggaggccttgcccaccctatgacactcctttttataggacaaggtggctcacttctcctacccattcacgtttgaagccttcttcctccatgaggatgaatcttctggtgagtagctcagcagttgatcctgggccttggttcccctcaagcagtgctgtctcttggtgaaggccgcctgtgacctggccgcttctctccttgctcccagatgcactcccggagtggcctgtgctctactgtgaggtcctctcgctggacttctggcagaggtaccgtgtggaaggctatggggctgtggtgctgcctgccactccaggtaaccgctcgtctctgcccttctgtggcccacatgccctaggccctaagaacaagactaacactcgaatgcttctggtgaggggtggagataattgggaattggaaatgtttggcttgaaagagttcctgttcctctgaggactttctgcccccctccattagcgacaatgacgtggccttggcactgacttcctgacagtctctccatgtgcttcatgctcctctgattggactcagggtgagaagctgtatggcaaaattggctcatagcatatgtgtattgaatgaatcagcattcagtttggaataaaagcatctgtcttttactgtgtgccaggcattgtgccatacttctcacttaattctcccagtcactctgtgaggtgcaggtggtattatttccattttactagatgaggagaatgagcttcagagaggttaagaaacctgtcctgggtatgcaggtaataactggcagagcggaaatttgaatttctccctgattgatttccatacaggtgctatgggtaaccatgataacctgcaccagaggccaggtcatcaccagaccaggtgttttagctgagtctaggcctgtgtcattgctggggagtcagtgaggggccacatgccctttctggacctggccccagtcttctcttcccttgcgcaggctcacacaccctgacagtctccacgtggagacctgtggagcttggcacggtggctgagctgaggaggtttttcattggcggttctctggaactggaggacctctcctatgtacggataccaggatccttcaaggtgacttttgtctttggagtgacttcacgctgagaacttatggtcctgtccttctgtaggaggtgggatctgggtcaagaccccttagttgtgcattgcttcagtattaaccccttccttcctgtggcttaagctggaagtcatgaccacattttgaatcaggttccaatatctacactgctatcgtaggaggtctctggaaaatagtataattagagatttcccctggttcccatcagaataactggctctttcccccatcactgaaggcctcagtaatcagatgtggggaggattcacagtaagcatataagaccgccgcttctcaaatgaggttggaatgttccctggtttagttgggggagcccaatagcccagtattagccttgaggtaatagagtctgggtgatggaataaggtttccccaacagaactgcgcttcccaagaatgggaataagaatgggggtgaggccagcatggtgcgggggtgtctagagagagcagaaacctgaggctgtcccaatggcatgccacagggggaacgcctgagccgctttggactccgcacagagaccacaggcactgtcaccttccgcttgcactgtctgcagcagtccaggtgagtgacttggccctctgcctcagggcaccttagccctgaggggtggagacagccgtaaccatgtggctggcctccctgcagggccttcatggaatcgagctcccttcagaaaaggatgcggagtgtgttggaccgtctggaagggttcagccagcagagttccattcacaatgtgctaggtatgtcccctcccccagctggccaccccaggtcagcatgggcctgtttctctctgcagtgcagagagaaataccatatggcagccaaatagcatatctcctttccttacagaggccttccgtcgagcccggcgccgcatgcaggaggcccgggaaagcctcccgcaggacctagtgagcccctctggaaccctggtctcctagctcacagcagccctggcccacagtgcaagaggacaagatgggggatatctgaggccagtgctctcctgcctcttcgtctttctgattagagaccacgttggtctgctgagaaccagaaaagctgggaaattcccggctggcccctctgcctagccttctgcagggtcttctccctaccctgtggaaataaagccagagaccctgtggccccccctttatatttgcagccactgtcaatgggcatcacagcaaggcaggctttttgatctgaagctgtttggggtgaccccatagtgagtctggccttgactcacttttctggcttgtctcacagtagcaggggatctgctgttctccaccctttaaaaatggagcctttcatcttccaagaccaaagaaggaaggaaggtggacggtgagagggtcttaaatccccagcctgtgagtctcagcctctttccagggaagcctcattctactgcttggggcttgctgaggttgagatatgagttatttctgagtaagtgaaggctgaaggcagtgctgagtcctttctgctagctgggtggtatcttttactgtgtttttttgtttgtttgtttttttgttttttgttacataaaccccttttattttgactga

SEQ ID NO: 205 - DNA, 11122 bp, Homo sapiens
  source 1..11122: mol_type = other DNA
ccacacggtctttgagctgagtcgaggtggaccctttgaacgcagtcgccctacagccgctgattccccccgcatcgcctcccgtggaagcccaggcccgcttcgcaggtacagactcaggcggcggcccggcccgagcgctaacggcttgcccgtgggcggcgttcgccttttgggttgggggagggaggccccgggtccacgccgagcctggctctgcctcccgcgttgactaggcctcgggggcgacgttcattgaccaggcggctgagtttcgcggggtctgcgggtttagggcgccgacgctctgcaaacggcagcggaggccttaacgcgtcgcggccgggagaatcggagcgagccaggcttgagggcgaatgtcccgggaggacttgtggcggccctggtttcgcctcctcctttctcgttgcatcttccccggcgtgggggcaggggctgggggtggcagttgggagcaccgtctctgacacctaggccccgggggtggctctgccaccaagtcgtaggcgagcgtaatgaaagcaaagatagcaaattgtaaggagggctttgacttttgtcatcttctgaatgacgcacagctgatgtcatcctaattaagcgcattcactcctagtctctggaaatgcaaatcaaatatgcgagatgcggcactgcatttttaatgttgaccataatgtaatgatgaagcaaatttttatttaattttcgagtctgcacctattttggccaagtaaagacagtaaaatagggagagcctcctgaggatctgaatttattgccctggcacataatttttagctgtaagttgacttggttcccctactttgtcttgaattaactattagggactctggagtatcgaactaggctgtcagaaacggtggatacatgtggctagtccaaattgaaatacgctgtaagcttaaagtacacaaaagatttcaaagatggagtatggaaaaagaatgtagaagatgtcagttattttatatattgataacacgttgaaatactatttggatatgttgggttaagtaaaatacattattaaaattagtttcacttgtttcttttctcctttttaaaaatatggctactaggaagtttcaatttatatagcttgcattctatttctgatggagagccctctccaggaagtctcagccctttagagggaagggggacacttcccctttgggtaaagctatttcatagtgccgaaaacatgatgatcccccctctagtatacaggtgtggattcagtagatgcttgataattcagttcttatttggtactattattgacaaaggaaaatgataaaggaaatatttttctcttcccccatcttttagctttctccctttgtctcataaccatgtccaccaacgagaatgctaatacaccagctgcccgtcttcacagattcaagaacaagggaaaagacagtacagtgagtaccttctgttgctttcctgtggtggtatttaaatgggaagacatttggaaaggggtgaaaactgaggtatttaaaaaaaaaatgccctcacttagcaacaaaaactggtgtgataggtgaaacggcatgttatcttttctcaaggaaatgaggcgtcgcagaatagaggtcaatgtggagctgaggaaagctaagaaggatgaccagatgctgaagaggagaaatgtaagctcatttcctgatgatgctacttctccgctgcaggaaaaccgcaacaaccaggtaaaaaatgtattttagtttatgagttacgtgaaatccagaaaatcagtagggacttttcttagaaattcaagtaaacttaacatttctagtcttaacggttttaactatctgtgaacatctttttctctgtttgcaattagtaattgtcttctttcctgccttctgtaatccactgaagctgatttaggatcttcctttagctctgaccttccttcagacttccctgcatttctagctactagctgggtaccttggcctgaccagtgtgtccagagccagccagtttctggtttatttcttcttttttttttttttcccccgagatggagtcttgctctgttgctcaggctggagtgcagcagcacaatcggctcactgcaacctctgcctcatgggttcaagcaattctcctgccacagcctcctgagtagctgggattatgggtgcgcatcaccacgcttggctagtttttgtatttttttgtttttgtttctttgagacagagttttgctctgtcgcccaggctagcgtgcagtggtgcgatctccgctcactgcaagctccatctcccgggttcacgccattctcctgcctcagcctcctaagtagctgggactacaggcgcccgcaccctgtctggctaattttttgtatttttagtagagacggtgtttcaacatgttagccaggatggtctcgatctcctgacctcgtgatccacccgcctcagcctcccaaagtgctgggattacaggcgtgagccactgcccggcctgtttttgtatttttagtagaggcggggtttcaccatgttggccaggctagtcttgaactcatgacctcgtgatatgcctgccttggtctccagaagtgctgggattacaagcgtgagccaccaggcccttcccgtttttggtttatttctgccttttttggtattctctatgtttttgtatttgtcaccagctttgttcaggactttccttctgaaatatttacagtagcctcctaatttatcatatccttctttatgccatatactattttcctgaaatttttcctgaagtactgctttagacctgtgttttcgctccttaaaatccatactccaaattgcttgaacctgggaggtggaggttgcagtgagccaagatcatgccattgcactccagcctgtgcaacaagagtgaaactccgtctcaaggaaaaaaataaaaataaaataaatccatactccagctgggcatggtggttcatgcctgtaattccaacactttgggaagctgaaatgggaggatcactggaggccaggagtttgagcccagcctaggcaacataggaagacctcgtctctataaaaagtaaagttagctgggtgtggtggcgccggcctttagtcctaggtattcagggggctgagacagaagaatcacttgagcccgggattttgaggctgcagtgagctgtgattgcaccactgcaccccatgctgggtgacagtgagaccctgtctctaagaaatccctactctatgaaggccttccataaagtagacttaacttagattttcaaatttatctttcatctgggccctttcctacatgtttttctcacaatatgcttccttttttttttgttttgagacaaaaccttggtttgttgcccaggctggagtgcagtggtacgatcttggctgactgcagcctccgtctcctgggttcaagtgactctcctgcctcagcctcccaagtagctgggatcacaggggatcaccacgatgtctagctaatttttgcatttttagtagacacggggattcaccgtgtttcccagtctggtctcgaactcctgacctcaggtgatccacccgcctcggcctcccaaagtgctgggattacaggcgcgagccacttcgcccagccaaacataaaccatttatatttgcagcaacacttaaccgtggaaatatgtagattataaaattagatatgaaaatcctcggccgggtgtggtggctcacacctgtaatcccattactttgggaggccgaggcaggtggatcacctgaggtcgggagtttgagaccagcctgaccaacatggagaaactccatctctactaaaaatacaaaattagctgggcatcgtggcgcatgcctgtaatcccagctactcaggaggctgtggcaggagaatcgcttgaacccgggaggtggaggcggtggtgagccgagatcacgccattgcactccagcctgggcaagaagagcaaaactctgtctccaaaaaaaaaagtcgggcatggtagctcatgcctgtaattccagcactttgggaggctgaggcaggtggatcacctgaggttggcagttcgagaccagcctgaccaacatggagaaaccccgtctctactaaaaatacaaaaaaaaaaaattagccaggcatggtggcgcatgcctataatctcaggtacttgggaggctgaggcaggagaatcgcttgaacccaggaggcggaggtggtggtgagccaagatcatgccactgcactccagcctggggattgagtgaaactccgtctcaaaaaaaaaaagaaaagaaaatcctcagaacgttgcctatgacttcatgtctttctccctcaaagtatatctgaatgcaagtgattgagactaacgtagaaataatcttcagtctgctctgattcttgatttttgagacaaggtcttgtatggcgacaggcaaacaccaccatgcctggatattttttttttttttttttttttgttgggaggtctcactgtgttgctcaggctggtctcacctgagctcaagccatcctccctcctgagcctcccaaagtgctaggcttacaggtgtgagccaccatgcctgtccttctcgttcattttttaaaattgttcaaagctgccttttttagcgacaaaacacttggatactccataacttgagactccagtgagtccatgacaacaagtttggaaactgttctacatataaaataatgaatatttaacaggcaaaattaaatgtagggctaaatatttagtagctggctataagcctaacgatgtttacacttgccttcacaagtaagtgtggattttattgtttgtatttaatcttaatgataatgtgcaaactttcacttttcttctagggcactgtaaattggtctgttgatgacattgtcaaaggcataaatagcagcaatgtggaaaatcagctccaagctactcaagctgccaggtaagtcttgtctgcgatagcatgggtagcctaagaaatttgtgtttttagatttttttttggggggtggggcaggaagggacagacagatagtacaaggaaagattaggccagccagccataagccaaatagtattttttatttattaatttttttgagaggggaggccttgctattttgcccaggctggcctggaatgcctgggttcaagcagtcctctgacctcagcctcctgaagtgctgggatcacaggtgtgtgccattgcacctgcccataaagtttttaccaaagtaatgtttcaagtcactggcaggggaaggaagaaataaatagtaagtgggattgagacatgcatttagaatgatagatccatttaggagataagtataatttgacctttacctcccactatacgtggatatttatgatataatagaaaggattaataagttctatagcttgacagtgtgcagaagaaaaatttcaatggtaaattatcattaaaaagttctaggctgggtgctgtggctcattcctgtaatcccagcactttgggaggccaaggggtcggttacttgagcccaggagtttgagaccagcctgggcaacatggtgagagccagtttctacaaaagaaattattagctgggtgtggtggcacatgcctgtaatctcacgtgtttgggaggctcaggcacaataatcacttgaacccagcaggcggaggttgcagtgagctgagatcttgccactgcattccagcatggcgacagagcaagactctgtctcaaaaaataaataaataaaataacttgggtgtggcggtgcacacttgtcgtcccagctactaaggaggctgaggtgggaggatcacttgagcccaggaggtcgaggctgcagtgagctgtgatcgtggcactgcactctagcctgagtggagtgagatcctatttcaaaaaaacaaaatgtgcttaaccacaactatcagaacaaattcagtgagagtataaccctgtcagaatgtgaaaagtttttttaaaaagtgacaagatctggagtagatttctgcagggatggaaaggagggtaatctacattaatttctggaaaaatggtagttaattataccgcatacatagcaccatacaagtaatctgttcagcttctcttaggttccagaatgtctcagcatttagtgatttacttaaaaggttgtctgaagttctaaactcttgaattgcattttatattggtttttacacaaactccttttgttaatcactgtcaacttttatttctctttttgttcccctttaggaaactactttccagagaaaaacagccccccatagacaacataatccgggctggtttgattccgaaatttgtgtccttcttgggcagaactgattgtagtcccattcagtttgaatctgcttgggcactcactaacattgcttctgggacatcagaacaaaccaaggctgtggtagatggaggtgccatcccagcattcatttctctgttggcatctccccatgctcacatcagtgaacaagctgtctgggctctaggaaacattgcaggtacttggacttgaagttcttttgactgaatgtatctaatcgtaattagttggaagaaaggccttgttataagtaatagtgactttgtcaagttttgagcttgctttcaagcccttattaggaatgaaagtgtcgtctttacaaaggcagcagagggccatctaagtaagtttgggagtttttgctggtgcattcagtcactgaaaattgatggtgttggacaaggtaataaaattaatcttgcctcggccgggcatggtggctcacgcctgtaatcccagcactttgggaggcagaggcgggtggatcatgaggtcaggagattgagaccatcctggctaacacagtgaaaccccacctctactaaaaatacaaaaaattagccgggcgtggcggcgggcgcctgaggctgaggcaggagaatggcttgaacccaggaggcggagcttgcagtgagccgagatcgcgccactgcactccagcctgggcgacagagagaaactccgtctcaaaaaaaaaaaaaaaaaaattaatcttgccttttttttcaggtgatggctcagtgttccgagacttggttattaagtacggtgcagttgacccactgttggctctccttgcagttcctgatatgtcatctttagcagtaagttactaacatgagtaaagttactcacttcttcattctaatttcccccatcttctcaaaagacagaacctctcattgcctattttttttcccccagtgtggctacttacgtaatcttacctggacactttctaatctttgccgcaacaagaatcctgcacccccgatagatgctgttgagcagattcttcctaccttagttcggctcctgcatcatgatgatccagaagtattagcagatacctgctgggctatttcctaccttactgatggtccaaatgaacgaattggcatggtggtgaaaacaggagttgtgccccaacttgtgaagcttctaggagcttctgaattgccaattgtggtaagttatttacttgtagattaggacataagtataagaagcatgatcagggctgggcgtggtagtggtggctcacacctgtgtaatcccagcactttgggagaccaaggcaggtggatcacctgaggtcaggagttcgagaccagcctggccaacattgtgaaagcccatctctactaaaaatacaaagaaattatctggacatggtggcacgtgtctgtaatctcaactactcgggaggctaaggcaggagaattgcttgaatctgggaggcagaggctgcagtgacccgaaatcgtgccattatactccagtctctcaaaaaaaaaaaaaaaagcataatcagttgatagtaatattgaaatattgcctatttcaggccatgatgggcctcttgttaaaacttttagggtatagaatttctaaagtgctggggaaaaaataaccagcatcaacatattttttttttttcagactcctgccctaagagccatagggaatattgtcactggtacagatgaacagactcaggttgtgattgatgcaggagcactcgccgtctttcccagcctgctcaccaaccccaaaactaacattcagaaggaagctacgtggacaatgtcaaacatcacagccggccgccaggaccagatacagcaagttgtgaatcatggattagtcccattccttgtcagtgttctctctaaggtaacgaagtcttaggatttaatcaagtcatttttagtatttatagaaagctgtgcttgataagcttcttcacgtgcaagaatcttgggttctactaggagtcctttgctgaacaatacccagtaaccccttttacttaaggttggatagaaccttggtactttcagtcattgtttttgtgaaaaagtactcttggaatcttatttgtgcaactgttctgaaataaaaccatttccttatgtttaataggcagattttaagacacaaaaggaagctgtgtgggccgtgaccaactataccagtggtggaacagttgaacagattgtgtaccttgttcactgtggcataatagaaccgttgatgaacctcttaactgcaaaagataccaagattattctggttatcctggatgccatttcaaatatctttcaggtaagtcctatcaaggtggctttgtttgaatttggacttgataataatcagtttactatttagacttgggggagggcagctgtaagtttactcactagtaagccacagaatcagaaagcctgtttatgtggccacccctttgattaaaaatgaggcaggcattataaaagatacaaaagagacgacaagtggatggtgtgacctgaatcggagtcaggcgcttatgtggactcatcacacctgtttacttggttgatttaatttcccaatttcataccgatttttggtgacattaaatttgaatgacttggccaggcacggtggctcatgcctgtaatcacagcactttggaagtccgaggtgggtggatcacctgaggtcaagagttcgagaccagcctggccaacatggcgaaaccctgtctctgctaaaaatgcaagaattagccatgtgtggtggtgggcgcctataatcccagctactcagaaggctgaggcaggagaatcgcttgaacccgggaagcggaagttgcagtgagccaagtttgtgttattgcactccagcttgggcaagagtgaaactgtcttaaaaaaaaaaaaaaaaaaagttgagccttcaataatggatgctagcgtatctgttactgtgtataaataatttgtcagtatgtggccagtatttcttcttcccctcatctaatcccctaagttattttgaagcaaatctgtttttttcatctatagatatttatgtatctctttaaggttgaaaatttaaaggaaaactaacctacataccattccatatgtccagtaaatccttaataccaacacacattctgtttggggacgtttagtttagcactccataggccatctttgcccttagacaccttgactacaccttgtgatgacataggatgctttatgaaacaatacacccctgttcccatagcagaccagttgaactggaatgtagtgttgttttaaaagttgcccgcatgattttgatacatagaaaaggttgggagctactactgattgtaagatctttggctccagttgaagtagtgctaaaagcaggtacagatccaatcacattgagtgtcaacaaaatataaaatggacataaaactatgataggcttgatgaaggaattgttaggtgcttatttctgcctgacgtatcaatattcaaattattgatgttttcttcattaaaataaaaccagagtatatgccagtaaacttggattttttttttttttaggctgctgagaaactaggtgaaactgagaaacttagtataatgattgaagaatgtggaggcttagacaaaattgaagctctacaaaaccatgaaaatgagtctgtgtataaggcttcgttaagcttaattgagaagtatttctctgtagaggtgagtaatggatggtaatattaataacaacttggaaacataaagtcaaggccataagcctttttttcccttttaaaaataagtgtcatatctttgttaaatatagtaaaatatcagtgtgcatgggacataatgtacttatttgcccctctagtttggcttgatggtaataaaatctttttaaactgagattttaaaagccaccagattagtttcaaatgaacaaccttgagaatcttagaatatcttgagggtaagttaacgggtgtcattgtaggaggtgatagagaagtaggccaaactcatcaccatgctctgggcctaatacagtcttttcctattgaaaagtgacggttggggaagaaaaaaatctcggcctgtttgtgttactgtagtagctagcatttatgaattggcaaagtttcagagaccctccctcctctatgtcaaatactataatatcatacaggattaaaggtgtaatatgcagatcaagacctagagattaaatacagacttcaggtaggctgctgcttggaatacttatatcatttttatacttattttttaatatatttccaggaagaggaagatcaaaacgttgtaccagaaactacctctgaaggctacactttccaagttcaggatggggctcctgggacctttaacttttagatcatgtagctgagacataaatttgttgtgtactacgtttggtattttgtcttattgtttctctactaagaactctttcttaaatgtggtttgttactgtagcactttttacactgaaactatacttgaacagttccaactgtacatacatactgtatgaagcttgtcctctgactaggtttctaatttctatgtggaatttcctatcttgcagcatcctgtaaataaacattcaagtccacccttttcttgacttca

SEQ ID NO: 206 - DNA, 6224 bp, Homo sapiens
  source 1..6224: mol_type = other DNA
cccggaaacggaagtctcgttctttttcgtccttttccccggttgctgcttgctgtgagtgtctctagggtgatacgtgggtgagaaaggtaatctggggcaatccactgccaggtgaaatctggggaccccaggtccgcgtggagggtgtcggggaggagaaggggagtgcgatggggccgatatttcgggggagagcgggaaaacggggttcgctgccagcccccgcgccgtgttaacgccgaggactgtttcccgcaggtcctggtccgcgccagagcccagcgcgcctcgtcgccatggtgagtacagtccctgcctggcgccttcccggggtgggctcgtggggccccggggcgagggcgagagagcctcccaaggatctcctgaggccgggagaagctggtggactgggccatcgccgggagacgtgtctctttcctctctgttcacccgcttcctttgtgttgcagcctcggaaaattgaggaaatcaaggacttcctgctcacagcccgacgaaaggatgccaaatgtaagtggttgctccgaaggttcaagaagagcggtgcctagcctggcaccgctccgggagcgtcttccccggaatgtcaggcaggagacggttaggccgtctgggtgtgtgcctggccctctgggagcagtggtttcatcctgtttcccatgagaaagacctgtggggggcacgttgaggccctggaatttctaggaccatctttagctaatcgcgatcatctcagaggccgccctgagttcagttttctttcgtataatatagtaaattgtcggaacggaatctccactccgcgaaagcctcaaaacacacgtcccataaacactgtttaggttctctgcagttgtgcaaaatcttaacacaaaatccattttgtaataaagtgctggatatttgcatgtaatgtatcgagcacggcacactgtgtagtatggtcgtttacctcgtgatcctgtggtcgctggccagtgtcagaaggtatcatacctatctaatccagaaaaatatttaaaaaaatttttttttttctttgagacagtctggctctgtcgcccaggctggattgcagtggtgcgatcttggctcactgcaattaccgcctcccaggttcaagcgatccccctgcctcaaagtagctgggcgcgccaccatgcctagctgatttttgtgtttttggtagagacagagtttcaccatgttggccaggctggtctcgaactcctaacctcagatgatccacctgcctccgcctcccagagtgctgggattacaggtgtgagccactgtgccccgccaagatcaaaatttgaagcagggcttctactgaatgtatatcgcattaccaccattgtaaagtcacagagtttaagttggactgtcataggtctgtttcccagcttgtacatacaggggaaagaaggtgattaatgaaaaaccttaaacagcaggttttcgatggataggtgccaatctctgctgcccacttacttaaatttttacaccaagtgtgagaggtagttgtgttactcctttgtgatacttgaaggagattgggggggcttgtgtttgatacaagctaggtcttgagttatgttgttactttaacccagtcatcttttttcagctgactgagaatcaggtcacatgtggaagtgaggttgcatgggacaggcctgttaaggtgggctaagacaccagccgtctctaatgctctgccagccgtggtgccagacggtggttggtgtacagggagagtctttcaatgagttgggggtaggcagagatgggggtcatatttgtgtccccattacccaaaacaggctgtcacctttgaggtagtgaccacctgtggggacaaatagcatctggtgggaatgatgactgttggctagtgttttgtgtaaagagatgaggttatcaggtcagttttatttcagaccatatggggtcactgcctagtttgaagcccaactctacctgcaggtaacttacccttctcagcaagttaaacacgacaccaccgtttgattgtgttttaaaagggtggtggtccgggcgtggtggctcatgcctataattccagcactttgggaggccaaagcggacagatcgcttgaaccaggagttcaagaccaacctgggcgacatggcaaaaccccatttctactaaaaataaaaaaattagccaggcatggtggcacacgcctgcagtcccagctactcaggaggctgaggcaggagaatcagttgaaccaaggagacggaggttgcagtgagctgagattgtctcactgcactccagcctgggtgacagagcgagactgtctcacaaaaaaaattgggaaccttcattttagatgatgtggctttaaaggtagtggtcacagtcccctggggacagtaaagtgtcagtagctgtttgttgaaaaaactttttaaaatggttgtattaatttttaacgtgtaataggcatagcgtaaaagttaccatttacactgggtatggtggttcccatctgtaatcccagcactttgggagactgaggcagatggatgagactagcctgggcatcatagtgagaccctgtctctataaaagaaaaaagttagccgggcgtgtgctggtggtcctagctactcaggaggctgaggtaggattgcttgaatccaggaaattgaggctatagtgagccacgattatgctactgcactccgggctgggcaacaaagcataattgtacagttcagtggcattcagtaaatacacattgttgagcagctgccaccatcaccgcccatctccagaactttatcttcccaaactgaaactccctctgttaaacaccagctccccattcttccccagcccctggcaaccaccttccaatttgtccctgaatgtgactgctctggataccccatacaagtgggtctgctattgcatatttgaccttttgtgactggcttctcttcacatgtcctcaagcatgtgtcagaattgccttctgttttttctttcttttttttttttttttttttttgacatggaatgtcactctgttgcccagactggagagcagtggcggaatctcagctcactgcaagctccgcctcccaggttcatgccattctcctgcctcagcctcccaagtagctgggactacaggcgcctgtcaccatgccgggctaattttttttttttttttaaagtagagacggggtttcaccgagtgagccaggatggtctctatctcctgacctcatgatccacctgccttggcctcccaaagtgctgggattacaggcgtgagccactgtgcccggcctgcaatttgctttttttaaacagggtctcactcctgcccaggctggagtgcagtggtgtgatcatggctcactacatccttgatctcctgggcgcaagtgatcctcccaccttagcctccagagtctctgggactacaggcatgcgccaccacacctggctaatttttggtgttttagagatggatctgtgttggccaggctagtctccaactcctggcctcaagcagtcctcccaccttagcctcccaaagtgctgagattacaggcaggagccaccacacccagaccggagttttcttttgaaggccgagttttccattgtgtgggtaggccacggtttgtttattcgtctattgatggacattgggttgcttctacattttcgctagtgtgaataatgctctgaacatgtgtgtgcaaatattcttctgtggttgctatctgttctttggggtatatacctagaaatggaattgctgcacatatggcaatgttgagtaaactttttttttatttattttttttttgagatggagtttcgctcttgttgcccaggctggagtacagtggcggaattttggctcactgcaaactctgcctcccatgttctcctgcctcagcctcctgagtagctgggattacaggcgcctggctaatttttgtatttttaggagagacggggtttctccatgttggtcaggctggtctcgaactcccgacctcaggtgatccacccacctcagcctcccaaagtgctgggattacaggcgtgaaccaccgcacccaactgaataaacattttgaagagctccatatgtctttacaagtggtgttcagcttagttcagctgctaggggcagtgttatactgaaataggttagtttggatgaatatccaggtgtctggatgtattaagaacgagagtccaggcagcccgtgccttgggcaggctctgagtcacagtgctgcttcctctgatgtgccccattcctatagtagttactggcagaaatggagttgccgaattgctaggacaagatcatcttgtgtgcgtctgccaggttaagtgctgtgtgctgtgtctggccaggtgctttcgttgaagtgttagagcccatgttcagccctcagccacctgcttcttgattggcacatcactgctattataacaaatcctgggagtatctctgagcagtttttaaagagttggaacaaggcattcagtgaatacatggagtggtaactactcctgggaaggggttgtctcacagcagccagatggccatgcattgatactgctagtacataaccagagtggtgcacgattcaaaccccacacagctgaatttgaggtacacagtagctgtttcttgtctgagccatgatcctgaaatagaacttggcagcaggaaagaacccagaaaatggattccacataaattcaaggaaaaccctgggtgcgtgttgtgcgcagtggctggaggcatcctgaagaacgagctcttactggcccagaatgtcatctcacatgcggaggcctgatttccgggagtggagtgctgaaaagcgctcagtcccagcagacagcccgtctccttactttatcactgcttctatccctttttaaaaagataataggccaggtgcggtggctcatgcctggaatcccagcactttgggaggccgaggccagcggatcacgaggtccagagattaagaccatcctggcaaacatggtgaaaccccatctctactaaaaatacaaaaaattagctgggtgtggtggtgcacgcctgtaatcccagctactccaggaggcttaggcaggagaatcgcttgaacctgggaggcggaggttgcagggagccaagattgcgccactacactccagcctggcaacagaccgagactctgtctcaaaaaacaaagtagaaataagaaagataataaggttgatagaagatattctgtaatgttgtgttcagtgtacccaataaaagtcccaagttggaggaacgggtaatagtgttttctgtttgcacagagggatggtactggaggtgggtgctgtctcctgcatgctgcttactgcttgagtgtatttgcacatggactgtgtcacatctgttttctgtgatacaatttaattcctgattctggtctccggtagctgtcaagatcaagaaaaataaggacaacgtgaagtttaaagttcgatgcagcagatacctttacaccctggtcatcactgacaaagagaaggcagagaaactgaagcagtccctgccccccggtgagtgagcctgaagtcacttcaggggcgggtggggtttggaaggttgctgtgtgtggccatgttgtatcttgttttgaatccctctcagatttcagagcccattttatggtctaagaatctgctcttgctgttgggagtgtgaggaatagttgtgattctcagattatatacagtaccagaaatcatttccttagccagaagagcggttagagctcatttaatcctgttcacgacccttcgaggttggtgctagtactgatagtccccattttttacaggggaacagatgaaatataatagaccaagtctttttatcgaatataatagaccaagtctttttatcaaacactaaatattttaaccgaaacttcgctggtggatctaatttctgaaccttgtgtgctctctttagcttaagtacaaaatttagacaagcagcagcaactcagatgtgtcttctggatggcttacttttgtctctttccctctaggtttggcagtgaaggaactgaaatgaaccagacacactgattggaactgtattatattaaaatactaaaaatcctaa

SEQ ID NO: 207 - DNA, 186 bp, Homo sapiens
  source 1..186: mol_type = other DNA
cggtctggggaaaggctcctgtgttgttgagcctgccaagttgtgggtgcagcatggtaccaggcagcccaaccctgacctaaagtaaattcccggaagaagtctttcctgggttttgaatttgcagtaacaggtgtgagcattctagcagcagtttgatgatcatgtatgatactgcaaacagga

SEQ ID NO: 208 - DNA, 11439 bp, Homo sapiens
  source 1..11439: mol_type = other DNA
ccagaaggccgcggggggtggaccgcctaagagggcgtgcgctcccgacatgccccgcggcgcgccattaaccgccagatttgaatcgcgggacccgttggcagaggtggcggcggcggcatgggtgccccgacgttgccccctgcctggcagccctttctcaaggaccaccgcatctctacattcaagaactggcccttcttggagggctgcgcctgcaccccggagcgggtgagactgcccggcctcctggggtcccccacgcccgccttgccctgtccctagcgaggccactgtgactgggcctcgggggtacaagccgccctcccctccccgtcctgtccccagcgaggccactgtggctgggccccttgggtccaggccggcctcccctccctgctttgtccccatcgaggcctttgtggctgggcctcggggttccgggctgccacgtccactcacgagctgtgctgtcccttgcagatggccgaggctggcttcatccactgccccactgagaacgagccagacttggcccagtgtttcttctgcttcaaggagctggaaggctgggagccagatgacgaccccatgtaagtcttctctggccagcctcgatgggctttgttttgaactgagttgtcaaaagatttgagttgcaaagacacttagtatgggagggttgctttccaccctcattgcttcttaaacagctgttgtgaacggatacctctctatatgctggtgccttggtgatgcttacaacctaattaaatctcatttgaccaaaatgccttggggtggacgtaagatgcctgatgcctttcatgttcaacagaatacatcagcagaccctgttgttgtgaactcccaggaacgtccaagtgctttttttgagattttttaaaaaacagtttaattgaaatataacctacacagcacaaaaattaccctttgaaagtgtgcacttcacactttcggaggctgaggcgggcggatcacctgaggtcaggagttcaagacctgcctggccaacttggcgaaaccccgtctctactaaaaatacaaaaattagccgggcatggtagcgcacgcccgtaatcccagctactcgggaggctaaggcaggagaatcgcttgaacctgggaggcggaggttgcagtgagccgagattgtgccaatgcactccagcctcggcgacagagcgagactccgtcataaaaataaaaaattgaaaaaaaaaaaagaaagaaagcatatacttcagtgttgttctggatttttttcttcaagatgcctagttaatgacaatgaaattctgtactcggatggtatctgtctttccacactgtaatgccatattcttttctcacctttttttctgtcggattcagttgcttccacagctttaatttttttcccctggagaatcaccccagttgtttttctttttggccagaagagagtagctgttttttttcttagtatgtttgctatggtggttatactgcatccccgtaatcactgggaaaagatcagtggtattcttcttgaaaatgaataagtgttatgatattttcagattagagttacaactggctgtctttttggactttgtgtggccatgttttcattgtaatgcagttctggtaacggtgatagtcagttatacagggagactcccctagcagaaaatgagagtgtgagctagggggtcccttggggaacccggggcaataatgcccttctctgcccttaatccttacagtgggccgggcacggtggcttacgcctgtaataccagcactttgggaggccgaggcgggcggatcacgaggtcaggagatcgagaccatcttggctaatacggtgaaaccccgtctccactaaaaatacaaaaaattagccgggcgtggtggtgggcgcctgtagtcccagctactcgggaggctgaggcaggagaatggcgtgaacccaggaggcggagcttgcagtgagccgagattgcaccactgcactccagcctgggcgacagaatgagactccgtctcaaaaaaaaaaaaaaaagaaaaaaatctttacagtggattacataacaattccagtgaaatgaaattacttcaaacagttccttgagaatgttggagggatttgacatgtaattcctttggacatataccatgtaacacttttccaactaattgctaaggaagtccagataaaatagatacattagccacacagatgtggggggagatgtccacagggagagagaaggtgctaagaggtgccatatgggaatgtggcttgggcaaagcactgatgccatcaacttcagacttgacgtcttactcctgaggcagagcagggtgtgcctgtggagggcgtggggaggtggcccgtggggagtggactgccgctttaatcccttcagctgcctttccgctgttgttttgatttttctagagaggaacataaaaagcattcgtccggttgcgctttcctttctgtcaagaagcagtttgaagaattaacccttggtgaatttttgaaactggacagagaaagagccaagaacaaaattgtatgtattgggaataagaactgctcaaaccctgttcaatgtctttagcactaaactacctagtccctcaaagggactctgtgttttcctcaggaagcattttttttttttttctgagatagagtttcactcttgttgcccaggctggagtgcaatggtgcaatcttggctcactgcaacctctgcctctcgggttcaagtgattctcctgcctcagcctcccaagtaactgggattacagggaagtgccaccacacccagctaatttttgtatttttagtagagatggggtttcaccacattgcccaggctggtcttgaactcctgacctcgtgattcgcccaccttggcctcccaaagtgctgggattacaggcgtgaaccaccacgcctggcttttttttttttgttctgagacacagtttcactctgttacccaggctggagtggggtggcctgatctcggatcactgcaacctccgcctcctgggctcaagtgatttgcctgcttcagcctcccaagtagccgagattacaggcatgtgccaccacacccaggtaatttttgtatttttggtagagacgaggtttcaccatgttggccaggctggtcttgaactcctgacctcaggtgatccacccgcctcagcctcccaaagtgctgagattataggtgtgagccaccacacctggcctcaggaagtatttttatttttaaatttatttatttatttgagatggagtcttgctctgtcgcccaggctagagtgcagcgacgggatctcggctcactgcaagctccgccccccaggttcaagccattctcctgcctcagcctcccgagtagctgggactacaggcgcccgccaccacacccggctaatttttttgtatttttagtagagacgggttttcaccgtgttagccaggagggtctcgatctcctgacctcgtgatctgcctgcctcggcctcccaaagtgctgggattacaggtgtgagccaccacacccggctatttttatttttttgagacagggactcactctgtcacctgggctgcagtgcagtggtacaccatagctcactgcagcctcgaactcctgagctcaagtgatcctcccacctcatcctcccaagtaattgggactacaggcgcaccccaccatgcccaccttatttatttatttatttatttatttatttattttcatagagatgagggttccctgtgttgtccaggctggtcttgaactcctgagctcaagggatccttttgcctgggcctcccaaagtgctgagattacaggcatgagccaccgtgcccagctaggaatcatttttaaagcccctaggatgtctgtgtgattttaaagctcctggagtgtggccggtataagtatataccggtataagtaaatcccacattttgtgtcagtatttactagaaacttagtcatttatctgaagttgaaatgtaactgggctttatttatttatttatttatttatttatttttaatttttttttttgagacgagtctcactttgtcacccaggctggagtgcagtggcacgatctcggctcactgcaacctctgcctcccggggtcaagcgattctcctgccttagcctcccgagtagctgggactacaggcacgcaccaccatgcctggctaatttttgtatttttagtagacggggtttcaccatgctggccaagctggtctcaaactcctgaccttgtgatctgcccgctttagcctcccagagtgctgggattacaggcatgagccaccatgcgtggtctttttaaaattttttgattttttttttttttgagacagagccttgctctgtcgcccaggctggagtgcagtggcacgatctcagctcactacaagctccgcctcccgggttcacgccattcttctgcctcagcctcctgagtagctgggactacaggtgcccaccaccacgcctggctaattttttttggtatttttattagagacaaggtttcatcatgttggccaggctggtctcaaactcctgacctcaagtgatctgcctgcctcggcctcccaaagcgctgagattacaggtgtgatctactgcaccaggcctgggcgtcatatattcttatttgctaagtctggcagccccacacagaataagtactgggggattccatatccttgtagcaaagccctgggtggagagtcaggagatgttgtagttctgtctctgccacttgcagactttgagtttaagccagtcgtgctcatgctttccttgctaaatagaggttagaccccctatcccatggtttctcaggttgcttttcagcttgaaaattgtattcctttgtagagatcagcgtaaaataattctgtccttatatgtggctttattttaatttgagacagagtgtcactcagtcgcccaggctggagtgtggtggtgcgatcttggctcactgcgacctccacctcccaggttcaagcgattctcgtgcctcaggctcccaagtagctgagattataggtgtgtgccaccaggcccagctaacttttgtatttttagtagagacagggttttgccatgttggctaagctggtctcgaactcctggcctcaagtgatctgcccgccttggcatcccaaagtgctgggattacaggtgtgaaccaccacacctggcctcaatatagtggcttttaagtgctaaggactgagattgtgttttgtcaggaagaggccagttgtgggtgaagcatgctgtgagagagcttgtcacctggttgaggttgtgggagctgcagcgtgggaactggaaagtgggctggggatcatctttttccaggtcaggggtcagccagcttttctgcagcgtgccatagaccatctcttagccctcgtgggtcagagtctctgttgcatattgtcttttgttgtttttcacaaccttttagaaacataaaaagcattcttagcccgtgggctggacaaaaaaaggccatgacgggctgtatggatttggcccagcaggcccttgcttgccaagccctgttttagacaaggagcagcttgtgtgcctggaaccatcatgggcacaggggaggagcagagtggatgtggaggtgtgagctggaaaccaggtcccagagcgctgagaaagacagagggtttttgcccttgcaaatagagcaactgaaatctgacaccatccagttccagaaagccctgaagtgctggtggacgctgcggggtgctccgctctagggttacagggatgaagatgcagtctggtagggggagtccactcacctgttggaagatgtgattaagaaaagtagactttcagggccgggcatggtggctcacgcctgtaatcccagcactttgggaggccgaggcgggtggatcacgaggtcaggagatcgagaccatcctggctaacatggtgaaaccccgtctttactaaaaatacaaaaaattagctgggcgtggtggcgggcgcctgtagtcccagctactcgggaggctgaggcaggagaatggcgtgaacctgggaggtggagcttgcagtgagccgagatcgcgccactgcactccagcctgggcgacagagcgagactccgtctcaaaaaaaaaaaaaaaaagtaggctttcatgatgtgtgagctgaaggcgcagtaggcagaagtagaggcctcagtccctgcaggagacctctcggtctctatctcctgatagtcagacccagccacactggaaagaggggagacattacagcctgcaagaaaagtagggagatttaaaaactgcttggcttttattttgaactgttttttttgtttgtttgttttccccaattcagaatacagaatacttttatggatttgtttttattactttaattttgaaacaatataatcttttttttgttgtttttttgagacggggtcttactctgtcacccaggctgagtgcagtggtgtgatcttggctcacctcagcctcgaccccctgggctcaaatgattctcccacctcagcttcccaagtagctgggaccacaggtgcgtgtgttgcgctatacaaatcctgaagacaaggatgctgttgctggtgatgctggggattcccaagatcccagatttgatggcaggatgcccctgtctgctgccttgccagggtgccaggagggcgctgctgtggaagctgaggcccggccatccagggcgatgcattgggcgctgattcttgttcctgctgctgcctcggtgcttagcttttgaaacaatgaaataaattagaaccagtgtgaaaatcgatcaggaaataaatttaatgtggaaataaactgaacaacttagttcttcataagagtttacttggtaaatacttgtgatgaggacaaaacgaagcactagaaggagaggcgagttgtagacctgggtggcaggagtgttttgtttgttttctttggcagggtcttgctctgttgctcaggctggagtacagtggcgcaatcacagctcactatagcctcgacctcctggactcaagcaatcctcctgcctcagcctcccagtagctgggactacaggcgcatgccaccatgcctggctaattttaaatttttttttttctcttttttgagatggaatctcactctgtcgcccaggctggagtgcagtggcgtgatctcggctgacggcaagctccgcctcccaggttcactccattcgcctgcctcagcctcccaagtagctgggactacaggcgctgggattacaaacccaaacccaaagtgctgggattacaggcgtgagccaccgcacccggcctgttttgtctttcaatagcaagagttgtgtttgcttcgcccctacctttagtggaaaaatgtataaaatggagatattgacctccacattggggtggttaaattatagcatgtatgcaaaggagcttcgctaatttaaggcttttttgaaagagaagaaactgaataatccatgtgtgtatatatattttaaaagccatggtcatctttccatatcagtaaagctgaggctccctgggactgcagagttgtccatcacagtccattataagtgcgctgctgggccaggtgcagtggcttgtgcctgaatcccagcactttgggaggccaaggcaggaggattcattgagcccaggagttttgaggcgagcctgggcaatgtggccagacctcatctcttcaaaaaatacacaaaaaattagccaggcatggtggcacgtgcctgtagtctcagctactcaggaggctgaggtgggaggatcactttgagccttgcaggtcaaagctgcagtaagccatgatcttgccactgcattccagcctggatgacagagcgagaccctgtctctaaaaaaaaaaaaaccaaacggtgcactgttttcttttttcttatcaatttattatttttaaattaaattttcttttaataatttataaattataaatttatattaaaaaatgacaaatttttattacttatacatgaggtaaaacttaggatatataaagtacatattgaaaagtaattttttggctggcacagtggctcacacctgtaatcccagcactttgggaggccgtggcgggcagatcacatgagatcatgagttcgagaccaacctgaccaacatggagagaccccatctctactaaaaatacaaaattagccggggtggtggcgcatgcctgtaatcccagctactcgggaggctgaggcaggagaatctcttgaacccgggaggcagaggttgcggtgagccaagatcgtgcctttgcacaccagccaaggcaacaagagcgaaagtccgtctcaaaaaaaaagtaattttttttaagttaacctctgtcagcaaacaaatttaacccaataaaggtctttgttttttaatgtagtagaggagttagggtttataaaaaatatggtagggaagggggtccctggatttgctaatgtgattgtcatttgccccttaggagagagctctgttagcagaatgaaaaaattggaagccagattcagggagggactggaagcaaaagaatttctgttcgaggaagagcctgatgtttgccagggtctgtttaactggacatgaagaggaaggctctggactttcctccaggagtttcaggagaaaggtagggcagtggttaagagcagagctctgcctagactagctggggtgcctagactagctggggtgcccagactagctggggtgcctagactagctgggtactttgagtggctccttcagcctggacctcggtttcctcacctgtatagtagagatatgggagcacccagcgcaggatcactgtgaacataaatcagttaatggaggaagcaggtagagtggtgctgggtgcataccaagcactccgtcagtgtttcctgttattcgatgattaggaggcagcttaaactagagggagttgagctgaatcaggatgtttgtcccaggtagctgggaatctgcctagcccagtgcccagtttatttaggtgctctctcagtgttccctgattgttttttcctttgtcatcttatctacaggatgtgactgggaagctctggtttcagtgtcatgtgtctattctttatttccaggcaaaggaaaccaacaataagaagaaagaatttgaggaaactgcggagaaagtgcgccgtgccatcgagcagctggctgccatggattgaggcctctggccggagctgcctggtcccagagtggctgcaccacttccagggtttattccctggtgccaccagccttcctgtgggccccttagcaatgtcttaggaaaggagatcaacattttcaaattagatgtttcaactgtgctcttgttttgtcttgaaagtggcaccagaggtgcttctgcctgtgcagcgggtgctgctggtaacagtggctgcttctctctctctctctcttttttgggggctcatttttgctgttttgattcccgggcttaccaggtgagaagtgagggaggaagaaggcagtgtcccttttgctagagctgacagctttgttcgcgtgggcagagccttccacagtgaatgtgtctggacctcatgttgttgaggctgtcacagtcctgagtgtggacttggcaggtgcctgttgaatctgagctgcaggttccttatctgtcacacctgtgcctcctcagaggacagtttttttgttgttgtgtttttttgtttttttttttttggtagatgcatgacttgtgtgtgatgagagaatggagacagagtccctggctcctctactgtttaacaacatggctttcttattttgtttgaattgttaattcacagaatagcacaaactacaattaaaactaagcacaaagccattctaagtcattggggaaacggggtgaacttcaggtggatgaggagacagaatagagtgataggaagcgtctggcagatactccttttgccactgctgtgtgattagacaggcccagtgagccgcggggcacatgctggccgctcctccctcagaaaaaggcagtggcctaaatcctttttaaatgacttggctcgatgctgtgggggactggctgggctgctgcaggccgtgtgtctgtcagcccaaccttcacatctgtcacgttctccacacgggggagagacgcagtccgcccaggtccccgctttctttggaggcagcagctcccgcagggctgaagtctggcgtaagatgatggatttgattcgccctcctccctgtcatagagctgcagggtggattgttacagcttcgctggaaacctctggaggtcatctcggctgttcctgagaaataaaaagcctgtcatttcaaacactgctgtggaccctactgggtttttaaaatattgtcagtttttcatcgtcgtccctagcctgccaacagccatctgcccagacagccgcagtgaggatgagcgtcctggcagagacgcagttgtctctgggcgcttgccagagccacgaaccccagacctgtttgtatcatccgggctccttccgggcagaaacaactgaaaatgcacttcagacccacttatttctgccacatctgagtcggcctgagatagacttttccctctaaactgggagaatatcacagtggtttttgttagcagaaaatgcactccagcctctgtactcatctaagctgcttatttttgatatttgtgtcagtctgtaaatggatacttcactttaataactgttgcttagtaattggctttgtagagaagctggaaaaaaatggttttgtcttcaactcctttgcatgccaggcggtgatgtggatctcggcttctgtgagcctgtgctgtgggcagggctgagctggagccgcccctctcagcccgcctgccacggcctttccttaaaggccatccttaaaaccagaccctcatggctaccagcacctgaaagcttcctcgacatctgttaataaagccgtaggcccttgtctaagtgcaaccgcctagactttctttcagatacatgtccacatgtccatttttcaggttctctaagttggagtggagtctgggaagggttgtgaatgaggcttctgggctatgggtgaggttccaatggcaggttagagcccctcgggccaactgccatcctggaaagtagagacagcagtgcccgctgcccagaagagaccagcaagccaaactggagcccccattgcaggctgtcgccatgtggaaagagtaactcacaattgccaataaagtctcatgtggttttatcta

SEQ ID NO: 209 - DNA, 32744 bp, Homo sapiens
  source 1..32744: mol_type = other DNA
ctcaccccggccgtccggccgcttcattgtcaccgggcctcggggcagtgttgggggtggcggggcgccaggtcgccgacccgaggtttgggcgcgactggttccgcatcccctccccgccggccgaatctgcaggccccgcgcgccaggcaggcttcgcggctgcgcccccggcccgcgcaggtgaggggggcccgggcaagggagggggttgcagggcgcacggaggttggaggggtccggagcccgcgcaggtgggaggccctggtccagtgatgaagtgatggggatccggggcacgcacaggtgagtggggggatctggtgcccgcgcaattgaaggcgggatccgggggaagtgagggggatccagggtgcgcacaggtgagggaggtccggggcccgcgcaggtgaagacaggctcgtgcctgagggtgtgggtccccacctccatcccctccaccctctccacctccctccactcccctccggtccccaggacaacatggagtccagtcccggcatctctggcccggctgccttaagccctggggaaaatggggagatgggagctgccctgaggacaagtggagggctctgctctgcgcgtgggctctggcctctctgtccagggtcagggtcagggtcagggtcagcccaccctgggaaccaggtcctggcgctggtcatcagtccccgccccttcaggtcctgggagggacacagttttatccaagatgtagtggcctcccaggcctcccttcttctggcttggaggtttccatggagaggccccgttcgccatcccagagccgcttgcaagtgtggctgggagagcagagtcctgggctccaagggcttgcatgggtccagccaggggtggacagtgccctgcaggaggagggtgttaagtttcttccgcacagccggaagtgcataactgaggactgggacctggtcagtggcagggtcagcctctagggagtaggggtatccatcgctccgtggaagggaccttgggggacctgctgtggggtgccgggctgaaggaagcccagggtgaccttgggcgataggctgggtgcctgctggcctactggaggccaccgtggcagggaggtaattctcgaggttggtccctggcgccagcttctcccgttcatctacgggttcagctgagtgcctttccctgcaggtgctggggttgctcaggagccacacaattcataaaccaactgtgtgcggccacaggaagggagtccgagccggatggggagtgaagagtgatgggtgctcaaggaaggcctctgagtgcagggagggagtgtcctgagacctagaggcaggggactggccggggccaagctggctgagtttgaggagaaccagggaggctgtgttggctaaagccacaacaaaggggcacagcaggggagctggcgaggtcacagagagtacagggccagatcttgcaggagttggatgtgtagactttattctctgtgcctaggaagctgttgcagggtttttggcaggggcacatgcacgagctgagacccgttcagaaagatcagaaagactcgttcagaaagaggtgccatgtggggacgggctgggggccggcagggtttgctctgagaagttccaaagtaaggaagccagcatccccaagctaatcccctcgatcgatcgtcagaacccccgtcccctgctggaataacacattacccagggagtgtttgcccggtgcagccttgaggccttgagaccagcatcttgtctggacctcacaaaaccactcccgcgttttttttttttttttttttttgagatggagtctcgctatgttgcccaggctggagtgcagtgtcacgatcttggctcactgtaaactccgcctaccaggttcaagtaattcccctgcttcagcctcccaagtagttgggattacaggcgctcgccaccacgcccggctaattttttgaagtttttagtagaggtggggtttcactgtgttgcttaggctggtcttgaactcctgagctcaggcaatctgcctgccttggtctcccaaagtgctgggattacaggagtgagccactgtgcccggccaacacgcaacccctttttaaaatgtgtatttttacttaggggccgggtacggtggctcatgcctgtaatcccagcactttgggaggccgaggcaggcgaatcacctgaggtcaggagttcgagaccagcctggccaacatggcaaaaccccgtttctacttctactaaaaatacaaaaattagccaggcgtggtggcgggcacctgtaatcccagctactcaggaggctgaggcaggagaatcgcttgaacccgggaggcagaggtggcaatgagccgagatcgcgccactgcactccagcctgggtgacaagaacgagactctgtttcaaaaacataataaaataaaaaataaatcaaatgtcccttttacagaagaaaacagtggggctcggggcagtgactttctcagaatcacggtgtggggtagatggcagaacctggctcacatcgacaatggcctgtggcccaggctccctctggggtgctgctggcttattcccacccacgggccttgccctcgccacccacctgtccatcatccagggccctcctgccctggcatacactgacattgggctcagaacagctccctcatgttcctgtcgaggagcctgccaccagccagaggggtgcataggttgtgacaggccttcccaggaagtttggtggccagtggacccagctgaggctgggctggagatggtgggtgcaggggactgtagttcccccacggcatctcattgcagctcttgcttccccgctcaggacctgccttgtccaccatgaaaggcacccgggccatcggcagcgtcccggagcgcagcccagcaggtgtggacctgagtctgacaggtctccctccgcctgtgtcccggcgtcctggcagtgccgccaccaccaagcccatcgtccgctctgtctccgtggtcacaggcagcgagcagaagaggaaggtgctggtgagtactgtggcctaggagtccgggcccctgcctcctggagggctgttgttcagttggcatctgacccctgggtccagctccacaggtgaacaagtgcctcacatctggacatgctggatcctcgtggctgttccaggaggcaggtaggacttgagtcttacaggcgtgggtgctgaatcactagaaagtcaagccagagcttggattctttcagcaacagccccaggcctcctgtgccaccgccctttggatttgtttgaatcctcaggaaatggggttggctgggctcggtggctcacgcctgtaatctcagcactttgggaggccgaggcaggcgggtcatctgaggtcagcagttcaagaccagcctgaccaacatggtgaaactccgtctctactaaagatacaaaaaaaaattagccgggcatggtggtgcatgcctgtaatcctagctactcgggaggctgaggcaggagatttgctcgaacccaggaggcagaggttgcggtgagccgagatcgtgccgttgcactccagcctggcgacagagtgagatgccatctcaaaaaaaaaaaaaaaagaaagaaatggggttgacctgtggggaggggtgatgagctcctggtggccttggagaaacctagacgggtgtgtgggtgtgtgggcagcaggacagccgtgggagcttcggggtgagagctgcctttcctgcccacctctgggagtagggaggagggtgggtggttcccagatgggggctgtgaaaggcaggccgggcctgctgcaccctgagttggtgtctgccaggcccagtctttggggcaagggaggaatcgagccgctctgtgggggttggggcagagcctgaccagagtctggcctgagcttccgaatagcaagggcctgggggccttggcttccatgcggcagccggtctggggctccctgcctgaggtccgtgccaggcaacatagcagggcagagagaaggggtctggagggcagttgaggcttcccacaggaacccctggcaggcccaggccagggttccactgtgaataaaaggcttggacctcccccttctccttgaaaaagttattcctgtgtctgccctagaagcacccccaggtgggcagggtgtggcccgccagacggctagccgagttccggggtaagggcagccgggccagtagcggacccttggaccaagcaggttcccaaagcctgggccagcagggcggggacccgggatgtcctgatgtgtcattgtggccggcaggttgtctaaagatgtggtacgcctctaggcatttacagacgtaagctgtgaaaataaaaatatgctgcactgttttagcagaggggtaaccagcttgggctagagccgtctctgagcctgctgcctctcctgtccgcagccctgctcctgcgtcactgaccccctcgcccacctgccttggcccctcccgctgtttctaaagccctaggttcatggcacatggggcggggaagacgcactcgaaatcgcagatctgggctgggcgaggtggctcacgcccgtgatcccagcactttgggaggttgaggcgggtggatcacctgaggtcaggagttcaataccagcctggccaacatagtgaaaccctgcctctactgaaaatgcaaaaattagccgggcgtggtggcgcgcacccttaatcccagctactcaggaggctgagacaggagagttgcttgaacccgggcggaggaggctgcagtgagccgagatcatgccactgtactccagcctgggcgaaagagcaagactctgtctcaaaaaaagaaagaaagaaagaaagagggagggggagggggagggagagggagagggagaaggagaaagaaagaaattgcagctctcttgttgtgtggagactgttgtaaaagtttccgggctttctagtagatggtctttcggcggcatggccaggctctatccgcggccgacccaggcacctaaccacactcccagcctttctgctgggaaatgttctgttgctgagtagaggttcaaagccacagcgagcgctactcatatcgatccctcctttcctcggctggtaccattgcccgctcccgcagtgttgagtggcgactgctaacagtcccctcgttcatggaatgttccagctgttcacttcaattctttgaggccctcgctcgatccgagacggccccacccctgcatgcctgtctgccttctgttgtgcccatggtgggagctcgggaactgctggtggaagaggaacccccgccagtgtgtgacgtgacctcaggggtttctgttgtgcccggtccccatcctctcggccacctgccctgctaccactcagtctcatcgggattcctggagagcatttgttttggccaggcatggcttcacacctgtacaaggcggcacgtgattctcttcctcctggtgtttgtgggtggggtggggtgctgtcccctggctcggagaccttctcggtggccattggcctggggtttccactctaccccttgtctctaaagatcttcctgcgtccacggcctgctgtcccgggattccccatccaggatgtaactgcagttcctgctggtcttctggctcaagagatgtcggtgccagactgtagagggtccctcttccttgccccagctgtgtgcccacctgatcctctagccccctagatcattattcactctggttcccttccccttaaagaaaagaggtctttaaatcccaagagcacaagctcactggggaacagacatcactgtgcatatgtgtcatggccatgggggccacctgcccctccctgggcgatgttgcctccttcttgcaggtggagtttagggtttttagtccatgacttgatttaccatctgagcatgagtggtgcctttccaccgtggtgtccgtcagtgagtggcagccccttcatccctcccctgacatcccttatcttcctcttggaggctgcgaaactgaccccaggaaaatggagacaggatgaagggcacccataatcccatggccctgatgcaatgactggtgccattttgggggatgatttcaaaattcctaccatgtgttttgaataggccattcacacccaccatttgggaaaagggggctcattgagcagtgagcctgtcctgcccgaccttgcgggcctctcctaggcggccactgttctgtttctcctgcacccacacttactctgggcacacaggcatcagtgatgctggagatgtgttggaacaagtgccgtatccgtcagctgcgtggggctcctgcattctcttttctttttctttttaagacggggtcttgctctgttgcccaggctggagtgcagtggagaaaccacagcttactgcagcctccacctcccggacacaagtgatcctcttacctcagcatcctgagtagcatggattacaggtgctcaccaccctgcccagctaatttttaattttttttttcttttgagacagacttttgctctttttgcccaggctggagtgcatttgtgagatctcggctcactgcagcctctgcctcccgggttcaagggattctcctgcctctgcctcccaagaagctgggattacaggcatgcaccaccatgcccggctaattttgtatttttagtagcgacggggtttcgccatgttggtcaggctggtcttgaactcttgacctcaggtgatcctcctgcctcagcctcccgaagtgctgggattacaggtgtgagccaccacacccagcctactaatttttaatttttttgtagggacaggggtctcactaggttgctggtccttaactcctgggctgaagcgatcctcccacctcggcctcccaaagtgctgggattacgggtgtgggccgctgcacctgaccctgctcccgctttccttacattgttttgtagcagctgacaatagttcatcagatgatgcaccagaacttcacccagtgctcctctggattttccttatcatagtaccaagagtggcacagcaaataccctgtgtctttgccattttgcatacatgtaaatacgcctgtagaataaatcctaaaggataactactgggtcagagcataagtccatttaaaattttgaaaggggggccaggtgcggtggcccgtgcctgtaatcccagcactttgggacgccgaggtgggcagattgcttgaggtcaggagttcgagaccagcctggccaacacggtgaaacctcgtctctactaaaaatagaaaaaatagctggacgtggtggcaggcacctgtaatgccagctacacaggaagctaaggcaggagaactgatttaacccggaagctggaggttgcagtgagccaagatcgcaccaccacactctagcctgggtgacagcgagactccatttcaaaaaaaattaaataaataaaaaaatttgaaagggggccgggagtggtggccaatatctgtaatcccagcactttgcgtggctgcggtgggaggatcacttgaggccaggagtttgagaccagcctgggcaacatagtgagacccctgtctctacaaaaaaattaaaaaattagccgagtgtggtggtgcatgcctgtagtcccagctacatgggaggctggggcaggaggatggcttgaacccagaaagtttgaggctgcagtgagctatgatcatgccactgctctccagcctgggcaacagagtgagactctatcttttaaaattaaaattaaaactaaattgtaaatttttggccaggcgcggtggctcatgcctgtaatcccagcactttgggaggttgaggcaagcagatcacgaggccaggagattgagaccatcctggctaacacggtgaaaccccatctctactaaaaatacaaaaaaaaaaattagccgggcgtggtggcaggcacctgtagtcgcggctactcgggaggctgaggcaggagaatggcgtgaacccaggaggcggaacttgcagtgagccgagatcgcgccactgcactccaccctgggcgacagagcgagattccgtctcaaaaaaaatttttttttttgataggcattgccaagttgctgtccgtaaagatcattgccctaagtcacactcgcatcacagggtgccacggggcctgctccctcgtgctctggttggcacacgtgcagcacagttttggcctttacaggatccatatgtaacaaaagatatctgactgtactaccttttagtttactttttactttttattttatttttttctttttcttttttgagatgaagtttcactcctgtcacctaggctggagtgcaatggtgtgatttcacctcaccgcaatctctgtctcctgggttcaagtgattctcctgcctcagcctcccgagtagctgggattacaggcgcctgccaccatgccgggctaagttttgtatttttagtagagacaggatttcaccatgttggccaggctggtctcaaactactgacctcaagtgaatccgcccgccttggcctcccaaagtgctgggcttacaggcgtgagcctccggcgtgactgtacgatttttaaaaataaaccttttatgttagtatagttttaaatttatagaaaaattggaaagtgcagggtgttcccctgtaccgcacccagtctctgctatttgaatatcttacattatgatgggacgtgtacaattaacaagtcattattggtaaatcactgactaaagtccacacttgatttgtatttttgcagtttttcttttctgtcccaggatcccacatgatttttgggctgtgggtctcaggcttgtttgggctgtgagtttctcagactctccttgtttttgatgaccttcgagttttggggagagctggtcagggattttacagaatggccccctgttggcccttgcctgatatttttctcgtgatcagactgggtggtggatgggttctaggaggaaggccacagaggtaaagtactcttctcaccccatcctgtctggggtccacactgtccatgtgacctctcactggtgatgctgctggccttggtcccctggccaaggtggagggtcaggcttctccactgtgaggtcgcccatcccctgtgctctctggaaggaagtcgctttgttcagcccacatggaaggggtggggagttttgctccccctcctttagagaagagcatctatagaagttatttggaattcttctacacaggagatttgtctgttcaccctcatttataatttttttttttttttgagacagtgtctcacgctgtcgcccaggctgcagtgcagtggcataatcttggctcactgcaatctccgcctcccgggttcaagcgattttcctatctcagcctcctgagtagctagaactacaggcgtgtgccaccacacctgactaatttttgtatttcagtagagatggggtttcaccatgttggccaggctggtctcgaactcctgacctcaagtgatcctcctgccttggcttcccaaagtgctgggattacaggcatgagccactgcacctggccccacttattaattttttcaatcatttattataatggactcgtggatatttattttacacttcaagttataattcaatgctagtttgcttattttgttgctctcattgtcacagctttggccactgggaactttcaggtggctcctgggtccctgtgtcattgcccatcactttgtcttctgagcacgtccttatttctggccctataaactgctccagcctcatcttgtctatttcctcctccagtcctagaatcagccatttcttcaagaagccccggttctttttcttggagagtggtctcagagaccaaggtctgggagctgggtgtgcttgtccctactgggctgtttctggtcttctcagccaacagagcaaggaagtatgtagtgtacgccagttggtgtgtaatatacacactgtctatagatagtaacctacctagtaaccattggtgttgtgcgtcctactgatgtctctgccgctagtggcacctctcgcccccccgacgcttgctgattgtaacctcccctcctgcagtgaggatgcggccccatcgtctgctgtccctggtttagctcctgtgtgtgtgtaaggtgtgtaaggtggtgtcacagtggataacccaaaccccatgggaagaacaccaccaatgctgtgctatgctctgggacagcccctctgcacgggccccactcctgcccacggctcctcgggacagcccctctgcacaggccccactcctgcccagggctattaggaagagcccctctgcctttaggctgacaggccccactcctgcccggggctactcggaacagtccctctgcacgggccccactcctgtccagggctgcttggacagcacctcgccctccacctctgattttatttctaacttaacatctgtgagtgaggctgaacatcttttcttttcttttctttttttttttttttgagagggaatcttgctctgtcgcccaggctggagtgcagtagcgcaatctcggctcactgcaacctccgcctcccagttcaagtgattctcctgcctcagcctcctgagtagctgggattacaggtgcgtgccaccatgcccggctaatttatatatatatatctttttagtagagacaaggtttcaccatggtggccaggctggtctcaaactcccgacctcagattatccgcccacctcggcctctcaaagtgctgggattacaggcatgagccaccgcacccggccacatcttttcatatttttaagagccgtgtatatttccttttctatgaattgtccatgttctttgctgatttttctattttttctttttttttttttttcagagacagggtctcactgtgttgcccaggttggagtgcagtgacactatcatagctcactacaacctctaattcctgggctcaagtgatcctcccacctcagcctcctgagtagctgggactgtaggtgcatgccaccacgcctggctaatttttttattttttgtagagatggggtttcaccatattgctcaggctgggcttgaactactgggatcaagtgatccacccgccttggcctcctaaagtgttgggattataggcatgagccaccacgcctggccacaaatcacgtatttagaccctcaggctggcccaaggcccctggtaaacaaaggcactttcctcagggacttggcgtctgcctcccaggggtggagggcttgcagtccctgccgcatgggtggcttctgcctgctgccccttctgcgtctcttcagctcctccagcagcctccaggtcaccaagcctgtgctcagccccttgtcaatcctctcctcactgaccccttttcagggtctctcttttgggcacttgctgtctgatgggcactgcccaggcttcccagaaggcatcttgtttctcctagaaggatggaggcctccatggggcccttcctctcctgctgttgtgctccccacaccctgccttctgacctcccgaacacctttccagcgcccagtttggggccctgggagcacagcccagcagggattgaatgaggaattgcacagggcctctgtggccccagcgtggagaacggggcggcggctgtgtcttgtattgggtgttagcttttgctctctggtagtcactgtctgtagcctggtctggaaggtatgaccaagcccgtgagtactttctctggaagaatggtggcgcccacgcgctcgtgggatttccacccccagacctcacagtggcctctgtctggcctcctttaaccggctctgctgccgccgagctgggctccctgcctgcactttctgttcagctattttagaccatggtttcctgaccaggaaatgcccgtaacaagtgattggggtgtcctggtggggtgcatgtgtgtggctgctttcctggagcctttttttttttttttggtctttttttgaagttgggttgttttcagcttaaggattcagatttaaaaataattctgaaagttcataggtctcttttcctgggaaactggagacccgaggtcccatcctgtggtggcatgggcacctggccaggatctatatcactggtcgccgtggcatccagtggcatccggtggtgttccccagaccgtttcccactggactgtgagccctttcccctgaaatgtttgatttggagggttttttgtttttgttttttgacggagtctcgctctgtctccaggctggagtgccgtggcccaatctcggctcactgcaacctccgcctctcaggtttaagcaattcccctacctcagcctgctgagtagctgggactacaggcacccgccactatgcccagctaatttttgtatttttagtagagacggggtttcaccatgttggccaggatggtcttgatctcctgacctcgtgatccacccgcctcggcctcccaaagtgctgagatcacaggcgtgaaccaccgcgcccggcggtctccatctcttaacctggtaatctgcccaccccggcctcccaaagtgctgggattacaggcgtgagccactgcatctggccgatttggagggtttttaagcctacaggaaagtcagggagcgtagcgtaaggtacttatgagtgccactttcccgagcgccacttccccaagcgctacttctccgagcgctctgatcctcgcttagcgtccgcttctccgagcgctctgatcctcgcttagcgtccgcttctccgagcgctctgatcctcgcttagcgtccgcttctccgagcggtctgatcctcgcttagcgtccgcttctccgagcgctctgatcctcgcttagcgtccgcttctccgagcgctctgatcctcgcttagcgtccgcttctcggagcggtctgatcctcgcttagcgtccgcttctccgagcgctctgatcctcgcttagcgtccgcttctccgagcgctctgatcctcgcttagcgtccgcttctccgagcgctctgatcctcgcttagcgtccgcttctccgagcggtctgatcctcgcttagcgtccgcttctccgagcgctctgatcctcgcttagcgtccgcttctccgagcgctctgatcctcgcttagcgtccgcttctccgagcgctctgatcctcgcttagcgtccgcttctccgagcgctctgatcctcgcttagcgtccgcttctccgagcgctctgatccttgcttagtgtctgctgcgcagcctcccctccacccctttccacggacctggaaccgctgggcagttggctgcactcactaccaggtcttgcagcacctggtcttggttgcgtctccttagtcctcatcgtgaccccacagagtcgctctgggtgcccaccctgctgacggaggagaccgcggggtgaagggtccccaggggttctcatccactgaaggtgggagctcgcggttcctgggagctggtgggtgacagtgagcagctcccttcccgccctccctctgccaggggtgaagggctcctgcttgatgcggggacggggaagctcttagaggtcgggcctgagcccccctcgcgctgccctgctgtccagtgctcctgcccctctgaccacccactgcctttgaggccacttgggccacctgtaaccctagggccacccctctgttctctgactgcgtttctccaaagctggcggaggctgagcaaactggtgagtgagcctttgctgcataattaactgttttctccctttttgcaggaggccacagggcctgggggctcccaggccatcaacaaccttagaagatccaacagcaccacgcaggtcagccagcctcggagcggctcccccaggtaacccctaaggcccttggataaccctggccccttcccgggacctcaggtgccccaccctggcctgctcctccctgcctctgctctgcccttcctccagcctcctgggtcccgggcccttgctggctagtgaggcctggagtgacctcacgggccagctttgtgtcccaggcctcctctcgcattggggcgggaggcctgaggcagacactctcctgcactgcatccctcccttcctccttgctgtcccggcggctgctgggaccctgcctgagggctccgctgaagccctttccacctgccctctgaatgtcaaaagctgtcatttgcgagaggggcagcactgtgacccttctgaacccccacgctgtgcgcccctgttcccacctttgcccacttaaaccctgccactgtcccttgcggcctccaaaccagcgggctggggaggagctgcctcaatggccccagtgggggtgttgtggggagtggagccggtggtggccagcagcctccggggggacatcctctagcccagagtggtgggcgaggtcctgacaccacctcccaccaggcattgtccccgagcgagcagggtgctcctgtggggccgtggacctaatgaaggctgagttctgggtcaccaagggccccgggtggacccttcctgggaagaccaagaactgcggccaccacaccctatccagtgcagcctccgggagccgctcttagctcagcaactagcttcgtggagtcccaccaagcaagggactgccaaggccagctggtgtgtgtgtgtggtatgtgtgtggtgtgtgggtgtgtggcataagtgtgtgtgtgtggtgtggtgtgtgggtgtgtggtgtgagtgtggtgtgtgtggggggtgtgtggtgtgtgggtgtgtggtgtgagtggtgtgtgtctggggtgtggtttgtgagtggtgcatgtgtggtgtgtgtgtgtgtatggggtgtgtgtggtgtatggtgtgtggtgtgtgtgttatgtggtgtgtgtggtgtatgtgtgtgtgtggtgtgtttggtgtgtcaccaccctcagccaggccacggttttgatcccacctgatcagttgtgttcggcgcagctgtggcctcccatggggcagggtggcagtggggattggccaccagcccatgccttccagctgtgcttccccttctgctctgagcagcagcaggtgtggctcttggttcacagggaagagggtggcagcagaggcagccacggtatttaaggccctcggtgggcagccgggtgtgcaggctcacacctgcaatcccagcactcttggaggccaaggtgagaggatctcttgagcccaggagctcgagaccagcctgggcaacatagccgaaaccctatctctactaacataaaaaaaaaaaaaagaaaagaaaaaacaaataaggcccttgtccccagaaactgtgatcggtgtgactgatgaagcttctgatggaagctcaccctgaacgcccagctccactgaggaaccctggccaggcacagtggtcagatgggggctttgggcctagaaacagagttgctgctagtgcctcagcccctctgtcctcgcgggacctgcctggtctgtgtgcctagcgtcggcttcccggctggtgactctttccttgtgtgccgccctctctcggatgcaggccaacggagcccacagacttcctgatgctcttcgagggcagccccagtgggaaaaagaggcctgccagcctgagcacagcccccagcgagaagggagccacctggaacgtcctggtaaggtggtgcatgcggccccacgtcctggtctctgtgatgggattgtggcctggttcctaatttgttctcactgcctttgcaaaagggcactgcagggagggtgtcaagcttagatctgacatggcagaccccaggacatccacctgtctgtatgggaagttggtggctcctcccgtttgtgggagaggcagggaagggatggggtgtctgggtgtgtgcgggcggtgtcatgggctgagctgtctgacaggatgaccagccccggggcttcaccttgccatccaatgcccggagttccagtgcccttgactcaccagcgggcccgcggaggaaagaatgcaccgtggccctggcccccaacttcactgctaacaacaggtacgacctgtgcaggtgcccacgacgggcaccagtgggaagctcctggagtggagactgtgtgtgtctttgtcttgtttatggctcgttcagggtgctttggaatgaatgaatgagtgagtgagtgaaagaatggctttcattcccaagggcataggcaggaggctgccaggtggcgtcttgcacataaggggctctcggcccaggctttgctcttaaagagtttcaggccttggggaggctcacatggggctgagagggtggggcctggggaggggccttggctgaggaggcttgtagggggtcctggggaagctccaaaagaaatagactccaggcagctgcctctgagccttcaaggagagtgtgggctccttgggctaggcctcaggggacccatgagtggaagggattggggacacatttttcctccggcatttagagcctttgccaagggaatagtctcaggggagagaccgtgtggttattctccagggttggcacaggaagaattcttgcctttttttttttgagatggagtcttgctctgtcaccaggctggagtgcggtggcatgatctcggctcactgcaacctctgactccctggttcaagcgattctccagcctcagcctcccgagtagctgagattataagcacgtgccaccacgccaccacgcccgagtaatttttgtatttttttcgtagagacagggtttcaccatgttggccgggatggtctcgatctcctgacctcatgatccacccgccttggcctcccaaagtgctgggattataggcgtgagccactgcacccagctcaattcttgctttttaatttatttttaagttagaggcaggttctcatctgtcaccctgactggagtccacgatcatagctcactgcagcctctacctcctgggctcaagagatcctcccccttcagccttcggagcagctgggaccacaggtgcacaacaccactcctggctaatttttaaatttgttgtagagatgaagtctcgctgtgttgcccaggctggtctcaaactcctgggctcgggcaatcctccttccttgacctccccaaaagccctgggattacaggtttgagcccccacacctggtcctaaaatttaccttagtatttatcagttatatgttcatacacagccaaaatgtcaaacagcaccataggcttaaaatgtgctgcccctcctaccctccccacccctgcccctcctacctcccctcccgctgcccctcctacccccgcgccgcccctcctacccccccacccctcctacccccatcccgctgcccctcctaccccccacccactgccccgctgcccctcctaccccactgctgcccctcctacccacactcttgccgcccctcctacccctggcgcctgcccctgaggagcagcatcttttcaagctatttcttctggtgtttttttgtttgtttgtttttgtttttgagacgaagtctcgctctgtcgcccaagccagagtgcagtggtgtgatctcggctcaccgcaacctccgcttcccgggttccagtgattctcttgcctcagcctcctgggtagctgggactacaggcgtgtgccaccacactaggctaatttttgtatttttagtagagacggggtttcgctatgttggccagactggtctcgaacccctaaccttgtgatccacccgcctcagcctcccaaagtgctaggattataggtgtgagccactgcgcccggccatttagtgttttattgaaaacatttatgaatacatgccatgctgctcattcctgaacagctcaaaatcagtcctggtaggttattcacaccacccaaattggcagatgagccgcgctccaagaaccagctgttgaacgtttgtgagtgcaggctggtgccaggtgcaggccaggctggtgctgggcgtgggctggtgcctggtgcggtccggtgcaggtgtggtccggtgcaggtgtggtccggtgcaggtgcaggctggtgcaggtgtggtccggtgcaggtgcaggctggtgcaggagcaggtttcgtgcattgctctgctctctgcttatcctcattcccatcatgttctgttggtttgattttgggcctctgacatgttggtctttgcccagatgtcttggtggttcttgttaaaagggaggccctaggagttagctggaagcctattgcctggtggcttcacttcggggcactggtgcagagagcaaggcattgttgagtatccccacctaccagtgtctgtgggaccctcctcacaggctgagtctctccagagacaaacccccagcccgccccagggttcgagtcctggctgcccggttgcactgctggggaggggtggcggtggctgtcctgggtgaatcacccatctctgccccacctgcagggccagctggggagggcagggtggatgctagcggctcaagtgagggaaggggctttgccgagcagccagattctcccctttgcctcaaagcctgtccatgcctgtgggagaacagtgtgtctccgtgggggcacgggacctgccagctcctcgccctccctccccacaatgcctggaccctcccttgtgtcccagttgctctctgctggcccttctgtttctaatcctccaggtctgcagatgcccctttcctgcagtctccccatccctcctgtcagcctcggtattggtcctgtcctcccgccttcctgcgggtctgcggaggggcagaggcagagaatgtggcttccatccgtcgtgtgggatggggcttcgcttctgtgagtctgctctggaagctgattgtgagctgctggcctgagctgctccccccgtcttgggcacgtccagcgttcatgcctcgattctatcccctgccccgtgggagcccctggtccagctttcctgtcctgggaagaaccccatcatcagggcgcaggctgtggaaggggcctggggacactggacgacaatgctgccagcacgtagcaagcactgaaggcctttgttccctcccagcccgtgctgcgagtgtagctctgagatctcaggcgtcccctccagaggcctgaccattcctgtctctcttccggcctggcaggagcaacaagggagcagtgggcaactgcgtcaccaccatggtgcacaaccgctacaccccctcggagagggcgcctccgctcaagagctccaaccagactgccccctccctcaagtaaggtcttctggggaggccgcggggctgcggggtccgacctcagttagggcatgtagtcagtgcacctggggtccgacctcggtcagggcacgcggtcagttcacacagggttctaccttggtcagggcatgcggtcagtgtgcatggggtccaacctcggtcagggcacgtggtcagtgcacgtaaaaccgcgtggagcagctgtgaaccgggctccccatccacgtccgccgccctcttctgttcttgggtcggcagcttcccacagagagaaaacagcccagatgtggcacagtgaggtctggggctcaccctgaggtggggcccccaggaggaagccaaggcttgtgcagagcccagaaggcgtcacagcgggggtggaccgagcggggcaaaggagcccccgagtccaccaccacatggtcttgcggggattggggatggccttggggttgctcaggggtccctcaggctctggactcctgtgacttttgggaactttctcaatggaattttttttttttttgaaatggagtttcattcttgttgcccaggctggagtgcagtggcatgatctcggcttactgcaacctctgcctcccaggttcaagcgattctcctgcctcagcctcccgtgtagctgggagtacaggtgcccgccaccatgccgagcgaatttttttgtgtttttagtagaaatggggtttcaccatgttggcaaggctggtctcgaactcgtgacctcaggtgatccgcccgctttggcctcccaaagtgctgggattacaggtgtgagccagggcacccagcctctcaatgtaactttagtgagaagtttttaaatgcaaagagctcattatcctgggtaccagtgagtgggaccttgtcagggcacaggtggtccagaggccaggatgtggcacgggagagccggcctcgcacctgccgctgtccccctctgccccggctgccagcctgccagcaccacttccaggctcagtcctgggacttccgggagtgggcacctgctgcctgtgggcagagctgttcccctgggcggtgagacgagggtgttttcttcttacctgtcagcaacatcatcaaggcagccacctgtgagggcagtgagagcagcggctttgggaagctgccgaagaatgtctccagtgccacccactcagcccggaacaatactgggggcagcacgggcttgcccaggcggaaggaggtgacggaggaggaggctgagaggtgaccgatcttggggcggtgggggggggcctgagcctagaacacagaggtgggcaggcatcagggtctggggggctcacacctccgaggatagaaatttccatttaataattgttttaatttaattttttttttttttgagacagagtctcgctctgtcgcccaggctggagtgcagtggcgcgatctctgctcgctgcaagctctgcctcccgggttcacaccattctcctgcctcagcctcccgagtagctgggactacaggtgcccgccaccacgcctggctaattttttgtatttttagtagagacggggtttcaccgtgttagccaggatgttctcgatctcctgacctcgtgatccgcccgcctccgcctcccaaagtgctgggattacaggcgtgagccaccacccccggcctgttttaaaatattgagaccgagcagaccccatgtggtgtggttctatttacataaaacaccaagcaaaggcaagtttatcacaggaggtcgaaggctggtgtaggggtggcagagagggctcctccaggggcagtggaacattccagaactgcactgtgctgatggtcacacaactctagatttgctaaaaatcattgacttgtacactgaaaatgggtagattttatagtatggaaattgtacctcagtaaaactgttaattaaaacaacattaaaggcaaagaagatacagaactgaaaaaagccaacaacacccaaagctccaggggctgtgggcggagcctcctgtgatgatgactgttgggggctgtgcccctgccgcttgcccctggggagctggaggggctgtgggcggagcctcctgtgaccatgacagtcgtttcttgtcaggacagtcgcgggggtacctccctgcctggactttcggagcctgctcctggcggagccgtcacctaccctaccgcccagttagggctagggagaccaggcctgtagacgcggtgggtggcacgagggaagggggaccagaagcccgcaaccccttgaagccccccagttctgcccggggcagactgctcccgagctagggctcacacgttctgggttctctgttagtgcctttgctgagagaatccacacatggtcccgagagccaaggtgaagcatttttttttttgcttaatcagttttacttagtataatttgtatacaatagaaggtgcccattgtaagtgtgcagttccatgagattccaccagggtgtatagtgctgtctgtggacacagcagaccaagataaggaaacggcccagcaccaccaggcttccctcgagctccttccccgcccagatgccagcagccaccagtctgttccctcatagccctgcctgttccgaccaccctctctgtggagccacggcctgtggtctgcactggcctgagtcccgggcctgttgcctgtgggtagggtcccgccatccagtattcacgctgtagccaggtcatgggcatttgaactcttcccacttcctggcaattgtaaataaggccacacaggcctgcgtgggtaggcgtttcctctcccctgggcaccttcccaggaagaaggttttgggttttagtggagctggtccaggcggctggtcctgccatgtgaaaatggtccaggtgggctggtcctgccttgtgaaaagggctacttgagtgcagccgccggcttctctcttccccggctcgaccttccaccagcagccagctgggtcctgccggggcgctggtcctgtcttggccctgagtcctgctctccgggcaggtttatccaccaggtgaaccaggccactgtcaccatccagcgctggtaccggcaccaggtgcagcggcgcggagcaggagctgcccgcctggagcacttgcttcaggccaagcgggaggtcagtgtgggcgtctcagtcactccatgctcccccggggggtctggcccagaatcccaggggtttgagtttctgggacaggtggaatcaaagcctaggattgctcgtgggccccgtctctgggtgcagcatccttcttgaccctgggtccccgcggacagtcagggtggtcctcactggcggtcctcagggcctgggtgtcaggaaacgcctgctgggtccatcccaggctggagagtctcaggaggacgttctgtgggggcagagctgtctcccccacgccagaactgttggccacctgcgacgtagggctcatcctctgtagagcagagaaatggcaggttcaaggtcctggtggggtttcactttccctgctggccctgagattccacgaactctaggggactccagggcgttgtggggaaacctctggtctgggtctggattccgtcttccagatgtaaacgccacatggcaccggcttctttggcaggagcagcggcagcggtcaggcgaggggaccctcttggacctgcaccagcagaaagaggcagccaggaggaaggcccgggaggagaaggcacgccaagccaggcgagcagccattcaggtgctgaccgcgcagggaccactgagcagcaccgtggcccaggcctgaccgtgcggggctgctgctggggctccctgggccccgggacacttagcctcagggcagcttggctgtggagcctggggtcgtcctctcccagggacagtgctcagcgatgctcccactgcaggagctgcaacagaaacgagccctgagagcccagaaggcgagcactgccgagcgtgggccacctgagaatcccagggagaccagagtgccaggaatgcggcagcctgctcaggagctgtcccccacaccaggcggcactgcccaccaggccctcaaggccaacaatactggtgagagtggctccacgcccgccctgctctggggggtggactgcagccaggaaggaagtgcagcccttgtggacctcctctcggcctcctgtgctgctgcccatgttggcggccccagtcctcggagttaggggccttggcccccagctgacctgacgagggtgccgagaccttgacaatcaaatggtcctggacgtagggatccctacagagtagaaggcccggaagggaggggtggcactcatcctccacagctccacacccagaaggccgtggctccccagcggctcctctgcttctggggtcgcctccgcctcccccatgcctggctccttcccgggggtgcctccagagttgctgcccgccccgggatgctccctgtggaatggtgctgtgttctgctgtgcaggtggtggcctccctgctgcaggccccggagaccgctgcctgcccacctccgactcatccccagaaccacagcagcctccagaggacaggacgcaggtctgagcacagctgtccttcactccatcatggtttttggctttaagggccatgtctgtgccaggggtgtcctgagctgagcttctcccagcccctcctctgctctaggggccacttaagctcagagaggccacccaggaggtgtcttcttgctctgatgcatggtgctggctgcctcttggggagcctttgctggggtggatccagttgggtttttgcagatgtcctggggtggggggccttgcatcctcatccacaaaagaggagcttccggctctgaggggtgacctgacagccaaggctcccaggctgctcaatggtggggccaggtggctgcactcctgttttcctggagtggggcactgggaggagtcccctggtggctggagctgctctgggtttgagcagctgcagagaccgggtgggaaggtctgagccctggcctcaccttcctggggctgaatgtcgggactggggagctcccgcggcgcctttggggctctgcggttggcctcctatgtgggggctgctctcagctaccagcagccttgctgcatctgtctccctgctcttttgcaggacgttcttgcccaggatgcagctggggacaacctggagatgatggccccgagcagggggagcgccaagtccagggggccactggaggagctgctgcacacactgcagctgctggagaaggagccggacgtgctgccccgccccaggacccatcacaggggcagatacgcctgggccagcgaggtgaccacggtgtgcgcccgccctgcacagtctgtccacccacgccattcacacagagcatgcggtggctgtgggggttgggaaaatggggatgccacaggctcctcctggctttagtcacaaccctccctcccagagcccagcctcagctgccacctctgcctttggggaacccaagtcctcaggctgccctgacagcccccgatgctgggctcctgtcccacaggaggatgacgccagctctctgacagctgacaacttggagaaatttggaaaactcagtgcgttccccgaacctcctgaggatgggacgctgctatcggaggccaagctacaaagcatcatgagcttcttggacgagatggagaagtctgggcaggaccagctggactcccagcaggaggtggcccctcaccagcccgcacccggcccccagtgggaggaggcccctcacgagcctgcacctggccctcgggggaggaggcccctcaccagcccgcacctggcccccagggggaggaggtctctcgccagcccccacccggcccccagcaggaggtggtccctcaccatgtacccacctagttatgcagcaccccccacgggtctctcagggtggaggtggcagggcccgcattccccatactgcccccacctacccgctgccccgagctgcctccacgagcccatatgtgtggatagttcagccctctggagccctgctgtcctctgggttggtttgtcctgggtgaacactagcggccaggctaaatggagcagtgacgtgaactttattgtcacagggcaggaagctgggcagcatagaactttttaaatggtttgttttttattcctgaggccacggcccccatttcctgtactgagcaatgaaaacgacctctgctgggccgcctgccacctgccctccggcttcccacgggctcccgtgtgcagcagcccctctgtccccagagggcagggccgcaggggcatcgtgtcaggtccttggctgccccccgtcctctgccgcttccgcctgacgctcggctgtgtctgcaggggtgggtgccggaggcggggccggggcccctggagctggggtccgaggtgagcacgtctgtgatgcggctgaagctggaggtggaggagaagaagcaggccatgctgctgctgcagagagcgctggtaacgctgctggcactgctaatcccgggccctgctagcctcctacctgctgaggccaggcccaccggtcctagcgcttccctcctctgcccacaccctgcaggcgcagcagcgagacctcacggcccggcgggtcaaggagacagagaaggcgctgagccggcagctgcagcggcagagggagcactacgaggccaccatccagcggcacttggccttcattgaccaggtgagcggcccggggagcgcagaggcccggacccagcgcgtggctcatggagacttccagagccaggggcttcccactgccagggagcttcttcctctgttgggtgtcacacgggtgtccgctggacgcattccaagcctttcccatgccattcccagccatgcatgccctggagagggcactcctgtctttatccagagccgccccgtgtgagtgtagtggggtgtcctgccggcccctcagctcagtcgcagccccggttggctcctgttctgaagagaagagacctagagttggtctggggtgtgtgagaataggggcctccagggctgcttgatagttgtcacaggtgtgtcctgacctggggtctggcctggggccggcagtgaggctggtgtggtcctgacaccctttggcagacagtgagcctcctccagggctgggtgatggcctcggcagagctaccctcatcccaggaagaccctgacatcactgcagggggtgggctggggcttctctgacattcgccgggtcccccagctgaggacaggacggcggatgcaggcctgggcccgtgtttgcacacgtgcccccccactggccccagggtccatccacaaacctaggaggggcagccccaggggagggctgctgttagcctccctcggaggctgggagggtctcctccatcaggggtcctgctgggctggggccttggtgtagcacctcacctccggtccccaacacagctgattgaggacaagaaggtcctgagtgaaaagtgcgaggctgtggtggccgagctgaagcaggaggaccagagatgcaccgagcgtgtggcccaggcacaggcgcagcacgagctggtgaggctttgctccctactgcacggcgtcccaagcccggctcacaggccaggctcagctggcacagcccccagaacaggaccggacttggagtcctcattcctgtctcggtgtgtcagggccacagcggtgggtggggctgtctgggggagcaccgtggcaccgagctggtccactcctgcctctctagctgccaggctctggggcggggccgtgggcctgctgtcacagatgtggacgcacagtccctgcccggccacagcacggtagccgtggacccaggagcctctgcctggtctgccccactgccaggtccttgggccatgggacctgctctctctactgaccaggtgtcggtggagcattgactccccgccccttcccgctgtgtgagctccctgggggcctcagcctccctggctatgcttcccaccagcttgggcagtgatggtcccgagcccaggttctggagtggggcttggcactggcattttaaaatccctgcacgtgactgtggctgacagccggggttgaggactgccagtcccatggaagaatgcaggctctggggccgtcccgacaggcagcagcacccctctctggggcaaggcctctgcaggctgatggctgccctcccatgtctcaggccaccaaggtgtgtggcagggtgggcctgggcctccagcctggccccgggcgctggggagggcagcagtggctctgtctcggggcagcacacccaaccatgagtgccggccttgtgctggtggacctggaagcccggccctgactgtgcccacagggtggcaaagggacgggggtgtccttcgtgtcgtttcctcctgccctgttctgctcgtaggagattaaaaaactcaaagaattaatgagcgccaccgagaaagcccgccgggagaagtggatcagtgagaaaaccaagaagatcaaggaggtcactgtccgaggtgggccctcccctcccatgagccggccaggtgtggggtgggtgctgcggccagggcttcttttgagagagccataacttcaggcattcatgtagtccgagaccttcctgggcagaggtgaacactcatgccccaaccacccccgtcacggcctccgctgcggcttctgccgtgacccggggggcaggtgggctccacacaggagcctggcccagcccccagcatctaggcagttgcctgaaacgagggggctcagtgcctcacttcctcagggttgggctaggggagattgggagtttgtggacgactgtggcacgtgggccctgccacgggaagcagagtgagccacaggaggaggcaggggcaggcaggcggatggggcaggaggctggtgggtgttgtggtctgaaggggcctcggacccttgggtgatgtgcagggctccccgaggcctggtcctctcgctctggacacctgccagggtgcctgggagccgtcagtggtagcaccaggagtgtcaggagccctgagccccacaggctgggagaggcgccgtggccctgtgggggtctcttccccacctcgtgggcgtcaagactcagctgtgcttcgggttggatccaaggaggccctgggtgggcggggtcccctctgggcctgagacaggctggtcttgtgccagggttggacttcccgggcccaccctagctggacgtggccctagctggtgccccgcccccaggtctggagcccgagatccagaagctgattgcaaggcacaagcaggaagtgcggaggctcaagagcctgcacgaggcggagctgctgcagtcggatgagcgggcctcgcagcgctgcctgcgccaggccgaggagctgcgggagcagctggagcgggagaaggaggcgctgggccagcaggagcgcgaacgtgctcggcagcggtgggtggtggccccaggccggtggggccaggaccctcagggcggggagtcggaatcctcgaaggctggagtggagttcccatgtagaggtgggcgagggtcttagtgcagcatgcagggaggacgcagggcccttggccctggagtggcccttgggggcccagcctcagccgggccagtgtcctcgggcttgtgtctgcagttcatgcccgccgaggtctgcaggttctgcatgggtgcacgggtgttttcccagggtcagggctgggaacccccaccagacatccactctttcacaactggccccagagcagcaacccgtggataggcggcctcgaggcccctccagctctgaccttggggcccagggacggtctctctcattcactcccttggcctggggtctgaggggtgactgctgctcttgcgtcctgagccctgggggctggggacgtgcccagtggtggtcaggatctgcgggccacagggggcagtggcagcccctcctgcactgtctgcgccaccaggacagcctggaagccaccctctcctatccaccctgttgcctgtcgtggctggtcctccccagatgcagcttggctggtcccccagtctctcctcgaaggtggggtcaggacgaggccctggcgcgagcttgctcaggtcacggagccaggcacctggcaccctcaggccggaggcaggggaggtggataaggccccacgaggcacctgcctcccgccctccatgcccgtggggcaatgctgaacagggtgaggccggcacacgggctgagggaaaagggggcctggacgcggctccacagccacttcccaaagtgccacgagggcctggagctcagggaattgctgcgcttggctgatgggcaagttcctcgtggccttgcctgcccccgggcggtggctttgaggggccttgactgccgagggggaggggcagggccccggagggctgctctccagctgtgagtcaggcctgtggtcggcccgtgcccctgcggtgggtgggtcctgggaccgcccgtcccggcccccgagagccagtcctgaccgtcccgcaggttccagcagcacctggagcaggagcagtgggcgctgcagcagcaacggcagcggctgtacagtgaggtggctgaggagagggagcggctgggccagcaggcagccaggtgccgcccgggggcaccacgccctctcccagggacccctcgctggctgacccctcccccccgccccctcacccgctgacctctcccatccctgactccttactcgatgacccctcacctgctgactcctccctggccgcaggcagcgggcggagctggaagagctgaggcagcagctggaggagagcagctctgcactgacccgagccctgagggctgagtttgagaagggcagggaggagcaggagcgccggcaccaggtctaccaccggagggctgtgctgggcctggccagggggctgcacggggtgggactgactggcctcttatgtccgccccccagatggagctgaataccctgaagcagcagctggagctggagaggcaggcgtgggaggccggccgcaccaggaaggaggtgggggcctgggcacccaggtgggcaggggttgggggctgccctgcgtgggcaggagttgggggctgccccaggtgggttttgctgctgctgtggcatcctgggggctcgtttctgggagtcacatctggctgcttggggttgttgtctgaactgacgctgagtgtgttgctttcagcccatcttttgcgtgggctctggaaggatcaagggtgcctggagcgcatcctctgtggtccgagaacaggcgttgcccctctcgctaggggctgctacacccctgcgccccacgaccagcccactgacactcagatgtaccgagagggacacgcacaacaggggctccccccttagcctctggggccttctgtggggggtggactctgccacggtgacagtcccacacacattctcaccacccatgcccgccgcgaggctacagtccaggctgaccgtgcccgtcacctggtttcacaccctggtgggctgggatgtcaccgagcagccaggcaggctttggcagtggatgcctctgggcccagtagcatgctcccgacgtagccctgtggggcccagggctggacagatgaaactctgggagttttcagaggcttccaggaggctgccagcttaggctctgaatgcctgggcttgggggcccaggccccgccctcagcaacacgcaagtccaactttcccatcccatctggtagcagaaggtggcctcaggttgtcatgggctgtgggtctctgagggaggggaccgtgggctgtgcatcatgacgatctctggtacgcctatgcccacactgggtcctgacaacaggacgtagcgcacccctggacaggggtctggagagggggaaggccccttgctcccctgtggctcagagcctggagccccccaggaccccctgaggctggccctggccccgcgggccggctccgggtggcaacccccaggcagcgcatgtccccccaggaggcgtggctgctgaaccgggaacaggagctgagggaagaaatccggaaaggccgggacaaggagattgagctggtcattcaccggctggaggccgacatggcgctggccaaggaggagagtgagaaggctgccgagagccggtaaggacccgccatggctgggtcaccagctggggaggcccacgagctgaggcgcaaggacccgtgtgtgactgggctggagtgaccctgccctccccccacctccagcatcaagcgcttacgggacaagtacgaggccgagctctccgagctggagcagtcggagcggaagcttcaggagcggtgctcggagctgaagggccagcttggggaggccgagggcgagaatctgcgtctgcagggccttgtgcggcagaaggagcgggcgctggaggatgcgcaggcggtgagtgggcgggtgtcaggtgggcagtgggcacccacaggcccctcctgcatgcacgcagccagtcgctggcagccggctcactgccttctgtgcccacccaggtgaacgagcagctttctagcgagcgcagcaacctggcccaggtgatccgccaggagttcgaggaccggctggcagcctctgaggaggagacgcggcaggccaaggccgagctggccacgctgcaggcccgccagcagctggagctggaggaggtgcaccggaggtgggcggcgggggctgcagggctggagacggaggcggggcaggggagcgggcaggacctctgcagctccaagccccaggaggctgtggctgaggaaggccaggagatgcagagacagggccctgtagacagaggctggtgtgggttccatgtttggggcccaggagacctagatctgttttcctccctggtgcttagtctagggtgtcggccatccctgttggggcacccgagtgggtcgggtctgggcctggcgagttctccagggagtcagctcccggggccctgggctgggtggacaggcgctgaaagagctggggcactgtaaggttcccagcgagctccctccacgggggtcctgcatccttcctgtgccatctgctgccacaggctgagaggtgggtgtgggcgaggtgtcccaccccatctgg

SEQ ID NO: 210 - DNA, 6243 bp, Homo sapiens
  source 1..6243: mol_type = other DNA
cgcggcctgccgtgtgaggcggaagcggaagagcaggtctccaggggagcgatggcagccgggggtctgagccgctccgagcgcaaagcggcggagcgggtccggaggttgcgggaggagcagcagagggagcgcctccgccaggtacgccgccgccgctccccggcccggccatgcccggcccgcgccgccgctcaccgtccgcctgcccgcaggtgtcgcgcatcctgaggaaggcggcggcggagcgcagcgccgaggagggccggctgctggccgagagcgcggacctggtaacggagctgcagggccggagccggcggcgcgagggcctgaagcggcggcaggaggaggcgagttccgcgtgcggcgcgcgggcgcccccggtttcgggagcagctggggcgacgggcggtcccgggtggggcggcccggggcggtgaccaccctggcgtcttggcaggtgtgcgacgacccggaggagctgcgggggaaggtccgggagctggccagcgccgtccggaacgccaaatacttggtcgtctacacaggcgcgggaatcagcacggtagggagggaggcggaggcgtaccccaggacggagtatgagctccagtaatcgcgaaaaactcgcctttaaagcagctctaaggttttttctcttaaagaaacgaaatgaccaaaacttacctaaggtaaacgctttttaaacgcttggcctctgtgttacagccagttaaaaaaaacaaggagtagagatacgaatggggtgtagtagccgactgctcgcaggcacccccaggttatgtggacagagctaagcccaaagttgtgattttccactctgttctgtccatgtcgagggaagataagtagaaagtgacacagtaagagccagaatacaccaggtgaaggagagaattgcattgtgttttgagaagtttcactgacaagttatcctgggctgtgggacatcactagctttgaaagtgtagctggcacctcgtccatctaatttgatgggtgtgtgtggggtgttgggcacgcgtcggcctagcagatctgaacccaggtgatttctgttctcaggaagcttttaggtgacaaggatcaggcatgtgaacaaataaccatactgtaaagctggctgtgctgggtcgctagagcaaactcagacacacactctgcgctcttggagttgggaaacccacctgcgttggctttttgtgggaggtggccttgattgggccttgaaggatgggtgagatttacagaaggttggaatgaggcactccaagcaaagaacagcagaggctcagcagcaagaatgcaaaaagggagttcactactgactcaaatacccggagccctggggtttagtctcctccctccacaagtcacatgtaaaagtccagtcatgctgggcgcggtggctcatgcctataatcctagcactttgggaggccgaggtgggcggatcatgaggtcagtagttcaagaacaacctggccaacacggtgaaaccctgtctctactaaaaatacaaaaattagtcgggcatggtggcgggcacctgcaatcccagctactcgagaggctgaggcaggagaatcacttgaaactggaaggcggaggttgcagtgagccgagatcatgccactgcattccagcctgggcgaaagagctaaactccgtctctcaaaaaaaaaaaaaaaaaaaaaagtccagtcatgtaattatgtaacagtcacgtgacctgttatggaacttccaatggcaactaaaagcacatgcagctagtggatttcatcggagtgtttgaggttcccgtcttgaatgtgactgtcggaactactgtccgggggggtggtgcatttttctgagtttaagcaggagtcgggagtccccaaaagggaacacaagacaccttgatcctggcatatcttgtgtgccctctgtgggcctcagtttgtttcacaggattgaaaacctgggaagttagatgctcatctcatctgaagaagttgttctgcctttgttaaggtggagcgggaatagtcagcactgggacatgagaatggacagtcgcctggacccacctagggattcaccatttgctaaatgtgtgagctgtgggctcggccctgggggcactttaggaacatgactagtcttcccctgcagtgtggaggacacatgtgccacagagcccagctttgtgctcggtgccagagaggcttccggaggcaggcagggctgcgtgcagcctggaaggatgagccaggccaggcgggaaacggaagtccaggtagaagggaggagccgaattggggtacactccatatgggctcaggcaggtcagcctgtggaatgaatagaggccaacatgcaggccagcccggaatgcggcaggagtgacagtggctttccgtttctgggaattctgccagtacctacagtggtgccttttgacttggcttaccttttttctcgacatgcaggcagcgtctatcccagactaccggggccctaatggagtgtggacactgcttcagaaagggagaagcgttaggtaagcgggccaggcatggcctcccacataggctgggcagcggcagcacgggcctgagctccagctctcctcaccttgccttcctttctgcctggcagtgctgccgacctgagcgaggccgagccaaccctcacccacatgagcatcacccgtctgcatgagcagaagctggtaagagccctgggtggctggtacacttgccagggaccaggcagagcaccttggtgcccagtgggcaactaactgcacccgccctctgtctgccagttgactcccatgatgagcacccaccaagcgggttaggccgcgggtttgatcctcctgtgcttgactctccaggacagaaggggagctccccctctgaaccatcccatccgcagccagcctcagcctcagagctgctggtggcctttcccctttgtgattcccttgcatttttctgtggacctcagaagccatcctagtcacaggggaggcttataggacatctctggggaccttctgctgaacaccctcaaccaatggggtgtagtggttgatctgcctaggtccccagggacctgaaatgtcatgacccaagagagcatggatctggggcagagtggcccttgccaaaccccgagccacttcccaaccttgccgggacggtgcaacctcttgccctcccagccactccaggtgcatcagggctggaggaaggacagcccctccccaccacaggccctcttgactcctggtggttggacctgttgtgtgttttactttctaaggctctctggggggacggagctgcccctggttttgggagccatcggcggggctcagaacagcctcgctgtggccgggtactgacctccccaccaccactggcagccatccctccccttgccacccgttctgccttccaggtgcagcatgtggtgtctcagaactgtgacgggctccacctgaggagtgggctgccgcgcacggccatctccgagctccacgggaacatgtacattgaagtgagcagtcctgcagggacccagggtctccatgggcaggcgggtcccactcactgtgccctcttgcctctaggtctgtacctcctgcgttcccaacagggagtacgtgcgggtgttcgatgtgacggagcgcactgccctccacagacaccagacaggccggacctgccacaagtgtgggacccagctgcgggacaccattgtgcactttggggagagggggacgttggggcagcctttgaactgggaagcggcgaccgaggctgccagcagagcagacaccatcctgtgtctagggtccagcctgaaggtacgtgccgatgacacaatgagtgaaccgagcccctgcctgcccgagggtgtccagctctgcggcccagcactgtacagacttgtcccttgtgtgtgtgcggtgtctgtctgtctgcttccacaggttctaaagaagtacccacgcctctggtgcatgaccaagccccctagccggcggccgaagctttacatcgtgaacctgcaggtaactcgggtgctgagagccacgtccttagatctgggtcttagaacgcacagccagagacaccccacacccatgcaccagggcggtctgatagggcccccgtgggtgctcagggagcaccgactgagcccgtaggggccaaggctgacaggccaccgggaagggttgggctgctgttactctcactcggctttccctgtcctcagtggaccccgaaggatgactgggctgccctgaagctacatgggaagtgtgatgacgtcatgcggctcctcatggccgagctgggcttggagatccccgcctatagcaggtgagtgagccgctgcagcagcctgcttccccgcacctctgtgtgctgggccttgtctgtcttctctcgtgagctgagtgtggaggaagctctgaggtgtttgcagtggtgcctgaggcatgactgaagcgtggtggtctccagagggcctgacctcggtggttggcggagaccctgcgtgtgccactcctgccctggctgatgtggcacacacaatccccgcggggagagggattctgcccgcgtgctcctgctccaggcctccccgtggagctctccgagatgcctggtgggaagcatctggaggggacgagcactcggcagctctggtcagacagaatctgtgtgcttggttttgggagttggcgtactttgggaaagcttaaacaaactgtgccttaatacagaatttgtgataatttagacttggtgtatgtattgagtaaaaagtttacactctctttctctgtgaattttcagggtcttataggggaaatcaataacttcttttaatcaaagggttcaagaaattaaggatcccttcaccttctgggcctggcacttcttgtatgttatgtgtgtggtgttctgtgatgtgggctatcgtgtactgtattttttttttacattaacttagctcattttccttatcagtgcgtatctgtatcttaagttatgatctgtggttctgcatctccgtcagacacatgctttcttcacggggtcgtctgtaggccacgcctccctagtcagctgggaagggggagagggtctggtccacctgccccagcggtacaagtggaaggtggggcccagagttgctagtgactcatccctggagacggaggcagccctggggccactgctgccccaccctgtgtgtgcacgccgctcagtggtggacaaggacacggagttttgaggagaccgagctagtgtgggtgccgacctttgagtcaccacctaagaggtgacctctcccacatccgttctgcagcttggtaacaatgaagctgccgccaaccagagccccgccgcagttgacacgggagggaaggggatgggaaggcagggaccgcagacagctttcccgagctggggcaggtgtgactgcgagaggctcccaggcccgcctgatgccgctttccctttttggcaggtggcaggatcccattttctcactggcgactcccctgcgtgctggtgaagaaggcagccacagtcggaagtcgctgtgcagaagcagagaggaggccccgcctggggaccggggtgcaccgcttagctcggcccccatcctagggggctggtttggcaggggctgcacaaaacgcacaaaaaggaagaaagtgacgtaatcacgtgctcgatgaagaacagttggcactttgcagatggccagtgtcacggtgaaggctgggttgcccccacgggtctagggagaacgaactctttggggatgacattttcaccgtgacatttttagccatttgtccttgaggaagccccttgcactgctgcggttgtaccctgatacggcctggccatcgaggacacctgcccatccggcctctgtgtcaagaggtggcagccgcacctttctgtgagaacggaactcgggttatttcagccccggcctgcagagtggaagcgcccagcggcctttcctcgctcaccaggccagtctcagggcctcaccgtatttctactactacttaatgaaaaagtgtgaactttatagaatcctctctgtactggatgtgcggcagaggggtggctccgagcctcggctctatgcagacctttttatttctattaaacgtttctgcactgg

SEQ ID NO: 211 - DNA, 3751 bp, Homo sapiens
  source 1..3751: mol_type = other DNA
gagccgatgcccgattccgcgcccgccatggccgacaaaatggacatgtctctggacgacatcattaaactgaaccggagccagcgaggcggccggggcgggggccggggccgcggccgggccggctcccagggcggccgcggcggtggggcgcaggccgccgcgcgagtgaatcgaggcggcgggcccatccggaaccggccggccatcgcccgcggcgcggccggcggaggcggcaggaaccgaccggcgccctacagcagggtgagtgcggaggccggccgcgccggagagtgggagggggccagccggggctggggccggggccgctcgcggcggagacccgggccggcgggtggataaggctggtggagcggccgcccggaggtccggagggtgcgtgtgggcgcggagggggtggtgggcgggagcgaggtcgttctttcggggtccggtcccggaggctgagacccttcccagctctttgtttgttccggacgttggggcctcgtggcaggagaggaggggacgctgggcgcggcacaggcggcgggaagttagtctaagggaactgaagttgtgcggccgcggtgggaccgtgcggcctcgggctggggcagctgcagcgccggagggagcgctggcggccccgtttcggccggatcctctcaggccgggaagaggaagggtccggagtagccgtgagggtcaggaaagccctggactgagactcacagatctgctcttgttgcggtttttttttcagccaaaacaacttcccgacaagtggcagcacgatcttttcgacagtggcttcggcggtggtgccggcgtggagacaggtgggaaactgctggtgtccaatctggattttggagtctcagacgccgatattcaggtaagagacgagggcttctcggtgagccgttcgccctgcacaggacggatcgtgattttggggatgtggccctgagtccccttcccgccttagcgaagggagccctcccagctctgaagggctgcaggacagacccagtgctagtaaagccggggtcagtgcgcaggcaggtgcgagcctagctgagcctgaggaactgctgctgttagtctgaagatgggttctgtgagtgaaaatcccctgccagggcttccagtttctaacagggacaaagactgaccaaatgtgagtggtttttggctgttagacccagcccagttgctttttaaattttgtgcctgtcttagtgggttaatgtgagaaaaagaatcttctttatgtatcttgtgaagcacagggagtctgtttttctggctctgtttgccttgagtactgtcttataaagaccttgtacgctgtggttttatcactccccaccgccgtgtcccgtcagtgacatgactctcaaatccatctttggttgaagcttttcttttttaaaaaaagaaaaattgaatcccaatggcatttcaacttgttttctggttaagaaatgactttttgggaatcagttttggagatggctgggcagggttcagttgcccacagcccagccatttgccttgggaggacagagtagggccagtgagcactcacagtgtctcaacactttttttaaggtggtttctagcatccactggaaaccgcttttggtgaactccagttcccgctgtgtgcctgcggccggagtatccccacactctgggttccctctccaactcccagcctgcctgaggtcagggcagtttccatgacagcgcttgacttcagactttgccgcaggcttgagtaggaggagagggaaaggtgagccagaatctgcctttgggggaggggctggggtcagggctcccgaatctacaggcccttcaagctggtctgatatcggactgcttcccttgctcttgattttggcctttaccgtttcttggaacagcccttgggtgtgttgtacattttcctttgttgaagaggatagtggcttaattttgtgcccgttgctagtgggctttgcagcttcctctacctgcatcgtggtacacgtgtcaggtccccacaatggcaggagccctcagacccaggtgctcttggaagttgctgtccctcctgccccgcccttccctcatttcccgttaaccactgtcctgcctcccagagaaccacccccaaagcaactcacgcttccagggcctgtccctgggccaccagaaggaacgcagttttgttgcttttctgacaactgctctctgcaactcccaggaactctttgctgaatttggaacgctgaagaaggcggctgtgcactatgatcgctctggtcgcagcttaggaacagcagacgtgcactttgagcggaaggcagatgccctgaaggccatgaagcagtacaacggcgtccctctggatggtgagtctgggggtggacccacgctgactgtggggcttgtggagtttggggctggcacctgtccaggtaggaatatggggtacccctgtggctgaggacactttgcatttgcccctttgtctctctcttccatctgccacctctcatgctgccccacacatctggaccaacctcttgtgaacccccatccagcaagctacatccctcccctccttcagctccttccggaagattcacttctgtgaagccttctcagaaccgccatagtacacctctgagtgcggggctgtagtcgtaaagacaaaggtaccggttcttcttcgtcaggtcacccacacctctccacccacgagcaccccgatacctcagcgagcagcccacctagtctggactgagaaggagtgaggaggtgttggtggggttgcttccttgccattttgttctcccaccagtatctccaggccatttcccttgtcgggggcatttgagacgcacagaggccctttccagtgtttgcatggagaccagggtgtggcgccagctgggtgggtttcagagcctctcaatagaacgtgccttctcgtattctttgccgcaggccgccccatgaacattcagcttgtcacgtcacagattgacgcacagcggaggcctgcacagaggtgacttccggggcctctggggaaggggattggccgagggtgaggctgcgtcgctcttagggtccttccgggtgtgtgaacggtttcgtcttccttgctagcgtaaacagaggtggcatgactagaaaccgtggcgctggaggttttggtggtggtggaggcacccggagaggcacccgcggaggcgcccgtggaagaggcagaggtgccggcaggaattcaaagcagcagctttcggcagaggagctggatgcccagctggacgcctataatgcgagagtgagtcccgggggagccagctgggggcctggtcaaagccgcagtggggagcaggccgcctgtgaatgcaagcctctttctcctctgtgtttcagatggacaccagttaaacagaccagcaaatccgcgtgcggaacaggacccaggcgtctcctcttgctccctggttggggggcggtggctggggctgtgcggccaatgatggatttgtttcttttatgttttaaaataggatttaaaaactcatgtaaaggttttttttttttctttttttttttttttaattctgaaacagacctgttttgtaccgagttatttttgggataaattttactggttgctgttgtggagaaggtggcgtttccaccttttccataataaaatagaaatgtgtgtagaactgga

SEQ ID NO: 212 - DNA, 32748 bp, Homo sapiens
  source 1..32748: mol_type = other DNA
aggcgccgcagcgcagtggcgggcacgcgcagccgagaagatgtctccgacgccgccgctcttcagtttgcccgaagcgcggacgcggtttacggtgagctgtagaggggagggtgcaggcctgacccggcgctatgctttgtcctcttctccctgaaattactcgaattttgccctggggtaaagtgagacagaggtgtgtccgcctcagcgtccgctccgggccccgtcggaggttgaggggtagggaaagacgcactacccgcctcttctttgtgggctgggccgtccgcctccgcccaccctccagcgggtccccggactgcgtgctgggcgcctcggctccccgcttggagtgcccacctgcagactactgctggttgggtccatcctctcagctcgtttagtggggcaggtgtctcgagaaggggaaggggagctgctgaagggggagggtgggagtggtttcagtccaaagacctggctcccgccctagccttctgagctaccaagtgcttgttcccgccgtctcttcaccaccccttaacccaccgtgtctaactcctaagcgatcgatgagatcctaagcgggaaaaggcagatagatcaccttgggaagggtaaccagatgctattttattcttgctcaatgtggaagggtggttttgagcatttgggaaacacttgacagatcactttctcatttaactattagagtaacactgtgaagtaggctaagttggttattcctggtacatgaggtagaagctgacaccccccaaaaagttgtgacttcagtggtttttctgactttagacactctgttctttttatgttgctcgtcacagcaacgtaagtatgaagaacacttttaagttgcctgactctattcgtctctagcatttgcaccaacatttctcagatattcggctgtgttttggtagttatagggatgccaggatgaaaattgtgtgaaagaaaaattcatcctttgtagtaagtagttttcttgtttgcagggttatatatatatatatatacatatatatacgtatacgtataatatatatatacacacacacacagtgtgaggttttttttaaatggattatattttgtgtatgtcatcataatcattttctttgtgtgcgttttgctgcaatctctggtgctttgaaagcctgctaagagtaactgttaggactatccaagatcatattggcggccgggcgcagtggctcacgcctgtaaatgcagtacttcgggaggccgaggcgggcggatcacctgaggtcaagagttcaaggccagcctggccaacatggcaaagccccgtctctactaaaaatacgaaaattagccaggcgtggtggtgggcgctgtaatcccatctacttgggaggctgaggcaggagaatcgcttgaacccggacagcggaggttgcagtgagccaagatcatgccagtgcacaacacctgggcaacagagggagactccatctcaaaaaaaaaaaaaaaaatcatactagccctgaaaaggaccatgaaattggagatcatctagttcagtgtttctcaagcttcttgtgaaatgcagattcttgttcagtaagtgtggaagggagcctgagattttgcatttctaccagcttcctaggtgatgccactgtagctgctgctggtagtaaaaatctacaaaaaccctcttatttaactggtgacgaaaatgaagcacaaagagataaaggaacaggccccaaattactcagcctgttagtggcagagcaaggaatggacacatttaggatagatctaattcctgtgaggtaataagatgactttctaagtgtatgtgagtgttcatagaatgaatgccttttgcaatatttttgtctttaagttatgattactttaaaacaatctacagattgtcagcatggttttattgagtgctacgtgtcagggactgaacaagatacctccaggaggcgagacctgacatgggtgtgggagaatggatagaatttggatgagcaggtaggaagagcaacatgaatgtgtgaatacagtagaatgagtttgatataaagtgatgaaaaatggctagactttagtgcaaagtatgtgttagggagtattgggaattaagtttgggtaaattgggataacattatcaaggaccttgagggatctatgaagcttcaaaactaaaacgggcaaataaggagccatatggagattttttttttttgtaagcacaatactcatgaatgtgatatttaaagagacagaaatatcacctagaatgaaaaagtccagcaaggaagctcttgccagatttaaagtgatgaggatccgtatcatgaagtagcattggaataaggattactgagagaatgactgataggtaatttttcccaggtataagcattttttagttagtaagatacactatcaatgaacgatatatttttcagcaaataataagcaaaatctttacaattatttgccattttaatttttttttagaagtctaccagagaggccttgaacaacaaaaacatcaagccattgttaagtaccttcagccaggtacctggcaggtaaggcattgatatctatgaaaaatacttgcctcaatctttatacataccctgagctgtttgaaaaatgaggatgtcttttgtttttaatagtgaaaatgaaaaaaaatgtacccttgaccaagctttcagaggtattctagaagaagaaattgtaagtatgtttttccattgttaaaattttactgacaaattaataaaccatgttatttaaaaattgctttttttcttagaatggatatttaaacatctttttttagagtaacctttctgctttgtaaaagttgacttgatgactatacgatttctctaaggattttgatagcacaggtacattttaagggtttggtttaataaatgacaagagccctctccaagtgagataagaaaagttgacatgaggtcttaggaagaactagaggtgaaggtgggctctctcactttcctgtataagcagtgatacatcctgtagtggcgcaaaaggtctagtccaagaatatttagcttaggagctgggattccattccctcattttcctctggcatcctcctcatcagtaaacttacataaataactgagggctctccaacttcggtagagaagtctaaccatgaaaaatctgaatttgtttaccaataatggggcacctgaatgaaaggaaaagtttcaacagtttattcttggtcaagcaaaggttgggtccccaaaagctagattcccttctattggccatagtacaatgtccctttctctcagacaagtctgattaaaaaatgattctttccttttcttcagacttagtcacttttccattgtgaggcattgggcaagttcttttccttttctgtgcttcagtttcttttgtgagaggggaaataccgttctttcagtgttgttgtgtgtaaaacagcacttaatgaacactcagtaaatgctggttattatgattttatagaacctaagcactgtcttccttctattaaaaccacccctcagacacatgggtgtattagtagttaattctcatagccctgcctttgccctgtgccactggctgagttatggcttcagcacttctgtccttgattagcttatagccttcatcttgctaatataaccattttcttgagaccattggattttgagtgagttgcctgttacttgacatacttctacgactattgattctatatgttactgttaaattttggtaacttcatattagaaaatattgttttctataagaaatattgtattccatatttctgatagtcaatttaatatcagagtacatgtttttactgttaatcgagtttagtctgaactcttgcccctaaattaaattgtttctcctctgttggtagataaatcattcatcatgtgaaaacgttttagctattatttctcttgctattgggggagtaactgaaggtaagtatggttccgttttgttttgtttaaagtaatcttggacatgacatgctttatttaaaacgtcttctccccatacttctccacctatctgattttgtttattcttcaagttctgcctgactcccaactttgccaagaagtcccagttgaattagttcactcttatttctcatctctattatgcagtgcacattttggcacttcctttgttctccagttgttttgttcattcagtaaattttcattgagcatctactatgtgcctggtactgagctaggacctggagattcaatggtgaataaaacatattcccctgcttatgtggagctaatggaagaaacagatgtatgcatgccttactatggtgtaagtactatggtcgaagtgggaatgaagtgtagttagagggaatagagccaacatggctctctaaacttcagtctaaaggagtcaggagaggttttagaaaagaacatgagaactagaatgtgaggtatgaagaatttgttagacatactaagaaaggaatagctagagaattgtgtacagcaggaggaggagaggacaatgagaatgatgaggaaagaagcaggttaggtccatttataaagggcactgggtgccatactaaagagcagctgcaggccgggcgcggtggctcacgcctgtaatcccagcactttgggaggctgagacgggcggatcatgaggtcaggagatcgagaccatcctggctaacacgatgaaaccccgtctctactaaaaataaaaaaattagccgggcgcggtgtcgggcgcctgtagtcccagctactcaggaggccgaggcaggagaatggtgtgaacccgggaggcggagcttgcagtgagctgagctcgagccactgcactccagcctgggcaacagagcaagactccatctcaaaaaaaaagagcagctgcagatgaatgattccatttgaagtgactgctggcaggaaaactgggcaggagcctgttaaaatggctgtgtgtgatagctttagaagacttcgggtaaacaatgcacatagtacacagagcctaacacaaaataggagctcgttaaatatatgcagaaagaagaaataaaaaattagtttatcagcattcttctttaaccaatttggttaaaatactcatttgattaattcaaataatatatgtgaaaactcctttttaatctgtaaagcattattcacattatgtgttattttgatgcttctataaaaactggcacacacctcccagtataggggcaaactattttatgaacttaagttcataaattcactttgttaaatgtttatacaagctgcctaatcattcattcattaggcatagttagctgagtcccacaatgtaatattccttgtctagtttcagtcaaacagtgttcagtgtgtcctgagttcattgattacctttatacattattcttgcacagctggtgatgtttttaatgaagaagttgtacaaagtctagtctatacttggaacttttgagaaggataaggacttaagagcttaaactgtaaaggcatagtgcatttttattttagggataatttttctttttgagacagactataattggttatgtgacatgtttttaaattatccataaatatattttgttaaattcaatttggccgatatttattgagcttctattcagtgtgagatgctactggttaaagcatacaaaaatgcctaaccttaaaaagctcatagtctacattcaaaggtgactagttaggatgtgctaaatgctacagtatatttatgtagagtgtgcttcaaaagcatagatgaagtagcctgcttcaggatatcagagttatttagatgagctgacattcactctatgcttagaaagatggagttgaaatttaccatgtggtaaagaggaggaagagtatgcagaaaacaacattgtgaacaaaaccatggaaggatgaacatggcatggtgtttgggaactggggagtgggaactagaaagggatgtctgtggcccaggtaagggtaaggagagagattggtgtggaagctgggacacaggttgtgaaagctcttgggggaatcacactataacccaatggttcccagacttgctggctcatcagaaccaccagtgaatctatttttagatgagattcccaaaccttgcttagttctactgactcagaattttggcagtagaatctagaaaaagttctataattattaaatgtgagttaacttattccaggctatactgcaactaagggcagaaaatatgcttctcaaatctcttggatgtgcagggtatataatatcattgaatctaagtattgttagggactttagaggtcacctagtccagtctcatctctggcctagactgcttctctgctgtaacatccctggtgggtggtcattcagcctctgctgaatcatgctcattagtggagctcactgtttgagtcctgttagacaaatgtggttattggtgtgttcccttgtattgagttgaaatctgctgttttatttcacccactgcttctaggcaatatccctcacgtcgcattccagatatgatcttactagtgcagagtacagctggaaatatttcttccttttttctggacatagtatattaatgcactgttttgggcttagatcaccctagatatttttcctccatataccatgcctaagtgactacttttcttaaacacttatgagtgttagtaagtactcattgccttaaaatagaaggaagaatgagtagggatataaaagtattctaagtagtctagatagactacgtagaccttttcttaagaaaaatcttaattttgttgttctttaaacagtaactttctacttttccattctttcccctgaaacaatactgttattttaaatgttgaatcatagttaatatcaaaccttgttattttttgaagataatcttttcaaatcacaaagacaatttagcaacattacaaaacatttagaaataagaagggaaaacagtactcttaattcctctacttttaaaagctaccattcatctggtataatggttttagtttctatagtcttttaagaattttttttattgtcataaccatatgtacatacaattttgaatcctgccttttttcacttagcattatatcataagcatttttccaagttattatagtcgttataaccatcatttttaattggctgcattatattcttttgaatagcttagtggtgaagaaaacagactgtggagccagactgcctgggttcgtatcccagctctaccacttactggctctatgatcttggtgaagttatttaacctctctgtgtctcagttttcccattctataaaatgcaaataatgatatgctctacctcataggattgtaaggattaaatgtgttagtatatgtaaagtacttagtgtgcctgacatatagtaaatgctctagatcttgtcaagaattattgtcatcattactgagtgcacatatcaaaaattacttaagtatgtcctatttggggacttttaggttgcttccacttcttgtccttttaaaaccttgttatgagtaacaaagtgtaccttttaagatattcttcagaattatttttcataggctattctactctacagttttttaaacttttaaattggcttgtgctccacttgaaggtatttgtaccgcatctacaccttttgtattgttgggagatgttttggattgtcttcctttggatcagtgtgacacaatattcacttttgtggaaaaaaatgttgctacttggaaatcagtaagtgccttagtttcttttcctgctaactttatctttctatagatccagaattctgagggtagatttttttttttaaatttatttgtagtattgctgaatgccaacaagtttctgcctatgaaaaaattatatactgctctctcgggagagccaaataaaaaccatgtgtggagaaaaacttgaaatacaaaatttgatttaatttgtgtaataaaaattaacttgaaaattcacactttcacatgtttaaaacagttacttagtatcatgttttcttatatctgaaaatatttttatttcattgaaaatgttatttgcttaaaaaaagtgaaagtggcatagtagattctcagtgcatgttagtgttctttaatatttcactctggcaacttattattgaagaatgtgtaacaagttctgaagaagagtgataatttccgtcttaatttcagaatacattctattctgctgggaaaaattacttactacgtatgtgcaatggtaagtaattgagtgataaaatgattgctttttaagtgtaaatatgcccagaaaaacacatggttgaattaaataccagtgataacattttaaagatagattaggtatctgcatttttaactaacaatctgatttgttagaactcattattcactttaaactgtttttgttctgggcataagcttaaagtcagaaacgtagtaaagtttgtctttttcatgtcatgttgaacttgttttgttcctaatttatagtacttttttgtggcagtggtttcggcccccaatttaagaactactgctttaggaaaatactcttgacacactggtttagaaacttttaggtgtggttgtaataaacatagaattatcttttctgtgtaacgttcattttcatatattgttagatctcctaagaagattgtctaaatcccagaatacagtcttctgtggacggattcagctctttttggccaggcttttccctctgtctgagaaatcaggtaagcttttatgcattaaatgagttttctgcaggaaaatcttttccagtttttaatagattaaaatctgtcatgataatgagaaaaatggttctaaaaagttgaaagacatcatagaaattgtcactttattttcttttacttataaatgtatagcagtcctagtatataatacaggtaatcctgaaacaaagtcatggattcttttaagttcaaagcttattaatgtaaagttgaatcacactgaaacatgtagatatgaaccatcatatccgtatttcataatgtatgcctatttttgtgtttggattttctctcagtcacaactatttagctatatagacttcctttcatttctctttttttaacaaatttttattgtgaaatataacgctcatatagaaaagtacataaagcgaataataatgaaacaaatactgtataaccactatctagctcctgaaatgggacattgcttgtcctccagagccttccgcctccccagtatgttcaaatatgcgagattttaatatctccttgcttcagtcctcccttccttaatattgggctaatgtaccacctactttatatgttctgaggattaaatgaattaaaacatgtgaagagcttacattagtgcctgcatgtagaaagacctatagcatatgttagcagtggtttatgtgctttctttttgtcatcttatgtctgtgctgttttctttcatacttattttatgtggtcagggttaatatagatttaccacttcttgtatttctggctttctgtctgtgatcattttcccttttagacttttcttcagtgcaggtctgtgttttgcctaaaaatcgttacttctcctttattttttttcctttctttcttccaaactcctgttaatattggtattttgacctcctcccaataggtataagattctagattggcactagatacaggatttcatctcacgggaaataatctttactttgtcttctgtttcccatttttctattgacaagtcagatgtcagtctcacttcttgaagataatctacatttttttctctgcgcttaagattttttttctcctttggttttcttttagttttactatgatgtatctctgtgtaaatttctttttatttgtcctgcttaggattgtggacatcttgaatgtatggattagattcttccatctagtttgtaaaaatttagccattatctcttcaaatattgtgtatgcctctttatctttttctttttctggaacttcaattaaacatccattataccttctcactgtatcctctgttttttactccttatatattttttcatctgtttgtctctctctacctgattctgaataatttcttaagaattgttttttttagttttctaaacttggtaaacattgttactttattgtctgtatctggtaatgccaataccttaaataagtcttggtgggtctgtttctcctgtctgttttgactgtttctcactcatggtatcttgcctctttgtgtgtctggttatcattggctgttacgtttgagaagatgtgctcattgctactggagtatcactacttctaggccctctcagagaccagagctaggagagacatatgtgtatactaaccatactcatctgtatttgtttctgtatctgtcagtatatattttacatgaacagcagcaaaaaatatgagattctactgatacctctgagttgaatccagcaccagtagatctgtttattaacctctttctctaacagtaagaaacttggctctcattaactataatgtatttacttatttgttatacattatcactttttcattaatataatttacatttgtgcttccaacagaattataaattattctatattgcattctgtggaattgttctggaatagtcatgaataataaggatcaactctattataatgtatatagaattctgtttacagacataccgtgggttttgttccagaccaccacaatacagtgaatattgcaataaagcaatattcattcaaccaacattttttggtttcccagtgcgtataaaagttatgtttacactatgctgtagtctattaagtatgcaatagcatctaaaaaaatgtacataccgtacttctagaatactgctaaaaactggtaatgaccaccaaagccttttgcaagtcgtcatctttttgctggtgggggtcttaccttgatgttgatggctgctgactgatccagggtggtggttgctgaaggttgggctggctatgacaattttcttcaaatagcacagtgaagtttgccacatcaattgactcttcctttcacgaaagatttctctgtagcacatgatgctgtttggtagcatcttatccacagtagaactttcaaagttagggtcagtcctctcaaaccctgccgctactttatcaactaagtttatgtaatattctaaactctgtctcagaaaaaaaataaaaaataagccgagatcgcaccattgcacttcagcctgggcaacaggagtgaaactctgtctcagaaataaaataaatcctttgttgtcattcaacagtgttcgcagcatcttcaccaggagtagaattcatctcgagaaaccactttctttgctcattcgtaagaagcaactcctcatctgtttcaagtccaatcatgagattgcagcaattctgtcatatcttcaggctccacttctaattgtagttctcttgccatttctactacgtagatctgcagttacttcctccactgaagtcttgaacccctcgaagtcatctatgagggttggaatcaacctcttccaaactcctgttaatgtgaatatttttacctcctttgatgaatcacaagtgttctttatggcatctagatttgtaggtcctttccagaaggagttccatttactttgctcagatccataaaaaaatcactatgtagctatagcctcatgaaatgtatttcttagataataagacttgaaagctgaaataaccctttgatcctttggctgcaaaatggatgatgtattagcaggcatgaaaacaacattaatttccttgcccatctccatcagagctgttgggtgaccaggtgcattgtgaataagcaataatattgtgaaaggaaatctttttttctgagcagttaagtctcaacagtggccttaaaattgtcagtaaaccatgctataaacagatgtgctgtcatcagggtttgtctttttatggatggagccaaggcagagtagatttagcataattctcaggagccccaggattttcagaatggtaaatgaacattggcttcaacttaaagtcaccagctgcattagctcctaacaagagagtcagcctgtcccttgaaggcaagcagtgacttctctctagctatgaaagtcctaaacagcatcttccaatatcagaatgtttcatctgcattgaaaaatctgttgagtgtagccaccttcatcaatattcttagctagatcttctgataacttactgcaacttctccattggtagttgctgcttcaccttgcactattatgttacggagagggcttttttctttaaacctcgtaaaccaacttctgctagcttcgtacttgtcttctgtggtgtcctcacctgtctcagccttcacagaattaataagagagttaaagcctttctctggctggtttgcttgtctatccagaccactcagactttctctgtatcagcagtaaggctgttttgctttcttatcattcatgtattcactggagtggcacttttaacttccctcaagaactttatctttgcattcacaacttggctaactgttaagcgcaagagaactttcagcctgtcgtggcttttgacatgccttaattactaagcttaatcatgtataggtttttatttaaagtgagaaatgtgagactcatccttttacttgacacttagaatccattgcaggattattagttggcctaaattcaatattgtctcgtctcagggaataaggaggcccaaggagagagagagagtcatgggaacggttggtcggtgaagcagtcagaacacacacagcatttattgattgaatttgctatcttactagcttaggcaacatggcaaaagcccgtctctactaaaaatacaaaaaaatttagccaggcatggtggtgcttgcctgtagtcccagctactcaggaggctgaggtgggaggatcatctgagcttgggaagctgaacttgcagtgagccatgatcatgccactgcactgcagcctgggtgacaggagtgagtcgctgtctcaaaaaaaaaaaaaaatagtttactgtcttagatcttagatgggcacagtttgtggcaaaaacaaatctgtggcaaaacaatgacaatgttaacctcaaagatcactgatcacagatcatcataacagatataataataatgaaaaagtttgaaatattgtgagaattaccaaaatgtgacagaggaagtgagcatatgctgttggaaaaatggtgctgatagacttgcacgatgcagggttgccattcaatttatttaaaaaaacaagaaactgtgaagaacaacaaaacaaggtatgcccatactccaaaggtacttttaagaaatgaatttttgaaaggatttgaaaatcaaatgtgttaattttgactgctctttatggatttggcattttgtagttttgattatgacacaagttatacataagtttaggtgtcactggacttgctttgcatcttttttttgtttttttactaggtcttaacttgcagagtcagtttaatctggaaaatgtcactgttttcaatacaaatgagcaggaaagcaccctgggtcagaaggtgaggctgatttgaaatcttctcagataacatatttgcaagtttgttattaagatagtgggtccaggcacagtggctcacacttgtaatcctagcactttgggaggctgaggtgggcagatcgcttgagcctaggagttcaagaccagcctggacaacatggcaaatcctcattcctacaaaaaagtacaaaaattagcagggcatggtggtgcacgcctgtggtcccagctactcgagaggctgaggtgggagaatcgcctcagcccagggaggtcaagctgcagtgagccttgatcatgccactgtactccagcctgggcgacagagtgagaacctgtctcatttaaaaaaaaaaaaaaaaaaaaaatttcatgtaaatgggcctacaagtcatcaaaaatttaaaaacttttaactttatttccaacttacagaaataatgttttgtatgtaaaaaattcaaccagtgtttaagatagaatgtacagttattctgtaatccaaggtagaccatggtagattatggcatagctttctattaaagtggattaacaaagtagctatactttctgttttaatagtgttaatcataaggtagattatagaatagatgtactttctgttttaaacattgggttattttttgcagaatatgtattttttctataaattcatattatttctataaccactcataacattctctgtctcaccataccaggactttttgtgtatatgtacaaacatgttgtttttctccagaatgaggtcattcatactattctgaaattcactttcttcctttaagatttagttttatcttagtttttaaatggctcttgataaatctcagagtggatatatcacatttctctgcctgtggacattcagattatctctgatagtgaaaaacaatgttacagtgtctagtagtgtataatattgcatcagtctgcagcgtctgcatcaattatgcagatgtctttttaggataaattccagtaagtaaaattactgggttaaaatatatgcatattccatatttcaatagctattgcctggttacttctcaaaaaggttataccaatttatacagccaccagtggcacatggagaatgcctgccctttttccccacagcctcaccccaacagtgtgaattatcaatttttaaaaaatattggcttaattgatgtatatatttgaaaaataagtcttcttagttttaatttcatttccttgatcattattggtgttgaggaacttattatatgttggttggaatttatttttcttctgtgaattagctattcatgctgtttgctcattttattgttgaattgtcttgtgcatttccaaaacatttagccctttattcccagagggaatctattgattatgtttagaaatgtagatttgaaactttctactgtcttcatgactgtgttatatcattgtcatactgctcttgagttcttctgtccatcaggtaaaattctgattgccttacagattaactataggtctagatagttagtgactagacttctctaactgtgggttgcctaggaatgtgtaactgaccacttattctagcatttatctcttctgtctgatgactgcttcatgacaggctatacatttttttttcaatttagcacactgaagatagagaagaaggaatggatgtagaagaaggcgaaatgggagacgaggaagctccaacaacgtggtgagttttcagagcctaagctttttgatttacagagataatctcctaatttattgagtatcctctctggagtgaggagatagacaaggaggaaagaaattataagaaatttctttcatttgtaattttcatgtatattacttaataaatcgtaaatcactaatgggctttatctgctggtttctatattatgtgcagacagttcattgtttatatagactaccctatgcataatcccagcatttgaaaagccaaccacaggcagccttaggagctcctccccttaatcccttccattaaacttgtggacccagtgcctgtgtgtattgggctaacttttaatgaaataggcaagttaagaagcctttcctccttctctccccttgctcttaaaactgtttcttatctcctcctctgtagccctgtgctttctttccaaaagcaatcctcagtggcatagataggttctagaaactgcaacattaagtgaaatgatgtatgatgaaatcaattttcccataggctaacaaacaaaagttaggttcttatggcctatttctggtcacaaaaacaatcaccaaactcctagataaagatcaaaatgcttctgttattaaacattgaataaatgtgagctatacatgcatttgagaaagattaataaaaacaagtaagataattatttgcctagttattccaatttaaggttgtgggtggccagagcctgtcacagcagctcagagcgcagggcgggaaccaaccctgtacaggacgccatctgctcacagtgtgtatacccacccacccacactcacttatcctggaaccatttagacatgccagttattttcatgtacacctctttgggatgcaggagggaatctgactacctagagaaaacccacacagacatagggagaatgtgcaaactctacatagaccgtggccccagccaggaatcgattttttttttctcatcaacgttacaataaaacaatgttgaaggaaacatcgttatttgaagactttccataatttcttcctagtgctggcttagaagcaatgagcaagagaaaagagaaggcattaaggaaaattttccttcactggcactcttccaggtgtctgaggtgatgagagtcattagttataattgaaagaatttccattactgtctagaaaatcaagatgggattcctgtatctgcccagggagatgtatttctggcatcccagaattcaaattcaaacacatctccagaagaaacattagaggtagtgtggctccaagcttaactccaatacttcctagtcatgtgacctggggccaattacttaaccttctacaacacagtttccacatctttaaaatgtagtaatgccacctactctctacagttaagaggattaaataagacgatgatcagaaatagtctattaaggcactaattgtttatatgtagtggtaagtgtaaagcacttagaatattgtctattcagtgtctagtagctattatttgttatcgttattatttttttttagagacctatttattcattatacatgaataaagtaggctttaaggtctggcctgagcaacataagggctctggggcaagttagtaggctacaagatgatgagtcacctgaagtgtaaacagcccaaaagacactggccagtgcagttttgtctgcttagattttgcctaagactgtatagacaattcatccctattggttatgtttgtaaatcacttaaataagactcaacactcagctgcctctgtcacagtcactaatgttgaatagagggagaaaatacgtgaggaattactttgtgacagctgttatcaccagatggtcttaggcactgtaatttacaaagcagaactcattacccatctacctacaatatgaagtccatttcagatttggctcaaatacaccagtaaacatttttgttaagaaatttcaatgtataacatcctgtaaaatagctgaacatttaaaaaaatatatcaagttttccagagtttttttggttaaaatagttacaagacattctattttacatagtaactgggtctctgatttgttattatttgcaaatacaataattggttacatttgctttgtgtgggtaaacagaaaattcaaaagtttctgtggagtgttgaaggtggaaggcaaattgcaagtgggttgaagaatgaacaggaaggtaatgaagtggtgacatggagtatagacaactctttgaagaattttattcagctgtgaaggaaaagagcaagggacagcatctaggagaggggactttaaatttttaaaaatatattaatgcctcaactgtaaaaactgcctaacagtaagatattaacactacttcaaaatttattctgtaagacacctcaaatacccaccaagccaattaaagataaaagggaagagatcaaaagtcttttacaggtaggagatggtaattagcaacatggaataatattgtgattggtattaagtgttaaattagatgtgaagttcttagcaattgagacaaaaagggacatataatggttgcatgagtctcattctctgttagaggtagccccatttttaagagacaaactttcctggtacatttcaagaggtatttattatattcaatcttacatgttgtaactgagtaacattttgttactcagtgtgtgtgtgcacatgcacttcagaaacattctttatcaaatgtatggaactatacaaatattggttcttgttctttcatgaatgtaaataatttatatagtgctatttcttttctctatttactttaacgttttagggaatgttctttttgcggcttttttttttttcttttttgagacggagtctcgctctgtcacccaggctggagtgcagtgctgtgatctcggctcactgcaagctctgcctcctgggctcaagcgattctcctgcctcagcctcctgagtagctgggactacaagcacgcaccacaatgcctgggtaatttttgtacttttagtagagatggggtttcagtatgttggtcaggctggtcttgaactgacctcgtgatccgcccgcctcagcctcccaaagtgttgggattacaggtgtgagccaccgtgcccagcctgtggctttttttaaaaacccaattcatagaaaacccagaggtataatcttactgttgtaaatcagtgaagctgctttaattatagagagaagttaatgtgtacatcattgttttcctactttcagagttgttactagggaaaagtttaggaagagcgaaagtaaacatgcccattagagtctttcagatactactaattcatgatgaaagctttggcaagaactagatttagatttttgttagttaaaagtcagtattcttcactgttgattttcacgtgcttcagatactagccgtttatcagatattagctgttttaaaaattaaaagaataggccgggtgcagtggtacacgcctgtaatcccagcactttgggaggctgaggtgggcagatcatgaagtcaggaactcgagaccatcctggataacacggtgaaatgctgtctctactaaaaatacaaaaaattagccgggcatggtggcgggtgcctgtagtcccagctactcaggaggctgaggcaggagaatcgcttgaacccgggaggcggagcttgcagtgagctgagatcgcaccactgccctccagtctgggcaacagagtgagactcctttaaaaaaaaaaatttaaattaaaagaatatgtattgacactgtagatttgtgacatatcaagattagaagttgaattagtagtgccataataaagttactagataaagggcttatttttgtgatgctaacttgatatgtaccatatatgtttttctcatactggtgcttcttaggatataatatttttagttaggatatgatacctgtgacttttaacatagattcagattaacattggtttaaacaacataaaagttgatttttccccctcatatcgaagtctagaagcaggcagtccaaggctggtaagggagcactgctcggtgagattgcctagacccaggcttcttctaccttcttcttccatcatcttggtgtttgccctttttcctgtagtgcaaggtggctcacgctcacatctgcattctagccagcaggaagaggaaaaggccagtgataaaatatggcccaaaagttgcacatatgacttccgctctcaactgattggccagaatttaatcacatgaccatgcgagcagcaagattggttgggaaacataatctttaattctgaataaccatgtgtccttccaaaattcaggggctccaccagtgtagataaagagtctattggggtctatgagttccctaaaatgatttgtaaaagtttatataagcatttgtgaatgtgtacttttctgataactttcattagcttctgaaaacggtttgtgaccaaagctaagttaagaatatttagatatttgtaaaagaatttgaatgatttatttaatataacgtttattttattagctctattccaattgattacaacctgtatcgaaaattctggtcacttcaggattacttcaggaaccctgtgcaatgctatgagaagatttcatggaaaacttttctcaaggtaagttgccattgacagactatcagaagcccagtattttatagacagtgatagagctaaaacttaatcttgtctaacatacttttcactatgtaattctgcctcttacatttttataccaatttcataacaagtgaaattataaattaatatttaaaccactaatattgtgaagtagtatataagaatcggatatttaaaagttcgtcattacagccttgctttttttgaatataatgagtgttgttaacataaattgatattttgcagaatatattctatctttgtacaaaattattttagctatcttgttgaaacagaagtcctcaagtcatggctctgggccagatctaacctactgcttataaacaaaggtttattggaatagtaccatgaccatccacttacctgtggctgtttttgcactataatggcacagctgagtagttgcaactgagattataaaggccacaaagcctgaaatacttactctctggtcctttacagaaaaagtttgccaatcctgttttagaagaatttgttatatttttcttggctacttaaagatcagttgtccttttttgtcataattaaaatctaagataaataggtagttctcagaatagcatggtgtgtgttatgttatttttaatagtttttgttttatatgcaattttttgtgggggcagcaccatccaaattcagattaagtggttagtgagaaataatctggaattgtcttctaactggacagaatttggtggaatttatttgctcagtttttagcacaagaaatgcgtaagagtttccacaggtggttaaacaatttcactggtaaatttctgtacactcttaaaaatgttccctaatctatttgtcccttacacagacttcttaaatcatatttcttcgttttttttttttttttttttgagacggagcctcccaggttcaagggattcttcagcctcagtctcctgagtagctgggactacaggtgcccgccaccacacctggctaatttttgtatttttagtcgagacggggtttcaccatgttggccaggctggtctcaaactcctgatctcaagttacccgcccccctccgcctcccgaagtgctgggattacaggcgtgagccaccaccactggccaagaaattatatttctttaggagtagggagcttgtacctacttttgcaacaagtgaaatatcatacaaaatagttttaactcccattctgctatcataatttgtattgttagtgtgccttgcaatatacagtctacatacatgattgactgggagtaaattctaggcattttgatgcagaaaagcactaaacaaatttgggtaacaatgtcgaataaaactaatatttttattttgcagtattctgaagaagttttagctgtttttaagagttataaattagatgatactcaggcctcaagaaaaaagatggaagaattgaaaacaggaggagaacatgtatattttgcaaaatttttaacaagtgaaaaggtataagtttttctttttcattaagcataataagaaatggtcttgttttatttccgtttagctgacagcctttctaagttaaactgaatagaaatgtttcttattttactttgggttaaagctgattgattaatgttagtttgaaagtcccatttcttcctttcagaagtaggactaatttggtttcaaaggtgaaagtagttctacattaagtctgttttgtaaactaattttggaataaatgcagtttaattactttcatgtctatatattttaaatgtcaagttaggatttaatttgtatatgaaaatatttcataattattatttaggtgcaagtaaggggtttaaaagttccttgttaatcttatttatacattttaaaaagtaaattttattcaaatataatgctacaagattatgtaaagtttctagtcaagatggcacattgagtttatgtttcgactcactccctttgctccaaacacatagcaatgacgggtaaaatataaacgagaaaacaaaagagacaaggctgggcttccagaaacaagataaatatcttcatggaccagaaatgccaagtagtgagcaaaactgcagcctgggcctgctggactctctatccaaggcaggtggtggtgtccaggaatttggctacaagtaacagagactaaatgtgcaccatgtgggacaaggggccagagccagattcacttcttgaagccaaggactagggtggaacttttatccagttttgggaagaaactaagaaaaaatattgccagtcttctgccaagggctatggttttataggaagttgtgagcctagggataacaaagacagctttgtgtccatctgcttgctcagtgaccagatatgtgatatgctcagtatacttatgaaacagctgctccaagaagtcatcataagacttcttctagacttttggactcaggggccctggtagaagcagatgcaaaactgctagacagggaaggatgtacacagagagggaggggaaaggaagtaaacaaacatcccaaaagaaaaggctcctgttcaaaactctgataaattaaaattccaaaatccataaatctaatgctaagaaggatcaccagcaaaatcaactattgggatatatatatatatttattccagatgaaatatatagcctgaccaagactttatgtatgttttggatactcaaaaagataatcgatgagataacatccattgaaaaggaacaagaaatcatgaaacaaaagcaggctgaaatgaagtaggacagtcgatacaactaatcgggagtcttgggaatgaaaaatacaataattgaaaccaaaactcagcacacagaattaaactatacactggacatagatgaacaaagaactagtgaactgaagaaggtgatgagaacttcatccagcaagcagcacagacagattttttttttttaagtggaagagcagttaaaagccatggtgaatagattgggaatttccaacatctgtctagtaggatttccaaagaagaaaatggagggaatggtagagaaactggattgcaaagaattgaaggaaatctcaaatcctcagcttaaaagtgtgtcacaactgccaagcaggataaagaaagataaatctactcttcattacatcatgccataactgtgggcattcagagaaaacctaaaagccactaagggataagaaagacaaatatactgggaaggcacagcagtttgactgttagcagatttctaacatatcaaccattaataccagaagacagtagagaaatattaaagtgctgaaagaaaaatgacattcaatctagaattttataccgagttaaatatactcaagactgtcgatgaaagaaagacatttttatttaaagaccaggataacttaccactcagtgaccctcattttgaaaaaaactactcaaggatgttcttcaggaggaaggaaattgaacccataagaatggagtgggatacagaaggcaacggtgagcacaaaaattgaaaaatatgacagtaaatttactattgactataaacacaaaaaagtcatgaatgatttaaaatttttttaattaaaaaattttattaacgtggaacttaactagatgacagtaataatatggaaggggaaagcagagatgtttagtgagtaatttaaaattatggcagtccttgtaatcttcaggagtaggaaaggaatactgaatattccttttcatgtatattaaaagggtaaccaccaaaagaaaaccaacttgttgctctcaaagaacagagatcaaagggaggcagggaggaatctagaccactttataaatccagcgaatggcagaaaaaaggaagagaaaggaggagagaaataggtcagtaataacaagtatagactgatttaatatacctaataagactttatcagattggatttttaaaactccagctatatttgttaatttaaatgaaacaaatatagaaaccttttggttaactaaagaattcaaaagttttattctacttcatgtgtaagaaaatcccaaagctcttcttgcttaacaaagaaccttcccaaggttacctacttttagaatgcagaggtgtcagtttaatattatcagggcaaaaaagttacaaaataaaacaaccagtaagagttgtgtatttttaagagttacaggtccacatttctcaggacatgacagctatttcaaaactctggatgtcttaattgatatatatatatatatttttttttgagacggagttttgctctgtcgcccaggctggagtgcaatggcgtggtcttggctcactgcaacctctgccacctgggtttaagcgattctcctgcctccacctcccgaacaaatagcatttctaaagacattttagtaatgaaaaacagcaggattaaacattttcagagaaatctccacattggaatatgggattgatgcttttatatcattctccattcactttgtcacacttggctttctaatagtatctctccttttctgattctttgtgaacttgctttcaccagcagttagaacatgaactttcaggattaagcactgaaatttcattaattaatatcacatcacgaggaaggtaaaaacagctttgagaagcttaaaacttaccataggagtaagaaaaaggcacaaaattgtaccaaagagaatgtgaggcatgtaatgttttgcatcttcatttccctttgttgccccttaagcaacaactttgtcttaaatttacagtcctctttgtacattcttcatattttttggtgtatttttagtttttactacttaatatacaagtgaaaatatttgtaatgcattacgtgtatcatggaaaatatgcaacattttataagctttactgctgcactgaaagaagccttccagcatctctgtaccttacatggtgttttgatactaggattcccaaaaaggccttcacacctaaatatatgccagttttgggcctgatgttactttcaacttttgatatagatttggtaagtcatgagaaaggtctggatttttcagggatatgggtgccatattccttgccagtaagagctagctaaagtgaaatctaaagctatgattatttggagcataactctttagcctatcatttcactggtgagcaggtttagaaaagtgcttgtcattacaaggttagatctttcatctctgtaatagagccgtgaccccatccaatgggaatattatccagaagcattgtgttttgttacatgaatctggtcagacttttccttagggatagtccggaaacaatgcttggcaaggatgatacaaactttttttttttttttgagacactttttttttggcccactgtaacttccacctcctgggttcaagcgattctcgtgcctcagcctcccaagtagctgggattacaggcgcccaacaccacgcctggccaatttttgtatttttaatagagacaggttttttgccatgttggccaggctggtctcgaactcgcagcctcaggtgatctgcctgcctcagccttccaaagtgcagggattacaggcgtgagccaccacgcccagccagatgatataaactttatagttggagataggccagtcatgtggcaactacaggtaggtagaggttctacaaataaaatgggtgtctttgtaaattattgtgtcttccttcttaaagaaagaagtttcccctagaaacaaagtgccacatttttgtactacctggagtgtgattctgaatactagtgcccaacagtatagttccctttttagcagagcaaaataatccagggttactacttgctaaatgtagtgctgatacacctgggttgcttattttctaatgcagtggaaaagtatctgttctttaaggttagtccaggatcatactcagaaatgttaagggaggattttacctctaattgttcaacttataccaaataaaaggcactggtattgtagggattcctccctctgtactatgtagcatgtaaaagcagaacaacatttcaaaatgtttaagtaccatgagtattaccatgatggttaaaggaatatatttttggatcttttaagttctcacagaaaagagtataataacactaattagatataggctttagggttacccagtccttcagaataatacacttctcactttccatctgagactcaatgaccaaaatgatcagatggaatactcagtggctagcagttaccagggtgaggttacccacagttatgtactgttgaccctagtgtggtcattaggccattcattttcatggagaaaagaaaattcacaattttgcttggtctctgcattgtgtgaagaggcctctagttaggacttttggtcattttttaaaaaaaagttcctggcagtaagaaactatccatatagtcattctgccttaaatgttttgtactttttatgtccatttgagaggttgaatctttatgtagtaacggctaaggtgggtctcttataagatatactatagcctagctaggagcaaatgaaggcagaagcaagaccctcctgttaacaagtgggcaggctaaccactatgctacaatttttttttttatctcattagttgttctcggcatgggaggcttttagatagctctggaacagggttgcacagcaggaggtgagcagtgggcaagcaagcgaagcttcatctgtatttacagctgctctccatcactcatattaccacctgagctccgtctcctatcagatcagcagcagcattagattctcataggaacatgaaccctattgtaaactgatcatgagggatctaggttgtgtgctccttatgagaatctaatgcctgatgatctgtcactgtctcccaccaaccccagatgggaccttctagttgcaggtaaacaagctcagggcttccactgattctacattatggtgagttgtatatgtatttcattatatattacaatatattaataatagaaatgaagtacacaataaatgtaatgcacttgaatcatcccaaaaccattccctctaccccataacccctggtctgtggaaaaattgtcttccatgaaaccagtccctggtgccaaaaaggttggggatccctgctttagaagtcttttgctgacagtcatgtcagtcttagcatatgggtgtgctttcactcgtcctgtaaaggtaaatactatagccaaaaccttttcatatgattgtaaaattgacttgtaatggtcttcagggcggaaagcatgaactaccctctgttttgacatttttgaactctggtcctgacagatagaacagttctttaaatatcattgagcatattacaaaacttagagcatactctgccattgttatttttagaataacctctgtgtgtgagtcaagccatggttatacaagcaagataagaaagtaaagtgattgatgctaccaagtagcagccctctaggaaagaccaaagacagggtgcagaagatgtactgccaaagtaggctctgaatttggagcctaatcttgaagagaggcaaagtctgaaaggcttagcagaggagactagttatttgataagataaagagcagagatagaataagaagtcacccaaccttcttattagccaaagtaatagaaattaatactgactataacagaaagaccattacaaattttagatcctctagaaatgagaactctcattatttttacaacagtgtatagtcatgattacacaaaagcataacaaagtcatattttaaatgttaatagacctttgaaaagaaaatgttctctgatgaggacaataattttggactcctggacagactctgtagagggcaaaaaattattacctggttataaatggacttcatacccagaggaaaaaaaaattttttctctgtgttaattgggctccctcctctattatatacaagtgtttattagttttcagtatactttgatatgcatgttttaatagatcagtgtttaataacagtattatttaaaactttggtttttaaaacaattctatcatgtttaatatgtaaacattaactgatttatttcatcctgagtgttatgaagaacaaacatgttaaggtatagtcagagatacataggtttaaaaacatatgaatcaggccaggcacaatggctcacgcctgtgtcccagcactctgggaggccgaggcagacagatcacttgaggtcaggtgtttgagaccagcctggccaacacagcgaaactctgtctgtactaaaaatacaaaaaattagccgggcgtggtggcaggtgcctatgatcccagctactcgggaggctgaggtaggagaattgcgtaaacctaggaggcagaggttgcagtgagctgagatcacaccactgcactccatcctgggcaacagagcgagactctgtctcaaaaaataaataaataaaataaataaaagtatcgtatgttagggactttttatgttttctgtgtctgaattttaactttttgtagaaattttttcaatactctgtaatcctatagaatattaaaactttaccggatagcgtaagaatattctgtaaattcatataattttcagtattgtctgagatttatgaaaaccaatatataaacactggctgtttaatcacagcttgatttagttgttcacccatgtttatgtgtaaataatcctgagttaataatagaggtaacaacaaaataaccaatgttaattagaaagtttcattttagccttttaaaggtagaaaagtcttatgtttattaaaattctatatttgtatcttttttctaccttgtggtttaatcaaagaaaagtcataaagtcatcttttaaactgaaaactttcaaacagtactaatgtaaaacattaaagagtttgttttacattgactatgagtattaaggaaaatgaaatttaaatttttgatatttattttattgaggaatactgtagccttctaagtctacttcacagtacagtcatgcaccccataatggcaccacataacaaccacataactggtcaacagtggaccccatgtacaacagtggttctgtaagattatagattatataatactgtgtttttactttgccttttctatgtttagatacacaaatccttaaccattgtgttacagttgcttacagtattcagtgcagtaacatgctctacaggttcgtagcccaggagccataggctgtaccatatagcctagttgtgtagtaggcaatactattgttaagtacactctatgatattcacacaatggggaaattgcctaatgacacctttcttagaatgtatccctgtaggtaagcaacacattattagtacagaaagttgcttaaaactttttaatttgagactgtatcttcaggttacctttttactaaataaaaggattgagacttgatagctcctgccttcagtgggcatctccttttatcttataactcagcagggacactgagagacctttaagctaaaattagatttttcatttttttaagaacttttttttgaaagacagtttgaaaagaattattagaaagtagagctgggtgcagtggctcacacctgtaatcccagcaccttgggaggccaaggtgggcaaatcacttgaggtcaggagtttgagaaccagcctggccaacatggtgaaaccccatctccacaaaatacaaaaattatccaggcgtggtggtgcgtgcctgtaatcccagctgccctagaggcggaggcatggggatccattgaacctgggaggcagaggttgcggtgagccaagattgcaccgctgcactctagcctgggcaacagagtgagactccatctcaaaaagaaaaaaaaaggaatactatttaaatttataatttagttgtttttatacaattgtttacacattctttttctcagaaaccaaatgttttctatttcaattgagtaagttatatggaaggtactattccaggtagaaaactattgtacagtttagtcctctagaccctaatttaatatctaacacatttgtgaaaattaaaagtttaaattgtttaacgtttaaagcgaaatatttgtaaacatactaactgtggaacctgtattttttttttcctaatctggggagaaaatgggtatattcaaaacatttggtgtttaggcttgatttcttaattgtctgggcagattttaacagctcgtccaggattatgtaagcacttagtggtgcctttcaacaatttaaaaaggaaatccagtatgtgaagcccagtgtggtggctcacgctcgtaatcccagcactttgagaggtcaaggtgggtggatcacttgaggccaggagtttgagatcagcctggccaacatagtgaaaccccatctctactaaaaatacaaaatttagctgggtgtggtagtgcgcacctgtagtcccagctgctcaggaggctgaggcagaattgcttgaacccgggaggcagaggttgtagtaagccacgattgtgccactgcactccagcctgggtaacagagcaagactctgtctcaaaaaaaaaaaaaaaaaaaatccagtacatgagagatttagtacttttctagaaatctctcaagccacacagtctgatcagacttatatacagtagaaactgtagagctgtgttcttttcagagacttaatacttttttgagaaatatgcaactcctgcagtcatgctacagaaagactaccctcttgcctactccctgacacacaattcatatgggttttcacataaaagaaaaaaaaaagcctaacagtcacaggaaaattattaaattattaggccaactagaggtcatacaagagcactttgaaggagtgaaaacattctgaactaactcaaggttaatagaagcgatccttttgtgtactgtacctcactggggctcaagagcaaaacataaaatcacatttacacagatgctctgagcgtcccatgtaccaaattgccattggtacatttgtcttccgggtgcaccagtttccttttaatgaggtttgcatcttagaatcttattctttcgccgggcgcggtggctcacgcctgtaatcccagcactttgggaggccgaggcgggcggatcacgaggtcaggagatcgagaccatcctggctaacacggtgaaaccctgtctctactaaaaatacaaaaaaaaaaaaattagccgggcgtggtagcgggcgcctgtagttcccagctactcgggaggctgaggcaggagaatggcgtgaacccgggaggcggagcttgcagtgagccgagatcgcgccactgcactcccgcctgggcgacagagcgagactccgtctcaaaaaaaaaaaaaaaaaaaaaaagaatcttattctttcctagttatgcaaagctgagttctgtaattccatgattttcagtaagaaggaaaaaagcagacctaagaagcttaaaacttacatggaaaataaaagaacacaaaatttaataaattgaagatggagcagtttgtatccacaagggatatatacctaaaacaaaactcatgattgaaatattaggatggaaagagacataccaggctaataccaacaaaaagaaagctacataaataacaaataaaatagaatttaagggaaaaagtataaataggacaagaaacactacataataaaggaatgaaccaccaaggtgtcatgaacttatatgtatttaacaatataccctcaaaatatattaagcaaaaacttacaaaattatgaaaagttggcccacaattacagtatgtatttttaactgcttctgatggatcaggttgactaaagattagttaagtatatggaagatttgaacaatgacagtaataagcttggtgtagtatagaacaaatagaagcaacatatttctttttgtgtatacgtggaacattcacaaaatttgaccatgtactaggtcacaaagaaattctcagcaaatttcaaagattatacacgaagaacacattctctggccacatttctctgtaatcaaattagaattctaaaattagagctgcaaaaaggatagcttaaaaaaaggcaaatatatgaaaacataaaaatgcatttcccaggagttaaagaagaactcataatggaaattccaaatttgtaataaatgtatatcaaaattgtaattataggaagaattacatgtcagaagtgtgggttgcaaataaagggagatgcaaagggacagttaaagcttcatatgcattaatggaaaaaatgtcaagaaagagtgacaaattgagcgttcaactcaagaagttagaaaaagtacaaaataaagctcaagaaaatggaagtaataatagcacaacttagtgaaataaaacaaactaaaacatatcagcaaaactga

SEQ ID NO: 213 - DNA, 15895 bp, Homo sapiens
  source 1..15895: mol_type = other DNA
gggacggccgcgggaaaaggcgcgcggaaggggtcctgccaccgcgccacttggcctgcctccgtcccgccgcgccacttggcctgcctccgtcccgccgcgccacttcgcctgcctccgtcccccgcccgccgcgccatgcctgtggccggctcggagctgccgcgccggcccttgccccccgccgcacaggagcgggacgccgagccgcgtccgccgcacggggagctgcagtacctggggcagatccaacacatcctccgctgcggcgtcaggaaggacgaccgcacgggcaccggcaccctgtcggtattcggcatgcaggcgcgctacagcctgagaggtgacgccgcgggcccctgcgggacgggtggcgggaaggagggaggcgcggctggggagagcgctcgggagctgccgggcgctgcggaccccgtttagtcctaacctcaatcctgcgagggaggggacgcatcgtcctcctcgccttacagacgccgaaacggagggtcccattagggacgtgactggcgcgggcaacacacacagcagcgacagccgggaggtaagccgcgtcccagcggctccgcggccgggctcgcagtcgccccagtgatgccgtggcccccgaggcgggcgtcatcgggcagcgtttgcccagtgctggagggttagggagagctgcctgggcttgaccgcgcgccggtctcaaagtcctggctttggcccctcctccgttttcccctgtggaccattccgcttcgcagcgttttcaaaaactggagcgaaagtgatgtgggcggggcaaaggcggcgggaagaggagagcactgaagctggcgcgggaacttggtttcctggtggcctcccatccaatccccacgaaccagctttcctcttaaaccttgaaaagagaaattcgggagttcgagtataagttcttagtcgtcctttcctctttcctttccgacaggagcaccccaggcaaaaaatgtctcgcgggtcattggcgccaggctttcaggggacagtggggcggggcggggtgggcacaggacgttaggcagccgttggccctccctaaggccacaccgtcctgccgtcctggatcctgcgccagctgcgcgggggaggggactcgaaggtgtgtgagccaggggctgaccttgaccgctcagataaatggagcgcagccttgacacaggggtggaggtggttttgaatggggaaacccattcgtggtgaagcagattcactgtagctagcggaaaagccctccggcccacggacccatctagagacgaatacatagcagctgctgtggctgattggcgtgggacagcgtggggagttttgtctgaggagagggatccacttttctgcagctccaagcccaggggcctttgatgagccatagacctcatttttaacccacctttctgcttagacattgagcaagttacttctcatatagcttccctatatgttaaaaatggagaaaataatgcttagtaggcaattctgataaaagcaggtgcttgcaaaaatctctctgttgtctgaatataaactgtaccacaagcgagtgcggatgaacgaggactgcatttaaagataagtttttacactttcatttctctgtggctcgacacttctgatgcctccctttttgttcctgggacacatgcttggtgttgtcttcacacctttgtgacaggattagcactagtgggcagtggatgatagctcctcccttttgccacatgttcatccctgccctcgccaccatctcactgtgtggaattcctgtgtccactggtcaccggggcacagaagtgctgtctcagcctgaatcgggccactgatgggacttgcagcctgggagctccaccgtgatctctggcccactttgcgggagtctaggctttctggatgctccagggcctcacgtcccagggcagttttcttccctgaagaaagttggatggcatgatctgtcttcccatcttgaaaccgtatggcaaattgtttttcagatgaattccctctgctgacaaccaaacgtgtgttctggaagggtgttttggaggagttgctgtggtttatcaaggtaaagaagtcgctgctattagaagtcagtagtctgttctcaacacagcagccagtgagatcctttcaaaactcaaagcagccaggtgtggtggctcacgcctgtaatcccaccactttgggaggctgagtcagatcacctgaggttaggaatttgagaccagcctggccaacatggcgacaccccagtctctactaataacacaaaaaattagccaggtgtgctggtgcatgtctgtaatcctagctactcaggaggctgaggcatgagaattgctcacgaggcggaggttgtagtgagctgagatcgtggcactgtactccagcctgggcgacagagggagaacccatgtcaaaaacaaaaaaagacaccaccaaaggtcaaagcatatcattcctcaccctcaagcccttagtggctccatttcactcagtaagagccacggtccttatggtgtccgtttttcagctctgaccttagctgctgctctctgcaccagccctgctgttcttgtgagtttttgagcacaccgggacatccccactccctggaaccttcttcccccacacttggcttcttcctttgagtctctactccactcgggcaagccttcctagacctcctgatttaaaactgtgactctcccccaacctccttggtgtttctccatagacgaacatcaccatctgatgtatgtcagcctttcccttcccctgttagaagggggacagcaggtagtaaaagtgaaatgtgctgtaagctttatgagggcagaggatttgtttctcgtgttcactgttgtatcgccagggcctcaaacacagcctgccacatagtaggagtcaacatatattgatcactaaatgtagataccacctgtgttcccatgttcatataaattctagaagagtctcttcagtaacaaggtgaaccccttccagagggctgagtaggtacctcaggccggggccagagtgctgtgaagacaggcagcagcccagaccaagcttctctgtgttccgtgtcctggtctagaaccagcgatgttctttctgaccagtgctttttggaaggtggctgaggtctgggctcaggtctgggccatactagaagctgggatcccttctatagagcacttggtatggcttgtatggtcttggggcaagccagacccaagccctcttatcccattttagaaagggcttcaatttggatccagccccaggtctgccttagctctgtattcttggggtattttgttctgtattggcctatcttgactaacaatgaaccttggatttgaaacatatcatcagaaacctcagaagacaacattcttaaactggctagagcctggtctgaatggatgaaaaggagagacttttgaagcaatatgtaaaagattgagaaatgatttgttggaaatttctcaattggagaaatttctttgatttgttggaaatttctttgattctttctcaatcaaagaaaatcgggacaaactcaacaatagaaagggaggaagcaagatactcagaaataaaatgcattcccctgtttcaacttaatgcttcaattcaggattctaaggaatccttgccaggaatgtcagactcaccttgatagttggagttactccattggtgactcgatcaaatacaggagttgaggcacctgcactgtaaaatactgattagtctgatcattaggaatatcctgtatgccaggtagaagatacattgaacagattgcatgtaggcattaaattcattttggggtattacatatagacaacacatttcattaagaaacataaaactgtcagatcggtggaatacttaaaagcacttggaggtgtttagcctaaaaagcttagttgaggggaatggaagaaaagatctgggagggtggttccaaagaagggatcagactgtcctaaagccctcaggaatctgggctgggaccagcctacttaaagataggatgggcagctgggtgtggtggctcacgcctgtaatcccagcacttcgggaggccgaagtgggcggatcacctgaggtcaggagttcgaggccagcctgaccaacatggagaaacactgtctctactaaaaatacaaaattagctgggtgtagtggcgcatgcctgtaatcccagctactcgggaggctgaggcaggggaatcgcttgaacctgggaggtggagggtgccgtgagccacgatcgcgccattgcactccagcctgggcaacaagagcgaaactctcaaaaaacaaaaaaaaggatgggttccatatgggtggtgtcaagtgcccacctcctagcaagtcagcaggggccagaggcccttgtaagtggtgtctcggggggatcaactgagatggcttaggatttacctggatgcctgctctgctctccccatctcttccagggatccacaaatgctaaagagctgtcttccaagggagtgaaaatctgggatgccaatggatcccgagactttttggacagcctgggattctccaccagagaagaaggggacttgggcccagtttatggcttccagtggaggcattttggggcagaatacagagatatggaatcaggtgaggagatagaacaatgccttccatttcccgggtgcccttcctagcatgtgtttgctccgttgttttagataaggtctgggggatgagtcaatgtcacaggagctgatgtatagctttgaccttgtgaggggtggtgccaggttaagccacaattaagcctcatgaaggccgtttcacactcttttttttttttttttttaattattatactttaagttttagggtacatgtgcacaatgtgcaggttagttacatatgtatacatgtgccatgctggtgcgctgcacccactaactcatgatctagcatcaggtatatctcccaatgctatccctcccccctcctcccaccccacaacagtccccagagtgtgatgttccccttcctgtgtccatatgttctcgttgttcaattcccacctatgagtgagaatatgcagtgtttggttttttgttcttgcgatagtttactgagaatgatgatttccaatttcatccacgtccctacaaaggacatgaactcatcattttttatggctgcatagtattccatggtgtatatgtgccacattttcttaatccagtctatcattgttggacatttgggttggttccaagtctttgctattgtgaatagtgccacaataaacatacgtgtgcatgtgtctttatagcagcatgatttaatagtcctttgggtatatacccagtaatgggagggctgggtcaaatggtatttctagttctagatccctgaggaatcgccacactgacttccacaatggttgaactagtttacagtcccaccaacagtataaaagtgttcctatttctccacatcctctccagcacctgttgtttcctgactttttaatgattgccattctaactggtgtgagatggtgtctcattgtggttttgatttgcatttctctgatggccagtgatggtgagcattttttcatgtgttttttggctgcataaatgtcttcttttgagaagtgtctgttcatgtccttcgcccactttttgatggggttgtttgtttttttcttataaatttgtttgagttcattgtagattctggatattagctctttgtcagatgagtaggttgcaaaaattttctcccattttgtgggttgcctgttcactctgatggtagtttcttttgctgtgcagaagctctttagtttaattagatcccatttgtcaattttgtcttttgttgccattgcttttggtgttttagacatgaagtccttgcccatgcctatgtcctgaatggtaatgcctaggttttcttctagggtttttatggttttaggtctaacgtttaagtctttaatccatcttgaattgatttttgtataaggtgtaaggaagggatccagtttcagctttttacatatggctagccagttttcccagcaccatttattaaatagggaatcctttccccattgcttgtttttctcaggtttgtcaaagatcagatagttgtagatatgcggtgttatttctgagggctctgttctgttccattgatctatatgtctgttttggtaccagtaccatactgttttggttactgtagccttgtagtatagtttgaagtcaggtagtgtgatgtctccagctttgttcttttggcttaggattgacttggcgatgtgggctcttttttggttccatatgaactttaaagtagttttttccaattctgtgaagaaagtcattggtagcttgatggggatggcattgaatctataaattaccttgggcagtatggccattttcacgatattgattcttcctacccatgagcatggaatggtcttccatttctttgtatcctcttttatttcattgagcagtggtttgtagttctccttgaagaggtccttcacatcccttttaaggtggattcctaggtattttattctctttgaagcaattgtgagtggaagttcactcatgatttggctctctgtttgtctgttattggtgtataagaatgcttgtgatttttgcagattgattttatatcctgagactttgctgaagttgcttatcagcttaaggagattttgggctgagacaatggggttttctagatatacaatcatgtcgtctgcaaacagggacaatttgacttcctcttttcctaattgaataccctttatttccttctcctgcctaattgccctggccagaacttccaacactatgttgaataggagtggtgagagagggcatccctgtcttgtgccagttttcaaagggaatgcttccagtttttgcccattcagtatgatattggctgtgggtttgtcatagatagctcttattattttgaaatatgtcccatcaatacctaatttattgagagtttttagcatgatgtgttgttgaattttgtcaaaggccttttctgcatctattgagataatcatgtggtttttgtctttggatctgtttatatgctggattacatttattgatttgtgtatattgaaccagccttgcatcccagggatgaagcccacatgatcatggtggataagctttttgatgtgctgctggattcggtttgccagtattttattgaggaattttgcatcaatgttcatcaaggatattggtctaaaattctcttttttggttgtgtctctgcccagctttggtatcaggatgatgctggcttcataaaatgagttagggaggattccctctttttctattgattggaatagtttcagaaggaatggtaccagttcctctttgtacctctggtagaattcggctgtgaatccatctggtcctggactctttttggttggtaagctattgattattgccacaatttcagctcctgttattggtctattcagagattcaacttcttcctggtttagtcttgggagagtgtatgtgtcaaggaatttatccatttcttctagattttctagtttatttgcgtagaggtgtttgtagtaatctctgatggtagtttgtatttctgtgggattggtggtgatatcccctttatcattttttattgcgtctatttgattcttctctttttctttattagtcttgctagcggtctataaattttgttgatcctttcaaaaaaccagctcctggattcattaattttttgaagggttttttgtgtctctatttccttcagttctgctctgattttagttatttcttgccttctgctagcttttgaatgtgtttgctcttgcttttctagttcttttaattgtgatgttagggtgtcaattttggatctttcctgctttctcttgtgggcatttagtgctataaatttccctctacacactgctttgaatgtgtcccagagattctggtatgttgtgtctctgttctcgttggtttcaaagaacatctttatttctgccttcatttcgttatgtacccagtagtcattccggagcaggttgttcagtttccatgtagttgagcagttttgagtgagtttcttagttctgagttctagtttgattgcactgtggtctgagagatagtttgttataatttctgttcttttacatttgctgaggagagctttacttccaactatgtggtcaattttggaataggtgtggtgcggtgctgaaaaaaatgtatattctgttgatttggggtggagagttctgtagatgtctattaggtccgcttagtgcagagctgagttcaattcctgggtatccttgttaactttctgtctcgttgatctgtctaatgttgacagtggggtgttaaagtctcccattattaatgtgtgggagtctaagtctctttgtaggtcagatgattggcacttactgggcgcttggcactttccatactgtgtcatcggcagatagctgcatggttggtgttcgtgctggggaatgggaagttcatcggtgggacaagggacaaaatgcccccattgctttgttgtggctttaatctccctttcgaggctgagccacagcgtgctgtaggtggcgctgctgtgaagcgcagtgccagggtcacactccactcccagctctgcagaggtggagaaagaatgaaacatctcactcctggacttccactttcctgtcactgttggtgtcacctcttactggatgtcacagagcccagcccctcccacctgtccctaggaaaagcagatgccaccttggaatgtggggtttgtgtgtgcaatttactagctgggcagagaccagcaacctggagagcaggtgtctcatctaaggggacagtcacatttcacctccagccacctggaggaatttgggcctggtgatgtcagaattcttcaataaaagcctaaaatctatattttatgtgcggtcatgagatctgttaaatgttagcaacttcaggaagtttaaaaatgctgtgtggacctagaataggcaagttcttaaaggcagaaagtggaatgctagtttccagggactggggaacagggaggaatggggagttcatgtttaatgggcacagaggttttgttagggatgacgaaaaagttcgggagatggtgatggagatggtgatggtgatggagatggtgatggtgatggagatggtgatggtgatggagatggagatggtgatggagatggagatggtgatggtgatggagatggtgatggtgatggagatggagatggtgatggagatggtgatggtgatggagatggagatggtgatggtgatggagatggtgatggtgatggagatggagatggagatggtgatggtgatggtgatggagatggtgatggtgatggtgatggtgatggagatggtgatggtgatggtgatggtgatggagatggtgatggtgatggtgatggagatggtgatggtgatggagatggagatggtgatggtgatggtgatggagatggtgatggtgatgggatggtgatggagatggtgatggtgatggtgatggagatggtgatggtgatggagatggtgatggagatggtgatggtgatggagatggtgatggtgatggtgatggtgatggagatggtgatggtgatggtgatggtgatggtgatggagatggtgatggtgatggtgatggtgatgatggagatggtgatggtgatggtgatggtgatggtgatggagatggtgatggtgatggtgatggtgatggagatggtgatggtgatggtgatggagatggtgatggtgatggagatggtgatggtgatggtgatggtgatggtgatggtgatggagatgggtgatggtgatggttgcctaacatcaggaacgtgcttaatgcttctgaattgcacacaaaaatggcaagtttaatattatgtgtactttatcacaatgaaaaaagctgctgcgtgggccaagttacttgtgcaggtaagtgttctgcaggtcgttgcctgcacctcagttgtagggtgtccgtaggatgtgaggccagtccccgggcttaatgatgctttaaatcctgcctagtattcaattatttcttgtcgcttaaaaggcctaataaaattatggttttagtttacagtggtatgaatgcttagctgttggattttagtaggaaagtttgtccctttttgtttttaattttgttttacagattcacaggaatttttttttttttttttttaatgcacagaaagtttccctggacacactacccagtttcccccagtgataatatcttgggtaacatcctgtatacattcacattggtgcattcctcagagttgtcagattttgctagttttacgtgcacttgtgtatgtgtgtatttgcaattttagcacgtgtagactcttgtaaccactacaatcaagttacagaactacactaccaaggttcatctttttaaaatctttgatgttacctttttcggaacagtgaccatgagaggactttcctcccaaaattttgagaactactgaaccagaatatagtctgacactaataggtagaaatttaaccaaaggagattatgaagctctgcacttcagttaacaaatcacttctcagcttccagttccatctcagaaggaaggaaagggattaaaatccagagaccagaaatgggagcaaagtacaaggtggtgtaatcattacagaggtttcctgatgtttccaagtcagtcgtgtgttgagctgctaaactctaaagtaattttaggtggaagtgttggaaacatgctgctgaggtgatagaaaggaatccatggtcctctgttagttggaaagtatatggaatactatattctacataagatacaacactctctgtgagacaaggataaagtagattttgtcagtgaaattgtgacaagaatcgctgatgggtttagagcctaagtttgcgaggagcactggaagaaattaagattgttgagattggaaagggttagctatggggggaacaggaggaggtgactccatgacagaccaaatattcaaaggactgtgtagaagaggaaaaagactttgttagggctccagaggacagagccaggagtcagacagggccttgaactcaacccaccgagatctgcaaactttgcaggatgcaccagatgtcttgtagccatgggtcaaggggggaccctgggtaagagactgtaatagatgacctctaaggccatctcatgacatgtgtgattaatgtatgtacctgtcctctctttttgacaattctacagattattcaggacagggagttgaccaactgcaaagagtgattgacaccatcaaaaccaaccctgacgacagaagaatcatcatgtgcgcttggaatccaagaggttgaaagaaccccgtcgtcttcatttatactaaccatactcttagagggaagcaatctggttttgtgcagaggcacctgagggaggcaggaccctgggaacttcccccagccacatggttgattgtgtgacgttgggcaagtcacattttgctgcactttcaccttcagatcatgaggttgggcccagaggattttttttttttttttttttttttgagacagagttttgctctgttgcccaggctggaatgcaacggcgtgatcttggctcactgtaacctctgcctcctgggttcgagtgattctcctgcctcagcctcccaagtagctgggattacaggcatgtgccaccatgcccggctaattttgtatttttagtagagacggggtttcaccatgttggtcaggctggtcttgaactcctgacctcagatgatctgcctgcctcagcctcccaaccagatgatcttaatttgtgtatttatactcattcttacaccaaaaagggttttaaattgcctagaaactacatgtaagatgttaacattttaaatggaagcagatgaagttccagctcgctgccacctcactaacatttttaacaattatattgtaaaattcaactctaccagggtgtagagccaggtgtggtggctcacacctgtaattccaacaactccagaggccaaggcgagaggatcatttgaacccaggaatttgaggctgtagtgagtcatgatcacgccattgcactccagcctgggcaacagagtgagaccctgaatatttaaaaacaacaacaacaacaaaactctatcaggatatcataagtacttagagtgaaatacttgcatctgtaatagagacttattttttttttttttttgagacacagtctcaccctgttgcccaggctggagtgcagtggtgtgatctccgctcacggcaacctccatctcccaggttcaagtgagttcccattcctcagccccagagctgggaccacaggcgcgcgaatttttgtatttttagcagagacggggtttcactatgttggccaggctagtctcgaactcaagttggcctcaagtgatctgcccaccctggcgtcccagtgttgggatttcaggcatgagccactgtgcctggccatgtaatagagacttttaatataggagggtgtaccagaagcaccagtttcctgtggcaaacagaattattcctgctgtatttgtaatctggtgccacgaggtagcccagatcccttcagctctgatggaagagcattgcttcagccgtaaatggacacctgcagaaaccttgcaccgatggatagtctccctcagctccgtgccatcgctgcagaggctgttatggacatcactgcagcccagtggctctctctcctggtctccaccatatgagttggcttctgtttctctcctgttttactttgcctttagctgtggtctttcaaaccaccatccctccttatcttcctctgctggttcctcagatcttcctctgatggcgctgcctccatgccatgccctctgccagttctatgtggtgaacagtgagctgtcctgccagctgtaccagagatcgggagacatgggcctcggtgtgcctttcaacatcgccagctacgccctgctcacgtacatgattgcgcacatcacgggcctgaaggtgggctgtctcgggaagggtgacttgccagcctaccacactgagctcttcagttctttaatatgggaaaacaaattgcagagtttagtctctgattagcttttaaatttgatatgtgtaagtaagaaatgaaccagcttttactttgaaaccttcctcttctggaaggttttctggccctgtggtatacgcactaacagatctatacaggttgtttgtgatacagcttctatggattttctcaaaagctatgctgaggttgggtatggtggctcatgcctgtaatcccagcactttgggagactgagacaggagcaattgcttgaggtctggagttcaataccagcctgggcaacataacaagatgctgttgctacaaaaaaatggaaaagctacactaaattatttttttaaaaaaagccttgcggtgtctgcatattctaatgtttttaaatgatgttttaaagaattgaaactaacatactgttctgctttctcccccgggtttatagccaggtgactttatacacactttgggagatgcacatatttacctgaatcacatcgagccactgaaaattcaggtaagaattagatgttatacttttgggtttggtaccttctcttgataaaaggttgactgtggaacaggcatctgctcaatgctgtgtccaagataaagatgactgctccaaatgtggggcttcagtttagggagaagtggtgggcaggtgggcaggacaaggcaggcatctgcctcagcaaccatgggcacttaacatgtcaggtgctgtgaggtactaagcaccagtaccagagagggaagagccacattcaagccaggggattgtccaaaagggggcattttaactcattttaacttgaaggagaattgaagtgcaaatgtttttccttttcttttttttttgagatggagtctttctctgtcggccaggctggagtgtgccgtggtgcgatctcagctcactgcaacctccacctcccgggttcaagcaattcttctgcctcagcctcccaggtagctgggattacaggcacatgccaccacacccagctaatttttgtattattagtagagatggggtttcatcatgttggccaggctagtctcaaactcctgacttcaagtgatccacctgcctcagcctccgaaaattctggaattacaggcataagccaccaccctggccataaatattttttgttaattttacattaagtacaatatttaggtccaaacttcaaaagtctgttgaaatccctaagttatagcagccaacaattgatatgaaatggcaataaaaatgtaagttcatctgcttcatgagccttaaggaaaaaaactcagaaccagacactttttagccccttccaggttagatccaggttttaaaagttactcctttgagggagtttggctgcttttgagtggaggtgacttcaggcttattctctctggctctctgctctggtcgtttttagacatagtaataggttgtgacctgtcttcacatcctaattgccactgtctgttcatcccaggaatcctggctttcatccctttctgttcactgtccatgcatgtcatctttccttctttctgccagggacagatgggttagggattgtggaattcaagtaaacgtagagctactatgagttacagattgactgtgttcctgtctttaataaatttgccaagagtggttataagaacttacacctgatgaggcaccaggctcctgatgctgtgtaatgtcacaaaatacccctcactctcgatctgtgcaagagaacagctggttgcgctccaatcatgttacataacctacggcaaggtatcgacaggatcatactcctgtaaaatagaactttgttgatcacatcctgtgtacttgtttcacggacatgaggagcaattacaacaggtcgtacaattatggcaaaataatggccttattttgtttttagcttcagcgagaacccagacctttcccaaagctcaggattcttcgaaaagttgagaaaattgatgacttcaaagctgaagactttcagattgaagggtacaatccgcatccaactattaaaatggaaatggctgtttagggtgctttcaaaggagctcgaaggatattgtcagtctttaggggttgggctggatgccgaggtaaaagttctttttgctctaaaagaaaaaggaactaggtcaaaaatctgtccgtgacctatcagttattaatttttaaggatgttgccactggcaaatgtaactgtgccagttctttccataataaaaggctttgagttaactcactgagggtatctgacaatgctgaggttatgaacaaagtgaggagaatgaaatgtatgtgctcttagcaaaaacatgtatgtgcatttcaatcccacgtacttataaagaaggttggtgaatttcacaagctatttttggaatatttttagaatattttaagaatttcacaagctattccctcaaatctgagggagctgagtaacaccatcgatcatgatgtagagtgtggttatgaactttaaagttatagttgttttatatgttgctataataaagaagtgttctgcattcgtc

SEQ ID NO: 214 - DNA, 32746 bp, Homo sapiens
  source 1..32746: mol_type = other DNA
ctgcgcgcgtcgtgcgtaatgacgtcagcgccggcggagaatttcaaattcgaacggctttggcgggccgaggaaggacctggtgttttgatgaccgctgtcctgtctagcagatacttgcacggtttacagaaattcggtccctgggtcgtgtcaggaaactggaaaaaaggtgactgaatgacatcggattaactttgtttctgcagagctgttctggaggaagaaagtgatggcgccaatgacttaaatttagaggtcctgaggcgatgttttggtgtttgtttgctgttgggagaagcctcgaggccaaaactgtgcgaggcgctggtttcacgggatctattaaatttctagtggcaacgatttcccaaggaggaaaggggagggcctgggggacactgatgaggagtggaggctcgggagaggaaacggggaagaattgaagggggcggaaagagatggacaagagaggactcgttgggtgggttgcgtctgaatactagtgtagcttcttatggccgtgtaggactgcgtgtagaagtcttcatcttaaatcatgagagctacattctaagtggagattaaacgtggacacacaggtgtgagtggaaaagttgaatagatgaacaagcgcatattgaagaggaaataggcggccaaaatcaagaagagtctaatcagtgtaaaagactaaggagtacccagagaagtaaaaggattgtcaccttcctgaaagccagggcaggacctgagaaggctgggtgcagagatgagacaggatcaaaagttttgtcaatcatgtgtatcctaggagacaaattttttagcagatgtgaagggagtgacctgttaatgtggtttgtaaatggaggcagcctatagaccattttatggaccggatgatttatccttgttgaaggggagattgatgccaaaagggcagtaattgaggaaacaatgggttaaggacagagcaggagagattgacattaggaaaacagaataattccattctctgaaaccaaagaaaaggaaacattttgaggtgaataagagaatttgaggtaatttttttgtcttcctattgaaataggcacagccaacagcagtaatgtggtctgggtaacagacagggctttagctaccacggatacccttgtgaaggcaaaaaccgtaacttactcgtctttgcatctcctgcattgcctagcacactcccctatatatatagtgggcagttaataaatgtttatgttgaatatttttaaatggaattaaatagatgttccttgcaaatgagaacttcagtgtacatgaacaaaaaagagataccccaggggaaagatgatgatcttgaagaaacaatgaaacctgactgtctttctgtttaaggataaatagttgcttaatgtaccatctctgtctggaaagttttttttaaatactgaattcgtgaatgtaggtcataagcatgaagcgcagttcagtttccagcggtggtgctggccgcctctccatgcaggagttaagatcccaggatgtaaataaacaaggcctctatacccctcaaacgtgagtatttcccttgtggttctaatttgcatgctttatcatcttaggcaaagaaatcataagaaatagttaatataaagatgtaatatgagtgatgtcttggtgaatcttgtctgttcccaggggtacctaattttggatcaatgaaatctaaaagtgggcatgatactctgctaggtgttgtttgtgtcatttgtttcacaaatttccaaagccaaatgctttaccaggcaccccctaaaaggactgttaattcttgttcagtactctcttatttttctcttttattctagagctacttgtttaagcaggctctgtgctgtaacttagagttcactgagatatttccaattagcaaagcttcaatcaaatcagagcaaaattatttgctctcataaggtataatatagtagcagcctacaaaacaccactcctccgaactctttcctcaagatttgctggaaaaatatctgaaagaacctgctgtcataaactatagtttttcattatgagtgattatcttccagataagagaaggctatttgtaagccattgtagagctgtataattcttctctagtaccgaggtacaagttacttgctaactgtttttaaattacttggatttacatagtatgagcctatgttacttttagaaatttgaaatatttatatatttttccttttgaatactgtaaaccaagaaaatgtttgtgctgttatacattacttataccaaaaaaagttatgcctttaattgtattagaagctaaaaggtcaccattgtcaatgtttttttgcctgcagtttagataatgtaataagtgcagctacattctaatacagagcaggctctaaaaaaaaaaaatgtaaatgtggttaagataatggaaatcataatgtagatagggtttttgttctgcagagaagcaaaagacttaaatctgcataacaagccttacctttgaccattttgtcttaactggacttcctacctacacttttctttctcttggtaaataagtgaaataagcagggaacagacaaacagcacatgttctcataggtggaagctaaaaaagtttatctcatagaagtaaaaaataaaatggatgctagaggctaggaagcatagggagaagacggaaatagggagagatctgttaaaggacacaaaattatagctaaatgggaggaataagtcctggtgttcatagcactgtataatgactatagttaacaataatatattgtatagttttaaatagctaggagaatattgactgttcccaacaaagaaatgataaatgtttgagatgatggatatggtaattactctgatctgatcactgtacattatatgtatcacagcatcactgtgtaccccataagtaggtacaattatgtgtcaatttttaattttttctgttaataatttaaaatcagaaagtaataataataatgatatttaggcctgaaagtatgttctgtgtctttgggctacaaattttctatcttgtactttaccttcagggtttttttttaaccttgtttttactctttggaaatgcaaatttagggtagaaaatgtttagatagttattaaaaatgagatgagtaaaacagaccctgctgaggttaaaacgaagactaaatctaccaaagggtacatacaccagagggacctctgctggtcccccaacattacaagcattataacttatagtaccatgtttagcccatcctatttataacagctttcatgactgctaaacatttttatgatttttgaattatttttatagctagtggggaagagttgttggttctaatatatttctaaaagtttcttgagctaattttaatttttattttaaagagttgttttctatttttcttaaagcaaagagaaaccaacctttggaaagttgagtataaacaaaccgacatctgaaagaaaagtctcgctatttggcaaaaggtaattatatttttcattagctctaataaagggattcttatagccatacgttgttgccctcagagaacaaatacattagatgacatggttcctttcgagagaaaagttataatctagttttcctctgattttaaatggttaaaattttagtttacatctgctgtagacagtgtagctaacacattcagaccactatttcattgttacaagtaaatagttgattgaaaattctatacctagctttcagacacggtggagtcatcgcattttaaaataaggagtggccaggcatggtggccatgcctgtaatcccagcgctttgggaggctttgcttgagtccaggagttcaagaccagcctgggcaacgtgacaagaccctgactccacatttttttaattagccaggcaggcatgcagaccaggtgcagtggctcacacctgtaatcccagcactttgggaggctgagatgggaggctgagatgatcttgagtccaagagttcgagaccaccctgggcaacattgcaagaccctgtctctacaaaaaaaaattttttttaatgagccaggcttgtagaccgggtgtggtggctcacacctgtaatcccagcactttgggaggccaaggcgggcagatcacttgagtccaggagttcaagacctagctgggcaatatggtgaaaccctgtctctacaaaaaatacaatgattagccgggggcagtggcacatgcctgtagtcccatctacttggaaggctgaatcaggaggatcagttgaacccaggaggtggaggttgcagtgagctgagatcataccactgaactccaccttgggtgacagtgagactctgtctcaaaaagaaacttttttcaatttaaaaattagccaagcatcatggtgcacgcctataatcctagctactcaagaggcttaggcaggaggtttacttgagcccagaaggtcgaggctccggtgagccaggttagcaccactgcactccagcctaggcaacagagaaacaccctgtctcaaaaaaataaatgtaaaatgaggaaacattatctagtccaacattttagtcatttttacagtctaaaagattaatgagaactccacagagcttttgttttatgggctatatctgtcaaaattaaccatagtagaaattaaaactgagaaaaatttaaaatatgcattcaatttaaaataacaacccattacatggtaacataaataacatgttttcaacttttaaaaaacatattttcaaaaataaaacaatttcagtaagaagagtgacattgttttacgtttttgcaaatctcttatggcttaatagcagacagctagattctaatacttgcttctgcatttaatctgttacaatatcatacatcatgttaccagcctctggaaaactccactgtacacttgagagattgaaaatgaaaagagcaaataacatcttagttttatcataaaaatagttttgactgctcagtgatccttagacaacactttgagaacaaccatctatctggagtaggtcagtggttgtctaggctgcaggttggagaaggattaactgttaaggggcataaggagactttgggggatgatagaaatgctcatattttgattggcataagtgacacaaatgcgtttattgtcaaacttcatcaaactgtatgctttaaacaggcgcattttattctaaacaaattatgtcaataaaatagatacctttaaaaaaaagttcaaccccaaaattaagacaataaattatgttgttgtctcaccaaaacaaaatataactttaagacaaacctgtttcttccattcttttgaaaatatttagagatgaagtacttgtcaccttttaaaaaagtctctgccatgaaaccaatttggtttcattggtttaaacttccatttttggtatttatttcagttgatgaaaaatcttaaggtatttttgtaatgtaattcatctcagagctaaactttagagatgatagtaattacaaaatctaatatttgtggagcattcctataggccagacattgttttaagtgctttatctatattaaatctttcaatcaatcctcagaactgccctgtgagaaggtactgatactgtctgcgctttttttttttttttttgagatggagtctcgctctgtcgcccaggctggaatgcagtggcgcgatctcagctcactgcaacctctgcctcgccagttcaagcaattctcctgcctcagcctcccgagtagctgggattacaggtgcctgccaacacgtctggctaatttttttgtacttttagtagagacgaggtttcaccatcttggccaggctggtcttgaactcctgacctcgtgatccaccgcctcagcctcccaaagtgctgggattacaggcatgagccactgtgcctggccaagtgtgtgtttattcttgcctcgttttacatccttatctttaactgctgtaacctcatattttactcttcgttatttgctccttttctctgctttaaataagagaattctgtttagttataagaacgtaatgtttgatgttgatgttaaaatgcaaaactgccttgaaataatttagacttgatcacagaagcaaatagttttaactggctgtttaaaaatatatttccagaactagtggacatggatcccggaatagtcaacttggtatattttccagttctgagaaaatcaaggacccgagaccacttaatgacaaagcattcattcagcagtgtattcgacaactctgtgaggtactttaggattttaatctaaactgtgattgttgtcataggtattttccaataattttccattacaaaacgtttggtggttcataaaaattattgtagtttcttacagaaaatggttatgcacataatgtgtccatgaaatctctacaagctccctctgttaaagacttcctgaagatcttcacatttctttatggcttcctgtgcccctcatacgaacttcctgacacaaagtttgaagaagaggttccaagaatctttaaagaccttgggtatgtatatttcttattagtttagagacatgactggcacacagagatgaaacaaattaaatcaatttgtaaaaagtttgagttacagaaataatatgttttaagatgaccactgtgggcaatatatgtaggataaattgaagagaaaaaaagcaactgcttacaaaaaaacaaataaaaattgctagtggtagaagcaagaaggattaacaaattgttagtaactgatcaagtttgatgatgggtacagacggataaaatccacttttctttgtttaaaaaaaaactactcgtagattattacagagcaacagaagacagaatataaagccctgaactgctgaagtgacagagaatagaaaagacagactggataccacagattttacagaagccaaaaacaaaaaaaaacaggattcacgcctggtgaaaacagagtgtgatgaaattgaaagtgggaagaatggatttggaggtgtacatacatgtcatttattgggggtatattgaatttgagggaacaaaagatgttttgggagagtagtccagcatattggttgtataggtcaagttctgcagcttcggggatagatgtacaaagtaatctacagagaaatacacagagataagatgactaaggatagaatcctaacatatcttacctctaaacaagtcaagactgagtgtgtatgtggaattttttaaatgtaacttcttgattaaccattatctttactaaattataataacattaaattagcttatgtttttctgatttctcataggtatccttttgcactatccaaaagctccatgtacacagtgggggctcctcatacatggcctcacattgtggcagccttagtttggctaatagactgcatcaaggtatttgatttgttcttttgaaatgtatacatgggaaagggtttttttcctcaaaaaaaatattttctctcccagtcttttgacagtattctcaaagtctgcttcagagttttcatttttcaaagcacatttgattttaagtttttcaaactattatcacaaggtaaaaggaagaaagtaccaattgataaggagattatttattatcatgaggttttacaactcaaaaaaatgagtcaataggaaattcattttttattttccctcatgaaattcgtttttaccctttttaattaaaatccatattcactgcaagaagtttggagaatacagtgatataaccataatctccaaactcagacaataacataaaatgtttccttgtgatattttgttttgttttgttttttgtttttgagagggagtctcgctgtgttgcccaggctggagtgcggtggcatgatctcagctcacttcaacctccgcttcccaggttcaagaaattctcctgcctcagcctcctgagtagctgggattacaggcatgcaccaccatgcctggctaattttctatttttagtagagacggggttccaccatgttagccaggctggtctcaaactcctgacctcaggtgatctgcccgcctcagcctcccaaagtgctgggattacaggcctaagccaccatgaccggccccttgtgatatagtttaaaagtgtgtgttgctgtgcaaagtactatatgtatgttttttaaacttttgatacataccgacaaatttttctctagaaaacttgtaccaattaaaagctcaacaatgtttgagcatacccatttttccaaactgttagcattgttgttttaaaatctttatcaatttaggaggtgaaaaatagcttgtttatatataaatgtgtgtgtatatgtgtatatgtgtgtatgtatatatatttaaacaatttatgtttttatatggttatttttcttttaacttgcttgtacatggtttttcaggcaagttttatttcacctttgctttttgccatgaatttgaatctttatatattaaacttactgatggttttaatagttggcaacacaacaagcaaaaaaaattgacagctaattttttcttatttacattttttgtttttaaaggtgaattttttacatttattataatatctactcttctgatttttttttgtgttgatttgcaagggtgccattttgcaagtcaaaaatggtcgagtcagagaaattagttcctctctatatggtgcaagcaatttttttctctctctctttttttttttaatttcatgtgctgttttatctgttcagaaatgtgagtttttatctaatttaatgcagtctctccttttgtagcttctgagtttcctgtcctacttagtgctagaattcctaaagctaatactgttcccctgacattgtcttggccatcagcaaggctttaactaaatgaaggcaggcactgggtatatggattttgacccaggagccatgctggtacatacagtaccacccattgtcaagagagtagaattccaatgccatagcccattaataaaaatccaagtttcattggactttatatataacatttatgcattcaatttgtctctccccggtgatgcccatggacatttgataactacttttttggtctcaccatcagatttttttttttttttttttttttttttttgagacgagtctcactctgtcgcctgggctggagtgcagtggcacaatctcggctcactgcaacctccacctcccaggttcaaacagttctctgcctcagcctcccgagtagctgggattataggcacccgccatcacatccggctaattttttgtatttttagtagagatggggtttcaccatcttggccaggctggtctcaaacttctgacctcgtgatccgcccacctcagcctcccaaagtgctgggattacaggcatgagccaccacgcccggccctccaagcccattatttaagttggaatcccctcctttttatattgctttgcatgatgtgatgtattaatccgtgagagactgcaggtttctttttctaattttctttcttacttaacataagcctagaaattaagccacatttaggaaggccttttttcctccccagtgttttttaaaaacaattttacaaattttctcgtagtattttgtatggcttctttgtgctgtgtttaaatcttaattcatctccaatttattttagtataagaaagagaaggccttcttttttaaataattcactcatgtatcacagtcccatttatggaaaaactgatattggtcgggcactgtggctcatgcctgtaatcccagcactttgggaggctgaggcaggtagatcacccgagatcagaagttagagaccagcctggccaacatgacaaaaccccatctctactaaaaatacaaaaatattagccgggtgtgatggtgcatgccgtcccggctacttgggaagctgaggcacaagaatcatttgaacccaggaggtggaggttgcagtgagccgatatcacaccactgcactgcagcctaggcaacagagcaaaactccatctcaaaaataaataatattttccccacagttttgaactgtcactagtatgttcttaattaaacctatttctctgatcttttttttctatccctgcttcatgaccatactaattcctgtcactttctaatatattttatctagaagatgaacattcttacttcttttcacaatgttagctattgtcgtatcctcactctctaaattattttttcagattttaacaaaatcttgtgattttgttattattgacataacattgaattcatgatatataaggggaaatttccatcctgtcaatatttaatcttgtcatatgggaaagtgttaaatctcatttgttcatcttttttgttccttcattaagattttgtttttgttttttcgttctatggtggttttttgtttgtttgtttgtttgtttgtttgtttgtttgttttgaaacagagtcttgctttgttgcccaggctggaatgcagtggcatgatctcagctcactacaatctccacctcccaggttcaagcaattctcatgcctcagcctcccaagtagctaggattacaggtgcccaccaccacgcccagctaatttttgtattttcagtagagacagcgtgtcaccatgttggccaggctgatcttgaactcctgacctaaggtgatccacctgcctcagcctcccaaagtgctgggattacaagtgtgagccaccatgcctggccatgtagttttcttaatatcaaacaacatattttttatcaatgccatgtgttttgttactatgatgaacagactctctttttttaattctatttccatggtgattattactaaaagagttttttgtgtttactacccttattgaattgctttattacaactactgttctcagttgatttctattactaaccactgtttttaaattaaatatttttcattgtatcgtttagtatgatatattcagtagaagataatgttttgcatgttgaagtttattcacttttatcaaagaatgatctttgaaggttatcctatgcttttgcaggatgtattgagattattcttgttatcttgacctattgatctaatatgttgatttcctaatgacctctatttgttcattgtttattattcatttgttatgctcctaaattgtttgttcatgctttgtaaataaactttgatttcctatttcactatgcctccttgcacagaacttggcacataatcagtccttattacagtgtctaagtgataataatttagctaaagttactaagtcttctctactaaggaccataaataggagggttgcatacacttcaggagcgtcttgttagccttttggttagtgatcaaagtggacttggacctgacttatcccagatccctctgtgtccttttcctcctctgatgtttcacaatattaagaagtggtgttagagtggaaaacgccacctttcaatgaaaacatgattcaaatctatactttttatatctataattacaggttgaaactatttcaaccagtcttcctagttcacaattcttcagtcctttcagtagtcttttctatagctcttggggatctgtatgtccctgtgtaagactctccttgaatcttgcaaagtagcaagagttttcataaggcccttggcaaggtgacagaagctgtctttaccctgatgacaagatataagattctgttccttatcttgggttctgccctacatgtctttcagacattattaaatctgtgtgttggccgggcgcagtagctcatgcctgtaatcccaacactttgggaggccaaggtgggtggatcacctgaggtcaggagttcgacaccagcctggccaatatagtgaaaccccgtctctactaaaaatgcaaaaattaggcatagtgacaggtacctgtaatcccagctactcaggaggctgaggcaggagaatcgcttgaacccaggaagcggaggttgcagtgagccgagatctcagccactgcactccagcctgggcgacagagggagactccgtctcaaaaaaaaaaaaaaaaatctgtctgccacctgaggccttgtcgaaaaaagacaaggtagaagacccagttgttagagctcttctgcatccgccttagataaacaaagaatcttctgaatgcctttagaataggaaaggggtagcagggcaaacaactctaggctgaggacattgtctccctgagaaatcctgtatgcgaaaccccattcttcttttatgtactcctaacgcatagtccttttcttagaagttagtattcttatacttagtgttcattatactattagatacctattgatatcttggccaggtgcagtggctcatgatgcctgttattcgctgcattttgggaggccaaggcgggtggatcacctgaggtcaggagttcgagaccagcctggccaacatggtgaaaccccgtctctactgaaaatataaaaattagccaggcatggtggctcatgcctgtaatcccaggtactccagagggggagacaggagaatcacctgaacccaggaggcagaggttgcagtgagctgagattgcaccactgcactccatcctgggtgacaaagtgagactccgtctcaaaaaaaaaaaaaaatacatatttatatctagatatctctatatcaagataatagatattaatagataatatatttatatctagtatatctgtgtttatatctacatttttatatatttatagtaatttcatttaaattttctattttttcatgttttaaatgttatgtttttaaaagaagatataaaaacaggcattccaaaatggaatttctatgccttaaaaacctttaactattttccttttggcttgtcaattttaaccatctgaatgttttgctataatttatgttatcacttgcagtttaaactattgtatttctaaagattttctattgtaaaatttcatctaaagttcatattgtacatactgaaggagttactcgattaacatttgagcaccagaattgagctcaaagagaaaaattattattggctcaccttttatgtggcaattctgttttggattcttagttaaagttgcattaaaatgtgtatatttgcacttactgggttaataacagcataaaggtcaacatttttctctgtagaacagaagtaaatatagagtccatcctttctagatcctgaagagtttagttactaaacaaaagggttttgaaattatcgaaaggatacctgcaaattgttttattcgaaagaaagtcaaaagtgttaatgttcaatataataacctatcaaaagagacttttagttacacaataatgtaaatgcttctaaaattgacactgaaaacagaatttgccaaaaaatgaaagttgtgtttttcagatcaacttgcttttcttgcttgtgtactaattagatacatactgccatgaaagaaagctcacctttatttgatgatgggcagccttggggagaagaaactgaagatggaattatgcataataaggtaccatgtattatcataaactgtaataatgaattgccttgatattattgtgtcactattggatttaatacagatgcccctcgacttatgatagagtaataaaccgactgtaaggtgaaaatatcatgtcaaaaatgcatttaatacacttaacctgccaaacgtcatagcttggcctagcctaccttaaacattctcagaacaattaaactagcttacagttgggcaaaattaatctaacacaaagcgtattttataataaagtattgaatagctcttgtaatttattgaatactatactaacagtgaaaaacaaaaaggttgtatggatacttgaaggatggtttctactccattgcttttgcaccatcagaaagctgaaaaatctgaagtcaaaccatcgttaagtcagggattgtctgtatattcttctgtagagttgtttttttgcttcctgaaaacattataaatttgttttttttaatattaatggatctgtttgaatcacattataatttcttaaaaataactaggcacaaaaatttgaaaattttaactaagtaaaaaatggaaggggattggaattaaatcataacatgttatatgttatagacgtaatgtttcttttcctcctttatgtcgtggaatgaagatatcagtattggcaacattattttaatgtaattctttgtcaacacaaaacataataggttaagtcttaagatattgcacgtggataggttgtttattttgttttgacctttttcattagacatattgccccttagcccagagtcgccacttccaaaagtggttgagataaaggaaacattaagattatacattaatacttcctagcatacataaaaaactagtcatcacatgggccacttagaagaaaaactattctctgttctaattctaaccttcattctttgaaacttttgtcacaaaagaaaagtggaaataatttcagtcccatcttttatgactgcctgggatgtagttcaaagatacatcaactgactagtgttggcatcattgcctttttctttttaacaaaaaataaacatgcgcctttactacttcaacaatgatcccagttggaaaggctcctagaaaacctttgatcccacccttgagaaaattatcctcccacattgcaatatgtatattgggctgcctctaattacccctcagttttcacccaagtacattacaacatctattaagtattaaatgtcttgccagacacagtggctcacacctgtaattctagcactttgggaggccgaggtgggcagattgcttgagctccagagttcaagaccagcctaagcaacatggcgaaaccccatctctgcaaaaagtacaaaaattagctgggtgtggtggtgcgtgcctgtggtcccagctacttgggaggctgaggctgcaggatcacttgagcccaggaggtcaaggctacagtgggccaagatcatgtcactgtactgcagcctgagtgacaaagtgagaccctgtctcaaaaaaaaaagtgttaaatgtcttgacatccatcctaaaggttaaaaaattattcttgctctctgagctattatagctattatttcaaatgacaatatatagagaagcacatgggaaactataaagtactctttgtaattaaagaaagttgtcagagtatctggcttcacaagtttccgatactcagctttgtgagtccacaaactcgatatttttaaacctataagatcaaaattgaccaagcttaaggaaactgattcagtcttaaccaaattcacagcaactgatctgaaggagaatgaaaatgtattaatttaccatcagtgatacacctttccagttacaggaatactcagactgcctattcagggtactcacttcaaggtcaccttaataagcaatgaattagcacaaagggaattggtttgtcttgagggatatttacttcatctaaggtatggaaaattctgatcatccattcttgccttctcataaagtctacattctcagtgaccaaaacatctcatgaatgcaaaatatagtgttattttctcttggataaatgttaagaattctagtattgtactgtttagattgctactcatcatgcaattcattttttagcctgaagttacaatgtaattgtagccttcattaattacatttgggtttttacaattagaccttatcaattcaattggacttagatgatcagcagtttatttaaatttttcatcaggtgctttattcctaaagatgattaagtttgtgcattttatgttgaattacatttattaataagcttccctgtttgtttgaccttctcaaaattctgaaggtatggctgtttttaaatattgcctttatccaaatttaagtgttattttatcctcattattcatatttagaagtagcagactaaataagtccatatagcataattatatagcctaggtttttgtctcttatttataggttcatctgactacttagtatttctgactattttttaaattcaaatataaatttccacctagaaaagtgaaacagaccaaatagagaatcataactttgtttctaaaatctgcttaaccccatagttgtttttggactacaccataaaatgctatgagagttttatgagtggtgccgacagctttgatgagatgaatgcagagctgcagtcaaaactgagtaagtgttctcgttcttagggtgcttgcttttggtcatttcactctgctcatggagtggtaatttatttaccatatccagtgttcatatgagctacttactttaaatgtatctggatgcctactgatttttatctttgtggtttctttggtggagagaagttaaacaaaaagaatactagtgttggagccagacctgagccataacatcttactgtctgtggcgccttaataaaatacttgacctcctgacaaagtgtagcagcagtagatgacagtataataaagtcataatataccaaacatgctaccagaagcatagacaataattagcaaatgctattcctcttgggggataatatccctacgttgtccttgcttactatttgagaaattaaagcaccaattagtcaaaagacctaaggtctctttcaaaatttgtggcaaaaagttaacaagacattatacttccaaatatgtaaggaaaatctttttttttttttactcatttacaacctagtgacatacagtatttactagataactctaaaacattccagaggtattattttacattttcattctttctattgaaatagtcttgtatataaaatgccaaaatggaaggtaaaatagataaatggaggtgaagctattcctccaacaatggaatcaatcactttgccagtattatcacaaaagctgaaagcattcccttatagtcccctgggattgtatcttcctgaagagtaaccaggacaatttcagcttgttcacatgggaaagggagcaaaataaatggctttgttttaagagaggaaaatttagagtgatctaagcatctaatgagtaatttgatatttctgtatataattaaccaagcataaaaactgcattcatttattcaaataaatattttttgtatacctactatgtgccagccaccatttaggcactgaggatacagtaatgaataggataaaaacctctgcccttatgagcttacattttagtagacagaaagaggaaaataatgaaatgagcaactttaagtcaaatggtgataagcgctttggagaaaaatcaagcaggacaaggagagtcgaagtacggtggagtaatggaaagggtttgctgttttacaaggatgggatgtacttcactaatagtgttttgggcagagaccagaaggaagtgagggagggagtaatggtgaaaacttgggaaagaatgttctaggcggatttgaggtcttaaaaagcttttggattttgtctccagaggatttatttaatgtggatgcttttaagctggaatcattagaagcaaaaaacagagcattgaatgaacagattgcaagattggaacaagaaagagaaaaagaaccggttagtaaacatgtttacacacttacttgagagctcttttagacttttgggtgtccttggatattagctgtctttatcaaaattttaaaaaatagattaacaaattaagcttcttaaaagttaaattttcacctagaaactcccaatgaaaacatgtttggtatctgtggagccttgttttcccttgcggtctatcagtcttagactaatggtgctctggatatgatgaaagattcttacctacttacataagatcaaaagtacttttgaacaaaggccctgtgttatatacctctagggagcattagtcacaagaagccctgagttttggaggtagtgcaaaaggaatggttaataaatgggtttatatagtatattgtatcctgagttttctaaaagctaaatattaatatccagttatctaactttattttctgcattattagtgaagcactcaaactgttgttgtaaaataccagattttaaatatttgtgctttttcaaccctagcaattgtggtttttttttttttctatttcaaactgacagtgtagtccccttttagttcttttgacttcctctaaaaatgaaaggaaaactcaaatctacctttctctaaaataaatttaaataatattgctttactttaaaataaaatatggaatggttattaagaataactaaagttatattcttttctcttaaagaatcgtctagagtcgttgagaaaactgaaggcttccttacaaggagatgttcaaaagtatcaggcatacatgagcaatttggagtctcattcagccattcttgaccagaaattaaatggtctcaatgaggaaattgctagagtaggtaagcagagctaatgctaaaagactgggatgcgaacctgtgtgggatttgtcacatgtaaaaacagctttgttatccatatcttttgttgttctgtggtacatgcttagagcaggctaccaagttttcagtgtgtttcgtatttgtttcctaaggctgctgtcacaaatgatcacaagtttggatggcttaaaacaacagaaatgtattatcgcacagttctagaggctgttccagcagatctgcatccctccaaggactcagggaggatctattccttgcctcttgcagcttttagtggctggcagcattactgggctatgttcacatcactccgatctctgcctccatcttcacattgccttctcctctgtgtttgtactctactacctgtgtgaaatatctccctctgcctctatcttataaggacatttgagatgagatttagggcccacctggataataatacagggctctctcttcatctcaagatacttaatcacatctgcaaagacccttttcccaaataaggtaatttcacagtttccagagatagaactttatatatttaggtggccattgttcaacctactactccttacatgttttcaagcatttggctttttgaagccaagaaggacccaacctaagaaaacatgctgcctgaatatagaaatatataaaaattctatacaaatatatactgtattccactttgtggttaataagccagataaaccagattcttttgttttttttgagatgaagtcttgctattttgcccaggccagtctcgaactcctgggttcaaataatcctcccacttcagtctcccacgtagctgggactataataggtgggctccaccatgcttggctctaataagccagattcttgatgtctgcctgcctcagtctgctataactggctatcctccatcactaccgcctaagcacctcagcagctgaaactgattgaaaatcaaaattaaagctgcaagtactacagttctcggggaaaagagcaaccaaagaaagctcttttatgtcttatgtcttgtaagcttactttcataaacacagcaatcttaatcataaaattctgtaaaacactatggcacatgcaattgcttgattcttctgcagtgcctgaaggagagtaaagaaaggtatctgcaagtcacagagccactgggctgtacttttaaaaataaatttattgacaactatactgttttcccaggactttgcctacttctgtttgtttcttttgggattttgctggctgtgtctgtcccacatgggagttgtatacatggcccttaggatatttgatttaactcttagtctatggagtattgattgtcaactcaagactagtaattaccagggttatttgctgaatctgttttttttttccaaataactctgatttatatatatatattggatttgctctaaaccaactctttaaatatattaactactttacacttggcccctaatcaatgtcctttgtttattcttcatgatgacaaagaagcttggactaaattattattataataatttttataatgcaattaatcaatactttttttttttttttttgagatgtagtcttgctgtgtcacccaggctgaagtgcagtggcaccatctccgctcactgcaacctccgcctcccgggttcaaataattcttctgcctcagcctcctgagtagctgggattacaggtgcacgccaccatgcccggctacttttttgtatttttagtagagacggggtttcaccatgctggccaggctggtctcaaactcctgacctcgtgatccacctacctcggcctcccaaagtgctgggattgcaggcgtgagccacagcacccggcctttaatcaatactttctaatactaatactttatctttcttgtcagcatatgatcaagagaattgtcatacatccttcttgttcttgtgagaactttttctgatagctgcaaactcagtaggtgagagagaaatacttaatcatttgccattccagagtgatttagtttgagacattaattttataactgttaatctaagatgtttttattctatgagtgtttgaactttcttgattatgtaaagccattcatggcatgagtggatgagacatatttaaattttattttgtttttgttttattttgtttttttttttttgagagacagagtgtcactctgtcgcccaggctggagtagagtggctcaatcttggctcactgcaaccctcgcctccggggttcaagcaagtctcctccctcagtttcccaagtagctgggactacaggagtgcaccatcatgcccagctaattttcattttttttagtagagacagggtttcactatatgttggccaagctggtctcaaactcctgacctcaggtgatccacccgcctcagcctcccaaagtgctggggttacaggcatgagccaccacacccagccataaattttatagatattatatgttgtggattttttgtgcagatgcctgtgataaatgcataaagttttactttatctaaccatgaatttgctttaagttcactgtgttgcaaataggttgtaacaaaccaagataccaaaataccaatcctctccacccttaggatgactctcttgaccccttagtcatcctcatccttttgtcccagcctgctataaaaatgctaatcatgttcaatataggccatgagtcacagaaggttggaaaacactattggtaaacagagaaagcaaaaacctgaccagtttggtatggttatcactgaaaatgtcagtaaaatatgaataaactctggtgtgtgtgtgtgtgtgtgtgtgtgtgtgtgtgtgtgtgtgtcttttttttttttttttgagtcagactcttactctgtcacccagcctggagtgcaatggcacgatctcagttcactgcaacttctgtctcctgggttcaagcgattttcctgcctcagcctcccaagtagctgggaccacagatgtgtgccaccacgcctggctaattttgtatttttagtagagacagggtttcaccatgttggccagactggtttcgaactcctgacctcaggtgatccacccgcctctgccataataagtcttatctcattttttcacatagtataaattatattcttatgcaggactgcgttaagatccagtagttcttaaacaatgttaccaaataaccacatatcccaaaggcagacagtcttcacagtgtacttttacctcattgaagttgaagctgttcctttacaatatttttccacttcaatgtgaagtagactgttaaggtttcattaggggtttaattatgtgtccttttaaagaaaaaatggttttgacaattcttccacaattcacagttctcagacaataactttttttgtaaatcatatagtccaactatgttttgaataaccagatgctctttagtagacgaaatctctcaatgcaactgtaataaataagcatctgtatcctgattcttatttatggcatctcatcatataccagtatatcctggaaccaaagtaagatgattttcctgtggatttcctacaatccacttatttgttttaaaacagaatatttccgtcatttataatttctgtttggatgataattctgaccaccacctttttatgactgcttgaagctagcttattttattttattttactttattttattttattttccgggagtctcactctgtctcccaggctggcgtgcagtggtgcgatctcggctcacagcagcctccgcctcccagattcaagtgattcacgtgcctcagccacccgagtagctgggattacaggcatgcgccaccatgcccagctaatttagtagagacagggtttcgccatgttggccaggctggtctcgaactcctgacctcaggtgatccgcctgcctcagggcttcccaaagcgctgggattacaggcgtgagccaccgcacctggccattgaagccaatttaatcaactattacatactcttcaaatttgctttaaagcagtcactttactagaagtaacaagtgtactggctttcttctgtaaactgttggtaaccacaagaaggcaatctaccacagctccaagctcttctatcctcaccaaataagctacaagttcacttgtacttctcttaaaagttaaagctacattcaatgagctttttcagaaaaaaatcaacagttttcctgctgaacaaaattttggccattgtttcatggtcctgagaaaccttagaaaaaaacccactatactgtgatgatgggttttctgtttgggaagaaccagaatcactggaattaatcaaatatgtgtgactcaactgtcatggcttaatttttcaggcaggtagcctgcacaagtcagttcattttctcatttgccgtggcacaatccccacttctaggcaactgttttttctgtaacaagaatttagaaagggatgattaactttctgaaatagactgccttatgtgctttaatctgggcttttcacaccttgtccaactgttctgtttatgtaagcagccacctgtcttggagacttcttaaccttcttcatgttgtattagtgaaattagagatcctttttctaggaaggtcaatggagggatcctcgatattacaaaagttccatttttttcacattgtgagtttcaaatgtcatattctcttaaatattggcaccttggggtatcatggagcctcagcctagaatgtccctttgtccccatgcagggccattcaaatgtggatgcatgcatgaacccaggattcttaatggcagtcattatttatgaagccacatttttttttcatgtagtactttttgaaaaccattgcaagctaatagggaaataagtttcttaacataaaactttaattgtcctatcttccagaatgttataaacaaagtaagatcaaaagaattatctcaaaaaatgagaatatacatacatatgtatatatatgactttgaaatttatatatatatatgagacttggaaatttttatatatactataaaaacatatatataatatatataatatatatacacacatatatatgacttggaaatttagatatcttagctctattacatgatggcatctgtttctttgtaggaattgaagatacattaaaaatttggtttttttccaacacagaactagaatgtgaaacaataaaacaggagaacactcgactacagaatatcattgacaaccagaagtactcagttgcagacattgagcgaataaatcatgaaagaaatgaattgcagcagactattaataaattaaccaaggacctggaagctgaacaacagaagttgtggaatgaggagttaaaatatgccagaggcaaagaagcggtatgtcataccatttccagagtggcaactcatcatagctgacctttctgaaggtctgtcccaattaagaagaagtcagtgggtagagtaaattggcttaagaggtaaaacattagcattgacattttaatgaaacactcatccctttatgtcaattcagtaacatcccaatttctctcaaatttaagataagttatatttcataacccaatgaaaaagtaaacaaaaaagtctctaaaactatgaaaataatgttcataggtcccactccttttactctgtagaagaggaaatgagtccttcattcacctattcactacttaagcattaagattgaacatccgctgtgtgtcacttatgctaggcatagaggaaataaagataaaacattggctttcccctcaaaaacttccaactgagtttgcatttactcccatgaaatgagacctctaataaatgtttggtgtacagggtactgaggaaacatatagtacacctagcccaaatttagtgtacatggtgtggggagatggctgagaggtttttagaagagaatttcttaaagagggaacaactgaactgaattgggaagtatagggaagggttagcatggcacagcctacaaaatgggagaaaattttcgcaacctactcatctgacaaagggctaatatccagaatctacaatgaactcaaacaaatttacaagaaaaaaacaaacaaacccatcaaaaagtgggcgaaggacatgaacagacacttctcaaaagaagacatttatgcagccaaaaaacacatgaaaaaatgctcaccatcactggccatcagagaaatgcaaatcaaaaccacaatgagataccatctcacaccagttagaatgacagtcattaaaaagtcaggaaacaacaggtgctggagaggatgtggagaaataggaacactttgacactgttggtgggactgtaaactagttcaaccattgtggaagtcagtgtggcgattcctcagggatctagaactagaaataccatttgacccagccatcccattactgggtatatacccaaaggattataaatcatgctgctataaagacccatgcacacatatgtttattgcggcactattcacaatagcaaagacttggaaccaacccaaatgtccaacaatgatagactggattaagaaaatgtggcacatatacaccatggaatactatgcagccgtaaaaaatgatgagttcatgtcctttgtagggacatggatgaaattggaaatcatcattctcagtaaactattgcaaggacaaaaaaccaaacaccgcatattctcactcataggtgggaattgaacaatgagaacacatggacacaggaaggggagcatcacactctggggactgttgtggggtgggggagaggggagggatagcattaggagatatacctaatgctaaatgatgagttaatgggtgcagcacaccagcatggcacatgtatacatatgtaactaatgtgcacattgtgcacatgtaccctaaaacttaaagtataataataataaaaaataagtaaataaaataaaataaaataaaatagcaagtgggacagagcaagagatgagactcaagagataagcatagaccagaggatgaagactcttcttgtttagaagtttggactttatccagaaagccctaagaaggtcctaaaatttttaaacaggtgtggttacatctcagaaagatcttatttctgataaggtgaaaatctgtggcagcaatctaataagaaattactatcattctctaaaagatagtaaggattcggtccggatgcagtggcacacgcctgtaatcccagcactttgggaggccaaggcaggtggatcatcagaagttatgacttcgagaccagcctggccaacatggtgaaaccccgtctttactaaaaatacaaaaagaagccaggtgtggtggcacctgcctgtaatcgcagctacttgggaggctgaggcaggagaatcgcttgaacccggaggcggaagttgcagtgagccaagatcccactattgcactccagcctgggcaaaaatagcaaaactctgtctaaaaaaaaaaaaataaagttaaagacagtaaggattcaaagaagtaggtagattctgacaacttagaggtagagcgaatgaaacttgatgaaagagggaggaagtggttgccctgtctggcttgggtaattgggcaggtgccactcactcagggagagaagagaaggaagaagttgtgagacaggaatggggatggatgtgttatatccacgtccaagtgaaaataggtaataggctgttatatatatgggtctggaccttggcatgagagaagccaattattcaacttaatttcaatgttatgggtaatacattaccaatttagccaacatttaatgtataagtaataagcccaaaatttaatgtataagtaatattgcttttgagatctaatgcatttttggaaattgcaaattggttaagcaagttccaacgtgtgctcttaccattgcattccttcactcaaattgatttttatggatgggtaataacaatgagaaacgaagtatgtgtttaatggaggaagcagattaaaaacaagttgcctagactctgcaaattcatttattcaatctaatattaagtatctactatatgccaagcactgttctaggtgctgaggatagagctgttttcatggaacttatattcagaaagtggagatgaacaaatatatgtcaggtagtgatgatggctatgaagaaaaataaaacaaaataagcatttagaagaattagggtgctatattaggggaaagcctttctgatgaccttatttgaacagagccctgaaggaagaaggaaggagagcaggaaatgtgaaatatattactaaaatatttttatcaatacagttaaaataacattttcagacataaatgattatattctacttattttggatacatgaaatgttttaatttgtacattgacaaaactaagattggtttgttttacatgtttcgtaatttctttatctggcacttcaaaaagtaaattttagttaatatctaaatatggactcttattccaagctgtcagataaatggaagatagtagtacattacacaccaattgatagtcttaattattctgtaaatttaagtgttactaaaaccttatcttctttgtatattttaaaactgctactcttactgctaaagattactgaattagtaaactactaaaaataggtgtgatatgttttgtataaaattttagaaatgtcaattgaaaaaaacatatggaatggggctgctttaacatgtcttatgtgttctgttcttacagattgaaacacaattagcagagtatcacaaattggctagaaaattaaaacttattcctaaaggtgctgagaattccaaaggttatgactttgaaattaagtttaatcccgaggctggtgccaactgccttgtcaaatacagggctcaagtttatgtaagtaatcatgactacttttaagatttttttaattctgtgattggtatctctaagagtttgaactttggcttgttcataacccagtactaaacaaaggaataaaacactgaaactgtatcttctttcttctcggtcatagaaatcttctactatccagtaaaaaaaattgattacatataaaatagatgccagtactataaagacaaagagggcctaacccttactgtcaagttgctaatgatccccccagaggagaaagacataaataaatgctatatatgtgcttaattagaagtctttacaagttatagtgaaaagatcagttcttcccatgtagcaaaaaagactctggagatggtaaccgtggaatgaaatcttgaaagatgagacatatatgggaagggtctgtagaaagaattccaggcacaagggcacacatgaaggcataaaatgtattagagtactaagaatactggtaatcaacaaggagaaattggtgcctaattttaaaatatggccaaggaagtaattttgggaagaaaatttttaaatagctctattgtaacttgtcagttatttatagattttagtatttgagttgcccctaaaaatgccaattttcaaaatacttcagttttgaataggagaatgtttattaaagtcaaaagctatacatttttcccttgagaattattcatttaacaagtatttattgagtgcatagtgtgttccagaccagctacatattagagataaaatatcaagaaacatacatccctactttaccagagagaacagtttgtgagtggacagacattgattaaatcaagctatagtcattttcaatagaaaaaatacatccagtaaacatttagtctattactaatctatctatagataggcaggcagagtttgctcaccactgttttgagtagtttgacatggctggtgcaagaaaataattacatgaatcacattcttgtagaaaagattacacaatgcaaaaagaagaatgaatatgctcgaggagaaattttgatttcatctctagaaatagttttacataataatagaacaataaaatagaatcaataaggtacaaagccaagtgttataagtagtacttggtgaaaagttctttaagagatttgagaggccgggcaaggtggctcaggcctgtaatcccagcactttgggaggcctaagtgggcagatcacgaggtcaggagttcgagagcagcctggccaatatggtgaaaccccatctctactaaaaatacaaaaactagccgggtgtggtggtgcacacctgtagtcccagctactcgggaggctgaggcagaggaatcgcttgaacccggaggcagaggttgcagtgagccaggatcacgccactgcactccagcctgggcaacagagtgagattccatctcaaaaaaaaaaaacagagagagagattgaagaggccattgcatcttttgcaaggagcaggccaaaattaaaactcagcaataacttcaaaagacctacttaaaacataatggcatatgggattttatttcagcataatgaaatgttttggaactggaggtgatggttactgtgttaaatgccactgaattacacgctataattttatgttaaactttatgtttattttatgttgtatgtttaattgtatgttaacgtcattttaacctaagtatttcagtttaaccattttaaagtgtgaatttcacctcaatttagaaaaatgacaagcaatgaagtgctgtgttaaagtcagtagaacagaataaacataagaaatacaggcagagaatcctaagactaaacagttgaaaaggattaagagaaattgatacttctggataacatagcataaaaatacaacctacatatgaattgttttcaaaaaaaatactgcagtaaactaagtgtacttgtaaaatgtttaaataatagcaatgaatttccaggatagatgagcaaatcttgaattttgcaagtattcaaaaccaaaagcaggttatagtctacacttacagaaatttgattaaaaactagttttgtttctgtttgacagtatattagatttaaaatgttataacttcagtttttctccaaaagtgactcctcctatcacagtgtgtagatgcttcaggagggatattttgtaattaaatgttatatgtcacccacattcctatgtattttataggtacctcttaaggaactcctgaatgaaactgaagaagaaattaataaagccctaaataaaaaaatgggtttggaggatactttagaacaagtaagtaataaaacataaaaagtcataaaaagtgaaaattagattttaaaacctaaaattaaaagttatttatggtttctgattgctaaggaattaattttttaacaaaactatgaaaaaatgagaattgggtatgctctcgacagaaatatttgaagtaacttattaagacatttaaacatcctagccttcacacatcacatatgatgaagcgagatgaaactaagtaaattttcctttttttaatagagaagtgtctctaacttgagataatttaatatttttatactaaaagaggcttcaagtggctaccttgaaagtaggcaagtataattacggcgttagaagctaattagctgtgatagattaagaggtttctttttaccaagtttttggattctggatcatggaatttcaggagaactcaaattcctttcaaagtctatttccaaaagtgaatttcaggtagtctctgcttctgagatccttaatatcacctatatccctgaaaaggaaaattctattattgtatttagtaacctttaaagtaaacattgttagttaagaaaagttaagctacttctcaaatgcacacacaaaggatttcatttataggacaccaagcagttaaaggaaaccccttgttaattcagctcttcaggaactactgtgatctggctaatagatttcaagatataaaatgaaattttatgttttctcagaagagaagcttgtttattttttctcaatctggaaacaaaacctatggcatttcacaaataattatgctagtaacccacagaaagacatttttccaatattaataaattctatcaagacttactttgtattagaatttttacattctcagaaaaatagaaaaatttgtaacattagataagtgaagagtttgatcacatcatactattattgctgtaattcgcagtttctaaaatatctatggagaaaagatgaggaatttgctccctgggactgctccctgggaatgatgattatttgcagtgaagtcttcctttagcctgcttcattttgatttctgttttttgctgtaatgggtactaaaacctggagattctcaaaaggtatgaattccaaacaacaggaacttcatatctaaaacatcttttagactgtcttgaactttttaaaggctatagatgggggaaagttataaaatggctactatagactaggacccatgttagtgtcctagagataaatacatccttcaggcactcccatatagagaaaaaggctgacataggtacagttatgctcatcagatttttaggtttacaaaaccctttgggctacaggaaaacatggcttagaggggatgcaactgaaaatgttaggagacttaaaccaatgtatactagaactagagggaaggaaacaggtttaggaaatgttaaggaggtagaacccaaggatttcatggctgcatgtgcaagcttgaggagaaagaagtatcaacatgacttccatatttttgatgtgggcaactgagtgaatcatagtgctattaacctaaaggaggaaaacttaaagtagggtgtggtgagatgttgagcttgctgtctgtaggatatccaggaggaagcagaagctatagattcagagtgtaagaaggagatcagggctgaaaatacagatttgatggtcattagagcatatgtaatagttgaagccatatatgtggatgaatgtggaggggaaagtggcagaggattgaatcctaaagagtaacaacatttaagggaccggcaaaggaaggagattctgggaaaaactcttagaaaaagtggacaaaattagttggagaacaacagaagagaatatgtttatacatatatatatatatatatatatacacctatgtaatatatataagccaaagtagggaaaacttttcaagaagggagagatcagtaatgtcatacagagactaacaactaaaattgtttttcctattggacaagtagtttaagttaagatgggatggggtaaaatgcaactggaaataataaagtttataaagaaattaataaattagagtaacaaaacatttaacctgaaaagtattttaaaataattgccaaaaccatttaagaaaaagcaggaaaatataaaatgagaaatagtttatagagatggtggaaatttatttgaattatgaagtaatatagtataaacagaaatttatgtttaaaattttttgatgaaatggattgtaacctgaacaatagaaatcccaaaaaagtcaaaatatgtaagtaaccagaaaccaaagtgaaaaagagaatttgctcttcaaaagactccaataacggataatttcataggtcactgttttcaaatactgaagactggatgatttctgtgacatgtaaattatcatagagcataaagagacctaattcatttataaggctaatgtaggcctcataccacaacatgacaaagatattacaaaaagaagaaattaagctaatcacacttatgaatatgaatgtaaataaaggttaaagttaaatatttgaaactgaaatttatgcagcaaatattttttgagtgcttatgtgcctagtactgtaatagatggtgatactagtacagtgcagcatctgcctttgtgaacttcattttaagtgggaagatgggcatgaaaacaatttcttctatcatagctttttgtaatgtgaatacagcgcactgtggattctcataatacacttaagtacaggctcc

SEQ ID NO: 215 - DNA, 32744 bp, Homo sapiens
  source 1..32744: mol_type = other DNA
gttgaatacctccctctccactcccatcttcagggtaagcaccgtaaagacggggatctttacgggttttcctcactgacttctcccaaaagctaaaccagcgcctggaatataaacatgtacataatttgcaggtgttagttttagcgtccttccggattcatttgtaacattggtcccttccctcactaaggtaatgtctcaagtaccacactcatcagagcatgtggaatgaatatcacagtggtaaaattgaactgagggcaattagccgtagaaagaaagaattccgcccccccaacctattaaatatgcaataaaacagataattcttaatcacccattggtagattaatttaatcgataaaattccactgaggctagtcctgtgtgaaagccctacagagtgttgaaagcatcaaccaaataggcaatgtatattaagttccagtaaaccttttacggcagttttatgtaaaatgttagaaatcacgctctcaacaattgcatcttgcggtagaaactacaacagtctatttaaataacaacagtctattaaaatgagataccatcttacatacagctgggaatggggaggagggagaaaagcaacaggacgaaaaggaaaattaagaaattgaaagagggccgtgcgcagtggcttaggcctgtaatcccagcactttgggaggctgaggcgggcagatcactgaggtcaggagttcgagaccagcctggccaacatggggaaaccctgtctctactaaaaatacaaagaaaattagccgagtgtggtgacgcacgcttgtaatcccagctacccgggaggctgaggcaggagaatcgcttgaacctgggaggtggaagttgcaatgagccaagatcacaccactgcactccagcctgggggacagagcgagagtctgtctcaaaaaaataaataataaattgaaagaggagaagaaagctccccaggcaacttattataatttcagtacgagagagacaaaacaaccccttaaagtagcatcacttaattataggttcataatctcatttgtagcaatgcagtatctatgtgtgccaaagcccagagaggcaaacatgtaattccttatgtgtgacactatatacatataaatatatctctgtcctcttgattaaaaacagacaaacattcccaaattttgctatttcaaaagtttatcctgtgtggattttgcaaatacagactggtttaaaatattttgaacaatccaggaaaaaaaatgaaggtctacttttatggacaacactaccacctcctggccttatgggatactgctgcccattgcacttggacaactacagccaaacacatttttatctttgccttacccaccagtaaacaagataaatgggttaataaactgaggaatctatgagccattaacctgctaaccctggcatagagcagtaaataaatcttgaagacaacaatacagggaaggaggaagtgagtaaaggaaatccaaactttatcttttaaaagatgcattcttctttttttagtcatccctctaatcaatggaaaaagatgcattttttttttttttttaattgagacagagtctcaccctgtctcccaggctagggtcagtgccgcgatttcagctcactgcaacttccgcctcctgggttgagatgattctcgtgcctcggcctcccgagtagctgggattacaggcacacgctaccatgcctggctaatttttgtatttttagtaaagacagggttttaccatgttggccaggctggtctcaaactcctgacttcagtggtccacccgcctcagcctccaaaagcgctgggattacaggtgtgagccactgtgcccggccaaaagatacattcttaaaaacaaatttgcaacactaggattttccttgagtgatgattttttttaacatatacacattttgagagggagacattactgcactgtatcacaagacagttatatccaacagaagggcttttttttttattgccaagtaacaattcatggtatgatatacttaaatattttgcctgtgtgagcatatatgtaattaagttgaggaaagatgacaagtagaatattgtgtgatgtttcttctctacacaaaataaaggaaaatctttaaaatcctagctgtcttctaagtgtagttatacaacatgaacacttgactcttttttgtataaagactataacttactaacttctaaatgattttcagtactccttaaagttttgataagctggccaggcatggtggctcacgcctgtaatcccagcagtttgggaggccgaggcgggcagatcacctgaggtcaggagttcgagaccagcctggccaacatggcaaaaacctgtctctactaaaaatacaaaaattagctgggcatggtggcaggcacctgtaatcccagctactcgggaggctgaggcaggggaatcacttgaacccgggaggcggagcgtgcagtgagccgagatcacgccattgcaccccagcctgggtgacaagagtgagccttcatctcaaaaaagaagaaaaaaaattgataagccttaccgtcatccatcatcacaacactctgaaagtgactgctgaccactcaaaggctaccagccattgatatcttctcagtggagttctagcacccctgtggaataacagcactgtcccattttctcattttcaattcaaattcaaagatttgaggccaggcgcagtggctcatacctgtaatcccaacactttgggaagccaacgcaggcagatcgcttgaggccatgagttcgagaccagtctggccaacatggtgaaacctcgtctctactaaaaatgcaaagaaaattagccaggcatggtgatgcatgcctgtaatcccagctactcgggaggctgaggcaggagaatcgcttgaacccaggaagtggagattgctgtgagccaagattgtaccactgcactccagccagggtgacagagtgagagtccgtctcaaagagaaaaaaaaaaaatccaaagattcaaatgcctttatgttcaggatattttgttcccaatttcagtcattgattgtatttttactctatgacttcatatttaaaatgtctgaacaactcaaatcaacatttaaatgtctttttcaaagtgctgtgaagtccatgttactctgaatatgattttgttttgttgattttgttactttattaaaaattgaatccttgactttttttatatttacttcttattcttgtagaataagtgtacttcatgcttcatactctggaggtactggctgtgctgctctgagtctttcagggagcaccatcactgtgcagcccaagcttttcccagacacttctggacaagtgctcctaagaggcacattcacctagaaaagtgcaccagaaaggaaaaaaaaaaaacagcatattttttaatgttgtaacctaaattttcattgcccacaattgtaataccttatacatctgtagtgctatttatactttcaaaatgtgctcttcagttatacaacttgaagggtcagatattattattcctatcttacagaagagaaaatacagtcataggacaaaatacagaagcagtaaatgaaacagttggtactggaattcaggcctcctgaccagctcagctctttctcctacattacaatgtccatgtacactcacagagagcgagaataaagtcctgagcccggccatgggggctcacacctgtaatcccagcactttgggaggctgaggcaggagcatcatttgagctcacaagtttgagaccagcctgggcaatgtgatgaaaatccatctctacaaaaaatacaaaaaagtaaccaggcatggtggtgcacacctataatcccagctgctcggaaggctgaggcacaagaatcgcttgagcccaggaggcagaggctgcagtgagccgagatcatgccactgccctccagcctgggcgatagagtgagaccttgtctcaaaaaaaagaaaaacattttttttgacgaaaagtagaggattgagataaaatgtgtgaacaatagtgtatcaatgggttcatgagagaccctggaaaatactaggctaagcaataatcacgtttcacctacttaatgtgattctcctttaagataattatttttaaaccattataaatgtatgacgttctgatctgaatataagtgtaattattagcttcaactagttaagaagatttgacttggaaaagacctcataaatatgaattttaggccaagccactattttatgcttatggaaattggagcctgcaaatgttaagtgacttaccccaaattactgctagttggcctgagataattcaaatacatttcctataacacaaactttccaaatactcttttatagtcatattacataattctgatcagatttcaaacattaggacaagcagtagcttactccttaattccagtgggaaattaaaaacaaaataaggcccaaaaatatatattctttgagacaggctcttgaggccaaggcttgagtccagtggcatgatctcagctcactgcaatctccacctcctaggttcaagcagtcctcccacctcagccttccaagtagctgggaccacaggtgcacacgaccacaccggctaactgttgtacttttttgcagagacggggtttcaccatgttgcccaggctggtctggaacttctgagctcaagtaatccacccacctcttcctcccaaggtgctgggattacagatgtgagccaccacaaccaggcacaaaaatatctttattttgtagcaaagtttgatgtttgacaataattgcttaaaaatggagaattatcaataaaattttaaccagagttttgtgttgtgtaaattaaaaattttcagactgaatcacactttgctgatgagacaatgcaaaaatgttttttcaagcctctattatttaatttttcctgattgattgtgtgtatgtgtagagagacagaatctcattctgctgcccaggctggatggagtgcagtggtgcgatcatagctcactgcaacctctaactcctgtgctcaaaagaatcctcccagctgggcacagtggtttatgcctgtaatcccagcactttgggaggttgaggcaggcagatcacctgaggttgggagttcaagaccagcctgaccaacatggagaaaccctgtctctactaaaaatacaaaattagctaggcatggtggtgcatgcctgtaatcccagctacttaggaggctgaggcaagagaatcgcttgaacccggaggggcggtggttgcggtgagccgagatcgtgccattgcactccagtctgggcaaccagagcgaaactccatctcaaaagaaaaaagagtcctcccacttcagccttctgaatgggccgggactacagggatgtgccaccacaccccgctaattttttaaaactttttgtaggccgggcatggtggctcacacctataatcccagcactttgagaggccgagaagggtggatcacgaggccaggagatcgagaccatcctggctaacacggtgaaacctctactaaaaatacaaaattaaaatacaaaaattagccgggcatggtggcatgtgcctgtagtcccagctactcaggaggctgaggcaggagaattgcttgaacccgggaggcagagatcgcagtgagccaagatcacgccattgcactccagcctgggtgacagagcgagactccgtctcaaaaaaaacaaaatttgtagagaaggggtctcggtctgctgcccaagctggtctcaaattcctgggctcaagggatcctcccgccttggcctcccaaagtgctgggattacaggtttgaaccactgtgcctggctaatttgtcctgatcttttttttttttttttttaagacggggtcttgctctgtcgctcaggctggagtgcagtggtacaatctcagctcagtgcaacctctgcctcccaggttcaagtgattctcctgcctcagcctcctgagtagctaggattacaggcgcccgtcaccatgcccagctaacttttgtatttttagtagagacagggtttcaccactttggccaggctggtctcaaactcctgatctcaagtgatccacccacctcagcctcccagagtgctggcgtgagccactgcacccgatctatcctaatctttattgagaaaagatggccctttcctgttgctcaaaaaaggttttttttttccctgatgtacaggtagaggtctagagctgctcttggctctttatgcattctactttgaccctatgagaacctcatttctcttccaaggtgagcatgtaatcaacataaaatatgacttccctttaattcaactagatgtttaatgaattcagcacattccagatgtgctaaaaagctggtcttttaagttttgccttagtaatttttgtagaagggtataggtaaaggtataggcgtggtggtatgtgcctgtggtcccagctactcgggaggctgaggtgggaggattgcttgagcccaggaggtagaggttgcagtgaatcgagttcatgccttatatgtatacttgtgcttttccttaggatttcccctgaacagttctgttaacctgaattcctgtcctcctcatcttttgtataaagagccactgatggaacactgtgtctttcccttatgtgccatacctgttcatgcctctcaggaaccagaagtgtaaccctcgctcctactctcgacctagcaatctaatccttcttaagagatgttggaagaaaaattattgacactgaaattcataaaaacatgacatcccagagcttaacctaaatttataagagaatgttttaaacaaacttcttaaaaatttttttttaattttttttgagacagagtcttgctcttgtcacccagactggagtgcattggcacaatctctgcttactgcaacctctgcctcccaggctcatgcagttctcctgcctcagcctcccgagtagctgcgattacagatcacgccaccacacccagctaatttttgtatttttagtagagacagggtttcaccatgttggccaggctggtcttgaacgcctgaccccgtgatctgcccaccctggcctcccaaagtgctgggataacagtcgtgagccaccgtgcccggcccaacacaattattttaattgtatcaaaattgttcctttgtggctgggcacagtggctcatacttgtgatcccagcatcttgggagactgagacaggaggaatgcttgatgccagaagttcaagaccagactgagcaacatagcaagaactcatctctacaaaaaaaaaaaaaaaaagtttaaaattagccagtcatggtggcatacacctatattcccagctacttaagaggctgaggcaagaggatcacttgagcccaggagttctaggttaaaagtgagctgtgatcacacccctgcactctagcctgggtgacagagtgagacccccagctcaaaataaaaaattattatcttgcaaagtttgctaagtaatggtcattcttcaactgtgatattgtcttaatgccatgggcattttcagggttaacaaaattttatggtttttttttttttttttttgtgaggtagggtctccctctgttgcccaggctggagtgcattgtgcaatcatggctcactgaagcctcctaacgtcccgcctcaattgatcctcccacctcagcttctcaaatagatgggactacaggtgcacgcaccatgcctggttgttgttgtttttgtttttgtatttttggtagagacagggtttcgccacattgcccaaactggtctcgaactcctcactcaattgatctacctgccttggcctcctaaaggggtggaattacaggcttcagtcaccacacccggccaaaaaaaaaaaaacttttgaattgatttattctaccacatttagaacaacctctactttatcacaaacaagctatttgattcttccaatcaggtttatcaaaactgaagattccaatttaacatctttaatccaaacatcagttttattaatatattgacaaaaaaagtaaatcttattcataatgagtttaaaattaaaaattccatatattactgaaattaagctaatataaatctcaatctgattctgataaattaagatgtatacggaaaacaacaacaaccaaacaaaaataagatgtatatggaaaccctaaagcaaacactaaaaaacccctcaaaaattagtgattaaaaaaagaaaatattgaaaatagtgataaaaatcattaaataaattaaaatgttaaattagaaaatattattttgggctgggcatggtggctcacaccagtaatcccaacactttgggaggctgagtgaggaggatcgcttgaggccatgagtttaagacctgtatttgagtgagaccttgtctctacaaaaaaattttaaaagttagctgagtgtggtggtacatgcctgtagtcccagctactctggaggctgaggccagaggatccgttgagcccaggtgttcaaggctgcagtgagctatgatcacaccactgcactctatccccaaagacagagtgagacagtctcttgaaattaagaaaatataatattcggccaggccgggtggctcatgcctgcaatcccagcactttgggaggccaaggcaggtggatcacaaggtcaggaattcaagaccagcctggccaacatggtgaaacccccgtctctagtaaaaatacaaaaattagccgggcgtggtggcacgtgcctgtactcccagctactcgggaggctgaggcaggagaattgcttgaatctgggaggcagaggttgcagtgaaccaagatcgtgccactgcactccagcctgggtgacagagcaagactctttctcaaaaaaaaaaaaaaaaagaaaagaaaagaaaatataatattcacttaacacagaagaaagcaatagacctgcaggtgctttctgatcctttttttttttttttttttttaaatagaacaagaaagcagtaagggagaaacaaagggggaaaaaaacacgagggaaaagtaaaatggcaaacacaaatccagccacatcaataataacattaaatgtgaatggggctgggtgcagtggctcacgcctgtaatcccagcactttgggaggccgaggcaggcgtatcacctgaggtcaggagtttgaaaccagcctggccaacatggtgagaccctgtccctacgaaaaatacaaaaattagccagacatgttggtgcaggcctgtaatcccagctatttgggaggctgaggcaggaaaatcacctgaacctgggaggtggaggttgcattgatctgagattgcaccactgcactccagactgggcaacagactgagactccaaccctcccccaactcctcccaccgccactggccaaaaaaagtggatggaggctgggtgccgtcgcagatgccaataatctcagcactttgggaacccgaggtgggcagatcacttgagatcaggagtttgagaccagcctgccaacaagacaaaaccctgtccatacccaaaaatacaaaaattacaaaaattagctgggcatagtggtgtgcacctgtggtcccagctatggaggctaaggcaggagaatcacttgaacccaggaggtagaggttgcagggagccaagattgcaccactgcactccagcctgggagacagagtaagattccatctcaaaaaaaaaaaaaaaaaaaaaaaaaaaaaaaatagtgaatgtacttaatccaatcaaaaagctgaaactgttcagactggattaaaaaaagaagattcaactatgtgttgtctacctagcaagatacactttattccttttttttttttttttttttttgagacagagtcttgctctgtcacccaggctggagtgtagtggagagcaatctcggctcactgcagccttcgcctcccgggtttaagcgattcccctgcctcagcctcccaagtagctgggattacaggtgtgggctactatgcctggctaatttttgtatttttagtagagacggggtttcatcaagttggccaggctggtcttgaactcctgatccaggtgatctgcctgcctcagcctcccaattacaggcttgagctaccgcaccccccgcacttttttttttttttttttttttttttgagacagagtttcactgtttcccaagctggagtgcagtggtgtgatctcagctcacggcaacctctttttttttgagacagagtttcactgtttcccaagctggagtgcagtggtgtgatctcagctcacggcaacctccacctcccagattgaagcgattctcctgtctcagcctcccgagtagctgggaatacaggcatgcgccaccatgcccagctaattttgtatttttactagagacagggtttctctatgttggtcaggctggtctcgaactcctgacctcaggtgatccgcccgccttggccttccaaagtgctgggattacaggcatgagccaccgcgcctggccccaattttttttatttttcagagatgccatctcactatgttgaccaggctgtgctcaaatttttattcaataggttcatgcttgactaatgaaaaatgaagtttctggtttctgatatttttctattaactaaatagacatatataaaactacatatatataatatagaggggactgttggcatacatattgtcaagaacaccaccttggagacattatgttttttaaactttacatttttaattgaaaaacaacttttatgacagctaaatatacaaggtaaatttaattcttaaaaagaaaaattggcgaggcatggtggctcacgcctgtaatcccagcactttgggaggccaaggcgggtggatcacctgaggtcgggagtttgagaccctcctgaccaacatgcagaaaccctgtctctacttaaaaaaaattagccaagtgtggtggcgcatgcctgtaatcccagctacttgggaggctgagtcaggagaatcacttgaacccaggaggcggaggttgcggtgagccgagattgcaccattgcactccagcctgggcaacaagagccaaactgtctcaaaaaaaaaaagaaaagaaaaagaaaaagaaaaattattagtaagaagaataggccaggtgcgatggtccatgcctgtaatcccggcacttggggaggccaaggcaggtggattgcctgagctcaggagttcgcgaccagcctgggcaacaaggtgaaacccctctctaataaaatacaaaaaaattagctgggcgtggtagcgtgtgcctgtagtcccagctacttgggaggctgaggcaggagaactgcttgaacctgcgaggtggaggttgcagtgagccaagattgtgccactgcactccagcctgggcaacagagtgagactctgtctcaaaaaaaaaagaaaaaagaatagcagacttctagtggtaaatgcactgaaattaccttattaagtcttcagagaaaaatattaatgccagactctattggtgcataaaaagcatatttattacagagtttacaccaaaagcacatttgaaatacacgttactctggtacaataaggtgggaagctcagcctcaatgttaatacagccttgatcttaatatagtctgtctcttagtacatacctcatagtttgtctcaaaagttgaaaattacaagcaattttctgttgatagctttttttgtaattttggcaaaagagtggttttttttaacttttttaaaaagttttttttttctttgagatagggtcttgctctgtcacccaggctggagtgcagtggcacaatcttttgggctcaagtgattcacccacctcagcctcccaagcagctgggaccacaggtgtgcacgatcacgccctgctaattttttacattttttgtagagaggggttcttgctatgttgcccaggctggtcttaaactcctgaacccaagagattctcctgcctcagcctcccagagtactggaattataggtgtgaaccactatgctttaaaaaaagcttcaattattattttgctaattttctacagtcatgtcagtctcacaagaaacatctgattaccatttttgatgaaaattgtagaagagggatcataatatttcagactttttaaacaaattgaatatttattatacataaaaataaaacaaagtagatttattcttttagagaaataggggggggtctctctatgctcccaggctggtcttgagctacttcttgggccatcctctggccgcagcctccaaaagtgctgggattataggtgtgagccatcacacctggcccaaaaagtaaattttaagacacttttagattttaattttcgaaaaacgaaatcattttatttgtaggggtgaattaaagtgattaaaagaattaataacttggatagccaactggtatagagttactttcttaagaccaatggataaagcaactaaattaagaactacacatatcagagtgaacaaagattctttgaaaaaataaaaaacttaaaaaaaatgaaaagaactatgcacagaagtgctaaatgggcaatcaaacccctcatatcatgtattatgcagcttcttgcaaaaagttgaattgctactctttttaaagtttacttttgttcacttaacactttttttaatatataaaattttaaaataagttgaggaatcaggtttcacactttcttttttttttttttttttttttttgagacagagtcttgctctgtcacccaggctggaatgcagtgacgcgatcttagctcaccacctctgtggactcaagcgatccttccgcctcagactcccgagtagcttggattatgggtgtgtgacaccatgcctagctacttaaaattaacttataaaaaacattttttttgagatggagtattgctctgttgcccacgctggagtacagtggcatgatcttggctcatcacaacctccgcctcccaggttcaagcgattctcctgcctcagtctcctgagtagctagactacaggcacatgccaccatgcccagctaatttttgtatctttagtagagacagggtttcactgtgttggccaggctggtcttgaacccctgacctcgtgatccacccacatcagcctcccaaagtgctggcattacaggtgtgagccaccatgcctggcccttttttttttttctgagatgcagtctcgctctgcctcccatgctggagtgcagtggcgcgatctcacctcactgcaacctctgcctcccaggttcaagcgattctcctgcctcagcctcctgagtagctgggattacaggtgtgagccaccgcacccggcctaattttcgtatttttagtagagacagggtttcaccatgttgcccaggctggtcacgaactcctgacctcaagtgatccacccacctcggcctcccaaagtgctgggattacaggcataaaccactacgccgagccttacaaaatttttaaaacgtgctcaattttaaaacaaaaatcagtatggaatcactcacatatgcttgttttcagtggtctcacacaatcaatctcttatttagattagtcacatatatgctgatttttttatcacaatgaaagaaaaaagggtttcagaagatagaatccatgaagaggctaataatgaatcctctgaccacagaaaatcagtgatcgactgcaagatcacaatttatcagtatcataacaaagaggtataataaagtttttctaaaatacccaattcatttttacaacaaatcacagtgataaatatttctaaatgattcatgtactttcatatgaggttattaatatttatgcttttctggtattagttttttcctactcttgcttcaaggtccaaccataaatttctggacagtctcaaatatcccaaggaccacgaataaaccacaaaagtggtaattcattaacatttattttcaccaatgcaataaataaatctgtcatgaggttaatttctcctaatctgtataaaataattccattaacctgtgaaaagtaatgatcatactgatttgtctagggctcaaacccttagacaaacatctctttgattacctgtttgtgtaaagaaaactgaatgcattttatattaatatttaaactactgataactgtaaacaaagtagcatttattaaaatagaatatacacttaatttatactaaattccagggagatttatacaagtttttcagccttaatttttaaaggaatgcatgattttttttaaacattaccagtcaagtatatacaaaattgaagtatgccattcaagccagattgtgattttaaaataacaaacctctaaatagctaagtaatgtacaatgtgtaaaattccaattaaacacaggtataaatcttatataaatattggccctataataccgagcgatatttacaagcaaacatgatccaaacagcacatgcagattcagggtaagtaaatactcggacacgaactgccagtcgcacttggtctccacggcaacagattatttcttcacagaaaggagatctatttaagaaaaaaaaaattattcaattaagaagtgaccatacactttaattccttatttgcaagtaaatcagtatttaaaataattttttcaggctaggcgtggtggctcatgcctgtaatcccagcactttgggaggccgagacaggtggatcacctgaggtcaggagttcaagaccagcttggccaacatagtgaaaccccgcctctactaaaaattacaaaaattagccgcgtgtggtggcgggcgtctgtaatcccagctacttgggaggctgaggcaggagaatcgcttgaatccaggaggcagaggttgcagtgagccaagaatgtgccactgcactacagcctgggcgacagactgagactccatctcaaaaataaataaataaaataattttttcaaattctgtctctgctatcaaagacactgtaattttggtcaagctattcaaattatagactatttccttatagtccaaacaaaatcagagatacctgagactgcaccaaaatcactgggcaaataatcccagactatctagggctacatttcagaccaaatgaatcaaaatctgtggcaaggagggtcagtcattgtaaaagctcccatatgacttggatgtcatttctaaataactaccagattaggctgggtgcaacggctcacacctgtaatcccagcaatttgggaggctgaggtgggaagactgcttgagcccaggagttcaagaccagcctgggcaacataggaagacccccatctctacaaaataaagataaaaaaaatagccaggtatggtggcacatgcctgtggtcccagttgcctgggagggtgaggtggaagggtcacttgggcccaggaggtcaaggctacagtgagccataactgtgccactgtactccagcatgggcagcagagcaagaccttgagttaaaaaaaaaaaaaaaaggaaattaaaaaaacccctgccggactgatctgtaagactcctaaactgaaaaaatgattccgtaaattacaccttaccgaagacatgtggcaaatgcacgtcttgcatttctatacacaaaatgtattgggaaccctttaaatgtgtgaccatcaggtacagcccttcttatggcatcttgaaattcttcattgcctgctgatatacttgttgtacgctcaaattcataagaagccaaagctggtgataaaaggtaggagagctggtcttcccaaacagtagtgaggccaagatcctatgagcaatcaagagaaaaagaaaaagtgaaatacattaatatttttaaaaccaactaaataaaaatgttgattattttaatgtataccaagaaaagatttttaaaagctatcataatattttaataataataattatagggatacatagaaataaaaatcagataaaaggaactataggtgatcagattttactttttagagaaacaaccaaaaaacattcaaaacaatgttcacaaagtctccaaatcctgtacttctctaatatctactacaaaatactatatgaaatagtcctaatatggaggacaggtataattcttatattttgagatattttacttaactttaaagagtttaggccgggtgcggtggctcacgcctgtaatcccagcagtttgggaggctgaggtgggcggatcatgaggtcaggagattgagaccatcctggctaacaaggtgaaaccctgtatctactaaaaatacaaaaaatgagttgggcgtggtggcgggtgcatgtagtcccagctacttgggaggctgaggcaggagaatggtatgaatccgggaggcagagcttgcagtgagccgagatcgtgccactgcactccagcctgggcaacagagcgagactctgtctcaaaaaaaataaataaataaaataaataaaaaagagtttagtaagaatgaatctgtttactaaagactgactcttcctaccataaactcaactacagaggtgagaaaagtcaacaaattaattctatgtgattaaacaaatatttactgaacatgtactctataaaacttatatactgtaagagataaaaagatgaagacattttataggcccttagggagcttaaaacatatttctatggaatgttaaaaacaacatgattccatttattttttatttttttaaattttttgagacagagtcttactctgttgcccaggctggaatgcagtggcgcgatctcggctcactgcaacctctgcctcccaggttcaagcgattctcctgcctcagactcctgagtagctgggactacagacacctgccaccatgcccggctaatttttgtatttttagtagagacgggctttcaccatgttggccaggctggtctcaaactcctgacctcaagtgatccacccacctcggcctcccaaagtgctgggattacaggcataagccaccgtgcccagcccatgattccatttataacaccaaaagacctattgatatctggacacatgaagttaaaaataataatattacaaatacaaaaaattctcaaaattctagatattttgattatcataatggatctttggtatttcctcattttatattcaaggttttaactcatcacaaatggtctcaaagatccacgattaacaatgcttttcctgcggcaaaatgtgaacttttgctgatttacaggcaccttaacttaaatagtgatcaacactggcatctatcacagctttgttttctttttctgtaaacagtaattccttttttttttttttttttttttgagacagggtcttactctgtcacccaggctggagtgcagtggcacaatctcggctcactgcaacctctgcctccccggctcctttcacctcagcctccgagtatctgggactacaggcatgcaccaccacacccggctaatttttgtactttttgtagagatagggtctcaccacgttgcccaggctggtcttgaactcctgagctcaagcaatccacccatctcagcctcccaaactgctgggattacaggcgtgagacactgtgcctggccaaaagtaatttttataagatattgcttttatttgtaagcagaacctaagaaaagaaagctaaagccaatacaagtgatggaaggaaagaaaaagtaataaggggcattcatttccagcaatataatggaccagaggtcccctgaccaacttttgctgaaaacatattacaaatgccaggttttccaaaatgtatgtttaaatgctttgataagttgacaagtgaataagaaatatttagaggccaaagctaagagtaactgggaacccagagaacatgtttgataaatcagtttgcctttgatagccccaaagaacacagaaaacagggctcacccaaggtgaggagtggaacagggaaccctaaaaggtgaatcagaaatattttgtaggcattttggattctagtcctttgttggtgatatgtgttacaaacaacttttcccaccccacagcttcaatctcttaatgtcttctcttgatgagcttaagtctttaagatacattaatcttttcctttatgactaatactttttatgtcttcttaaaagcactttacaaaggaaatctacatgctatttgacaagaggcttgatctggctgggcgcagtggctcacaactgtaatcccagcactttgggaggctgaggcaggtagatcacttcgagatcagcctggccaacatggtgaaaccctatctctacaaaaaatacaaaaactggcagcgtggtagcacatgtctataatcccagttattcaggaggctgaggcaggagaattgcttaaacctgggaggtagaggttgcagtgaaccaagatcacgccactgtgccaagatcacgccactgcgctccagcctgggtgacagagcgagagattccatctcaaaaaaaaaaaaaaaaaaaaaaaaaagaggtttgatctcaaaagtaatcagggaaatgcaaattaaagccagacgtctacccagttgagtacaacatgaaaacaaacagaaaccaacctggggagaaaaatgaatatgaaaaaagtataacccagtatacatattttttctttaaaaaataatagagatgatgtttcaccatattccccaggctggtcttgaactcctgggctcaagcgatccacccacctcagcctcccaaagtgctggggttataggcatgagccatcaagcccagcctaacccaggattttttaaggggcaaatatgtgaataagcatttcacaaagacaaaatccaaatagtggtattcagcaaaaatcttgactctaagggatgtgaacaagttcaccattcttcatttctaggaggaagtaattcattctataagtattaattaatttgaagatttttgagtctcagaacttgaactctcatgactttcaaaattataagcttcataatagtagggactgtagttgttttgttcagggctagaatagtgactggcactatcacacacaccaaaaaacagttaaatacataaatgaaaagaagtatgaaactacaactatttcagtgtgaattaccttcctgtgttctgacaccaggagcctcagctgcatttcaatttcattacttgttactgacgcgtcaattgtggatgcacacagaggtggaaagggaggaagggatgttgtagctccaggagcacacacagatttaattgcttcctcactcatgggtttccatttggattcatcgttcaaatcaaatacacaggtttctactgcatcagagggttgacaatttcccaggaacatctgatggttgaaaacacaaccaattgttcgatatgggtacagtggtttgggctgttcagcaactggaggttcatcaggattggtaggtttatggatgtacctaaaaaaattaaataattttatatatgagaacttaaaaattaaaaaggcagcatcttactgagaaaattattctaacacttaaggccataactacttctcagaactacagtttaatacttgtttttcttttttatatttccacaatttgattactctgtattaattgtatggtacgtctttacaatattgaaaccaactctgttaacaacagaatacattctatgtatactgttaagatcaaaggccggatgcggtagtcccagcactttgggaggccgaggcagggggatcacctgaggtcaagagttcgagactaacctgaccaacatggtgaaaccccgtctctgctaaaaatacaaaaattagctgggcatgggagcacgtgcctgtagtcccagctactcgggaggctaagccaggagaattgcttgaacccgggaggcggaggctgcagtgagccgtccagcctgagcaacaagggcgaaactccatctccaagaaaaaaaaataaaaataaaaaaagtttgcctcagataacataattaaaataatttggttatgcatttttaggcacaactaaccaaaacattattaggcatgattatcaaccagggagaaagaggactcgggaatgaaaagagggcccagggctgggcctctagaacacacacatttaaagacaagatgaaggaaaaactaagaacagccagagaggaataataaatattgaaagacaatgataaaaaagaagctaaggaaagagaatgttccatgaagaaagaagtgagacagccaggtggaaaggggtccccagagaaactccaaccagcctgtgcactgggaggagtgcacactggggagaagccacagaagttcgagcaatttgcagtggggaggagcttggcccctcctcttcctgagtggaagctggaattcaatctgcgaggcaggaagcacactagcaggcaggaagcacactagcaggcacgaagcacactagcaggcactctggctttgtggagcgtccgtttcccagtgtttttcctttttgttcaataaattccatttttctcccccttcaaattgcctgcgagcctaatttttcgtggccatgtgacaaggactcagctcttagctgaactaaggaagaagtcctacaacagaagtactcagctgtttcaaaatctaatgacaggctaaagtactttaaaaaatgtgtccagtggatttgccaacgtggagatggtaaccacatcaaattttaaaaagaaatcatcatttacaacttgaacttattttcagacttaggtatgatcatcagaaaaaaacatatgccagccaggtgtggtggctcatgcctataatctcagcactttggaaggccgtggcaggtagactgcttgagcccaggagttcaagaccagcctagacaacacagcaaaagctcatccctacaaaaaaattagctaggcatggctgtgcacacctgcagtcccagctacgcaagaggctgaggtaggaggaccaccagaacccaggagggggaggctgcagtgggctgtgactgtgccactgcactccagcctgagcaacagaatgagacactgcaaaaaaaaaaaaagagaaaactgaaaaaaaaatatgctaatcatacaaaactagtaaacataatttactgtttaccaacatcatgttggtaaagaatatttgaggtaaaagttttcttagagttcatttacttggctgccataattgaagtacttttttacataatcactgaaaaggctctaactaaaatcatcaacacgtaccttcaagtaccatcaatatggacaaaaaacccttataatttaaaatacttataacttaagccggacacagtggctcacgcctgtaatcccagcactttgggaggctgaggtaggtggatcacctaaggtcaggagttcgagaccagcctggctaacatggtgaaaacttgtctctactaaaaatacaaaaatcagccaggtgcggtggcacatgcctgtaatcccagctacttgggaggctgagacaggagaatcggcttgaacctgggaggtggaggttgcagtgagctgagattgtgccagtgcactccagcctgggcgacagagcgagactccatctcaaaaaaaaaaaaaaaaaaaaacttataacttcattttaatatccttataaacttagtaaactaacctgtgtcctgttaaactctcccaaaaagtgatggccccatcagttccacaagtcataacccatgcatgaggtactccttttgccttggtcccaacacaaacaaaggcttctaatccatatccaagaagaaggctgcacagaaggttagcgtgatcttcacagtcaccctggaagataaattaaaatgaagtattcattcttccatattatttcctcattacatacttaaatactaaattataataaaaatttattggctgggcacagtggctcacgcctgtaatcccaacactttgggaggccaaggcgggtggatcacatgacgtcaggagttcaagaccagcctggccaacataaggaaactctgtctctactaaaaatacaaaaattagccgggtgtggtagcacacaccattagtcccagctactcaggaggcgaggcaagagaatcacgtgaacttgggaggcggaggttgcagtgagctacaatcgcgccactgcattccagcctcagcaacagagtaagactctgtttccaaaaaaaaaaaaaaatgtttataaagaactcacacaacacagaaagaaaagtagaacatttttttttttttttttttttgagacagggtcttcctctgtcacccaggctggtgacatgattcatagcagccttgacctcctgggcttaagtgatttccccatctcagcctcccaagtagctgggactaaaggtgtgcaccatgacacctagctaattttaaaattttttttgtataaacaggggtcttactgtgttacccaggctgctcttgaactcctgggctcaagtgatcctcctgcctcagcctcccaaagtgttgggattacaggcatgagctcctgtgcccagcctggaatattttaatagattaatagctgaagtacatgaacaaacaagcaaacaagtcatacagcaagaaatgcaaataaatggaaaacactcaaccaatgactgatagtatctatatgtgataatttcaagaaaatacatacataagaaaaatgactggcaagaacaacaacaaaatgccaacaatggttattactggggaggttatatataattttccactctttttccagattttctttggttatattactttcaattttaaaaagttataaagacctataaaaaaatagaaaatattagctgggtatggtggtgtgtgcctgtaatcccagctactcaggaggctgaggcaggagaatcgcttgaacctgggaggcagagattgcagtgagctgagatcgtgccactgcactccagcctggacaacagagtgagactctgtctctaaaaaaaaaaagaaaaaaagaaaagaaaatatctgatactgtgttctgtgaaaaaaattaccaagatattaaacactatggttacaatttcgtatttaagtgtaggaagactacacgcgaaagcaaaaataactatttgagttgagtgtccgaatgaagaaatttcttttttttttcctctcttttgagatagggtctagttctgacacccaggctggagtgcagtggcatgatctcagctcaatgctgccttgacgtcctcagctcactgcagccttgatgtccccagctcaagtgattcccccgcctcagcctcctgaatagctgggaccacaggcactcatcaccaggcccagctattttttgtgtttttgtagagacaaggtttcaccaagttgccctggctggtctcgaattcctggactcaagcaatccgcttgcctcagcctcccaaagtgctgggactacaggcatgagccaccttacctggccaagaaatttctttctccaaaaaattggatttggtggtgctaaagttttttaaaaaaaattaactgtaagaaaacaaatagcattttatagttcttcaagtggctttacaaaaatgtaataaccaatcttttattttttaatttacttttttcttttttgagacagagtctcgctctgtcacccaggctggaatgcagtggcatgacctcggctcactacaacctcctcctcccgggttccaatgattctcagcctcctgagtagctaggactacaggcgtgcaccaccacacccagctaatttttgtatttttagtagagagagagtttcatcatgttggccaggttggtcttgaactcctgacctcaagtgatccacccacctcggcctcccaaagtgctgcgattacaggcatgagccactgcgcctggcttaatcaaccttttagacccaattatttctgagattttgtcctaaagaaaattcagaagtaaaataaaaatatctgcaaagatagtcagtgtgaaagttcattcatggcaacattaaaaaatttaaaatgagcttaactttatggccaggtgtgccagcttttgcctgtaatctcagcactttgggaggctgaagcgggcagatcacttgaggccaggagtttgagaccaccctggccaagaaaccccatctctactaaaaataccaaaaaaaaaaaaaaaaaagccaggcatggtggctccatgcctgtagtcccagctactcaggaggctgaggtaggagaattgcttgaggctgggaggcggaggttgcagtgagtcgagatcgtgacactgcactccagcctgggcgacagagcgagaccccgtcctaaacaaaaacaaaagaaaacaacaacaacaaaaccactgaataaaaaaaaaagagcctaacttggcagttcctacaatagggaaatagttaaatgtattttgtatattgactcaaggaaacttaaaacactcattaaaaaacggaaatcagcactttaggaggcagaggcgggcagatcacctaacgtcaggagttcgagaccagcctagccaacacagtgaaaccccatctctactaaaaatacaaaaatgagctgggggtggtggcgggcacctgtaatcccagctactagggaggctgaggcaggagaatcgcttgaacccaggagacggaggttgcagtgggccgagatcatgccattgcactccagcctgggcgacaagaggaaaactctgtctcatttaaaaaaaaaaggaaatcagaaagactgtagcaacacatagaaaaatgttcatagcataatgcttaattataaagcaagatacaaaaatttatttacaattataattatgaaataaatgatacatatacagcagaaaaaatataaaaagaaataataaactaggaatagaattataggtaaagtttcaccattactgttgtaatgctgttgtttgtacagtaaaaaatctaaatatatatatgatatatatcatatatatgatatcatatatatatgtatttttttttgagacagagtcttgctctgtcgtccagtttggagtgcagtggcgcgatctcagctcactgcaacctccacctcatgggttcaagtgattctcctttttttgtgtttttagtagagatggggtttcaccgtatcagcaaggatgatctcgatctcctgaccgtgtgatccgcccgcctcagcctcccaaagtgctgggattgcaggcgtgagccaccacacctggcccatgcctgggtaatttttatagttttttagagagagggattttgccatgttgcccaggtttgtctggaacttctgggctcaagtgatttgcccaccttggcctacccaagtgctggaattgcgggcatgagccaccatgcctggcctgctgtcacctttatttattttttttgagacagagtctcgctctgtcacccaggctaaagatagttttttgttttttttttttgagatggagttttgctcttattgcccacactggagtgcgatggcgtgatctcggctcactgcaacctccacctcccaggttcaagtgattctcctgcctcagcctcccaagtagctgggattacaggagcccgccaccatggctggctaatttttgtattttttcagtagagatggagtttctccatgttagccaggctgttctagaactcccgaccacaggtgatccaccctccccggcctcccaaagtgctgggattacaggcgtgagccaccgcgcctggcctaaagatagttttacttgtttgttatcatactatcaacatttttagaacacagattaggaaatatcccataatctataaaattagtttactaaaatcaagtcattcaaaaagtgtaattaaatatacatttgtatttaaatacaaactaaacaaactaaatagcatgcaattcaagatttttttctattttaatattttttctatattaattttgtactgccattttctcttttttttttatggagtttcgctcgttgcccaggctggagtgcaatggcgcgatctcagctcaccacaacctccgcctcccaggttcaagcaattctcctgcctcagcctcctcagtagctaagattacaggcacgtgccaccacaccacgctaattttgtacttttagtggagacggagtttctccacgttggtcagactggtcttgaactcctgacctcaggtgatccacccacctctgcctcccaaagtgctgggattacaggcatgagccaccacgcccagccttattttctcttttttaaagatgtattatctgagcaaattgcaacacatcagtagtaccagaaagccatggtctggtcctggtgctgttcctaattcattctgcaacttgatttctgacattttagtacttgtaggtccctacatcacagaaatcacaataaataagaaactacatgagaaaataaagatgctgagttttttgtgtattgatatttaaatgttatgaaaaacagaacaaggttctgacgtggtcaagctgatagcaccccaaagcggttagttccaggacccttgcaaaacaaaatccgtggatactcaaggcttatataaaatagtattttttttttttttgagacgtgtcttgctctgtcctcaggctagagtgcaatggtgcgatctcagctcactgcaacctccgcctccagggtccaagtgattctcctgcctcagcctcctgagtagctgggattacaggcacacgacaccatgcccagataattttttgtattttagtagagatagggtttcaccatgttgcccagactggtcttgaactcctgacctcaggtgatccacctgcctcagcctcccaaaatgctgggatacaggcatgagccactgcggccagccaaaatggtatagtattttatatataacctaagcacatcctcctatatactttaaatcacctctaaattgtttaaaaatctcaatacaatgtaaatgctacataaacgttgttacacaccattttttaatttgtactattttttattattgtaattttttacttttgtaagtatttttgatctgcagttggttgaatctacagatacagaacctgtgggtacagagggttgactatatgtgcatttttctaaggcattcttttacaaatggattacaaattcagagtaactatgatatactgctacttaattctattatgtgtgtataataccttgtttctacagagaaaggccagcagagtgcaccactgctcctgtttacctcctcctccaataacaggggctcgttcataaccaaggacattaacaaatcttgctgcttgccttggagtatcaagaagccgtccagctcgaagtggtttaacataggaacagactggtctatttatcccattttcatcctagggaaaaggggaaaaacatctgtaatgacatattaatcatccccaattatgtttttttcaaatacattaatgtaggataaaataattcagcataccattgatcgagtgcttaccttgtatccagtatttggctgcaaagtgctgtgtatataatttcccttaatcctcatctccgttattttcattttatagatgaaaactgaggagctacagctattatgcaacagagccaggttcaagctctgagctgttttactccaaaggctgtggcaataagaactcctctgagaaatgtgtgggtaggtatgtaggggagggagaggtgctctaagctgaagtattttttcacattaccatatagaatttaacaacatatagccagacagaacaaataactcttctgattggctgatataacagaaatgattgtagcttgattctagtttgtttccattagggcctcaaatttagagatccacaggaaacaataatttgttaaccaagtcaattgaaagcaaaatttcaaaaaacactctagaaaaagttttacatcctaaatacaggatatctcctggtgttggtgctgaataacttgtatgcatatataggtctctgatgactgtctaccactgtgattttacagtgagtattaccaaagtccacaatctctttaccttcatggttactgatacggcactgtgaaagggccacttactattcaagatttggagatgacctaccctccctgatagggttcctcaggacatgagatctaacccagccaaaagaaacaccatctgtttgaattatcagaaccactgatgtctttctccacaaccagaacatctttttccaatatagtcccatactttagcaaggaaaaaaaaactcacttatttacatttgattataatgagaaagatcattaatttttatgttgcagagcaacttggctatagattccactcatacctatagttctcaactatagaaggcatcaatttttttttttttttttttgagacagagtctcgctgttgtccaggctggagtgcagtagtgtgatttcggctcgctgcaacctccgcccatgggttcaagcgattcttgtgcctcggcctcctgagtagctgggattacaggtatgtgccaccacacctggctaatttttgtatttttgtagagatggggtttcacgatgttgaccaggcttggtctcaaactcctgacctcaagtgatccgcccacctcgacctcccaaagtgctggtattacaggtgtgagccactgtgcctggcctagagggcaccgatttttaaaacagaggattattattctaattttggggggatgtagagaactatggttttcttttacatgaacttagcattactaataatctagtgtggtataagaatactaagtcctgaaatcacaaactaaatattaaaagaatatcctcaatcctcaagtgatttacaacattttcttaaaacctaatggccttaggctgggcacggtggctcacgcctgtaatcccagcactttgggaggccaaggtgggtggatcacgaggtcaggagatcaattccatcctggctaacatggtgaaaccccatctccactaaaaatacaaaaaaaattagccaggcatgtggtcccagcaacttaggaggctgaggcaggagaatggcatgaatctgggaggcggagcttgcagtgagccgagatcgtgccactgcactccagcctgggcgagagcgagactccatctcaaaaaaaaaaaaaaaaaaacaaaacctagtggccttaaagttcaatttctgtaacttattttaaagtttcttgcactaaaaagttcaaaaagcatcattcaatgaattactactatactatagcaaaaccagctaacaaagggtaaaaagaataatgaatttttaagtataatggccacggcaaatctacagatctttggttagtattgaggtgcaggactgttactcctattcttacaaatccactaacaggcaagaaaagatgagcacataagaagtggaagcatttgcctaagtcaatcatcaatagtagcatcttagaatgtaagatatatcattttattacagcaatattctaatattatctaaatatatccccacaagctacttaactgttttgaaaagttaatatttcaacctctgaatgggcactgtccagtgagaaaatcactaaccattatgagctatttaaattttaattaaaatttaaaattcaattatttttagtcataatagccacattttgaatgctcagtacatggctggtggctaccatactggttagcacagatacagaacatttccatcattgcaaaaagttcttggccaggtgtggtggctcacgcctatgatcccagcactttgggaggccgaggcgggcgggtcatgaggtcaggagatcgagaccatcctggctaacacagtgaaaccccatctctactaaaaacacaaaaaattagccaggcatggtggcacgtgcctgtagtcccagctacttgggaggctgaggcaggagaatcacttgaatctgggaggtggaggttgcagtgagccaagatcgcaccactgcactcaaccctgggtgactgagactctgtctcacaacaacaacaaaaaaaagttctttactttactttcagtgctggatacattagaaatttttttggcctggatatgtatattaacgttttgatttataactattgtttttataattagattgactgttttacactgttgttgtttaatttcagaactagtcaaatacaggaagcagcaagaaacagttctgaggaatctaaattaaatcagcattttatttactctatgtatatggaaagaggtggcataaaccaaaaaggcaccagttgaaactccaatttgacacagactttgccatgactgagttgctgtttggccttgaaaagactgttcacttctctaaccttcatactgtttacaaaaagagccaatgcctggccacttgacaatcttatatggttactatgagactaaattacgttctatggttcaaatcttaaaatgaattctgagagaggaagtcgtttaagtaatatttcctaaaagaaaatcccacttccttgacttccttagtgcatttcaacttcttcctcctctttgatcctgccatttctctgattcactgcctcactccatcctgagtcctctctagttcctaattccacgtggcaatgaataaatgcctcagactatatagacagcagggagccagtttatatatatatatatgtatattttttgtcgttgttattgttttgagacagagtctcactctgttgcccaggctggagtgcaatggcgtgatcttcgctcactgcaacctccgcctcccgggttaagcaattctcctgcctcagcctcctgactaactgggattataggtgcctgccaccaagcctggctaatttttgtatttttagtagagacaaggtttcgccatgttggccaggctggtctcaaacccctgacctcagaggatccacctgcctcggcctccccaagtgctgggattacaggcgtgagccaccgcgcccggccaggaagccagttacattttgattggtttctccttgcctttgtcctgataatgttgttaccttgccaaccagtcattcaatatataaacaacgctatcagaaagtcagaagccatttcccttattcccacctctagtcaacctctcattcccaagctccccatctggacactaaaccacttttagcctgttccaaaatctagggaaagtagggtaaagctggatgaatgtacaggatttgagaaacttaacttaaaataatatactacactatacttatatgaaagcatctgtatgaggctgaatatatacaaaatatttgaactgttccttaggagttacaaaaaatacgtgaacctgaccacattttttgttgtttttttttttgagacggagtcttgctgtgttgcccaggccggactgcagtggtgcgatctcggctcactgcaagctccgcctcccgggttcacgccattctcctgcctcagcctcccgagtagctgcgactataggagcccgccatcacgcccggctaattttttgtgtttttagtagaaacggggtttcaccgtgttagccaggatggtctcgatctcctgacctcttgatccacccacctcggcctccccaagtgctgggattacaggcgtgagccaccgcgcctagctgacctgaccatatattttatattggtctgttaaagagagaaaatgggtttaggactcaggaaaaatggaggcagagatatatagttgaaatgcttcagttaaacattactggtcactggcttagaagtcgtggttatatacaattttttttaaaaccctaacaaaaaatatatatatgcccagagcccccccccgttctgcacacaagagctggatttacatataacctgcaaagtgtccaaatggttaattatttagcactaagtatcaagcaaatacacattccaagttaaacaaaatggattttcatctactttaaatcaaatatattcagaaagggtttaaaacacaataattgattcaacctgagaaaggtgatttttcaaaaacccacaataactgaaattgaaagtaaaataagacatagattgatcttgccactcactatgcagtgaaagagaatattacaaaatcagcattttattttacaaatacacttttattttttggaatacattttacaaataaatattaaatgaaatttacacacataacagtaaatctcaaatacaggcataaaattattctaatataatttacaaacctgtgcaaaaatcttaaccagtcgtgagttgtgtgagggtcgaatttgcaaatattctctccaccactgcttagcatatacaagaaataatcgctctttctctgcagttttctgacgttccaaag

SEQ ID NO: 216 - DNA, 32744 bp, Homo sapiens
  source 1..32744: mol_type = other DNA
acgtcgcgcgggctcccgggcggggcgggtccggccgcctccgagcccggccggcagcccccggccttaaagcgcgggctgtccggaggggtcggctttcccaccgaggatttggcactctggtgagggaaaagggcgaaagagaaaagcgagcagccgtcctttcacagcctcagaaagtgctcgcttcccttcgggggctttcgcgaatcccgaggcaatctcggaggcggtgagtaaaagcaatctctttaccccacccggagctctgggtcggagcgactgcttctggtctggagctgcgtgcttggcgaagggctcccggggtaggggtggctcccggctctggggttgtgtctgatgaaataggccgggcccgggctacactcggtggtggtggaccggcgggaggacgagcgctacctcagtactacttctgggtctcccgcgcgggctgaggaagcgcctttcgccgccaagcccgccccgcgcatgcgccgactgcggctcgcgcgcgcgcttcggaggttttttggccagacccgcacgcggaaccggcgcgggcacctggggagaaatggatggagaagggacctggctggaaagcctttgccccgctgctctgctccgcccataagaggacccctgaaatgtcccgtgcagtttgttcaagtcccctgtgtgatgaaatgtgcctctcgccttacccgtgtgagaatacctgtggtgtggcagcgagtattttggtgagcacctgcagtgtagtggtttatactaaggaatacacacaaattacaggcctttgagcccagaatgcaacttgggaggtaagacgtgacgttctgagagattgaaaaatgtacattgtcgtcgtgcctcgaataacggttcattgcagagagagatgctaacaaaaagtgccgggcatgcgggtaggtggaaagggttttgcgagccagaatttgcaagttgaatgttttgtttttatgttttgtttttaaggcactgtacatcacttacttgaagatagatacgtaaaggatgcttattttacactctttaaacgaatatgttaatactttttcggtcattgaagtaattaaaccttcattttaaactgttgacttaatagaaatcgtttatgtcttctttttttttctttttgctgcagagaggtattttttctttattttattattattttttatactttaagttctagggtacatatgcacgacgtgcaggtttgttacatatgcatacatgtgccatgttggtgtgctgcacccattaactcgtcatttactttaggtatatctcctaatcctatccctccccccaccccacggcaggccccggtgtgtgacgttccccttcctgtgtccaggtgttctcattgttcagttcccacctatgattgagaacatgcgggctacagagaggtattttacagttattggtctcatgacttgatttccatccctgacatagccatgtcccagctgtgtgaccttggacatttactgccttacgcctcttcccccaactctaaaatgaaattatagtagctgtcttacagagtttttctgaaggttaggtagaatataaatattctataatatataattatatattaaataatatataaatacaaatattaatattaatattctatagtttctggtatgtgggaaacaaatggtgacttttattcacaattatatataggcccatttgtttatctgttagagttaaagatagaataaaaacctctttggtaacaaaactaatgcagtgcacctaattctacttttaaaaacttttttacagaaataaatgtacacaagagaaatactggaattatgaaccccattgtatacgcacccacccagcttcagaaattgttgaagttcagcccttgtttcatctcttcacccaacatccatttttgtttgtttttgctggattttttttttttcaagcaaatcgcagagtatatccctttacctgtaaatatctcggtaaatatccctttaacagataaggcctttctaaaaaaaaaacaaacaaaaccgcatcattatcatacccaagaaaattaataatttcctaatatctaaaatccagctcatatttagtttctggattattttttaaaagtctaatcacaatttttgcaaagcttgatagtttatttttgtagctcttgacggttcaccaagtggcttcacatatactcctgctcccttcagaattactctttcagcccctttgtcagagacctcaggaaatggttagcaggaaacaatcagtttgctttggctaaggagccagatgtgaggtttagtagacttgctgatcactattactttttaagttgtagctaattaatggtttcattttaagaacacatattaaaatatttactaatccattcaaacttcttaacctgttggtttcttcaaggactatgtaataaacttaatgattcacctttattctaagagaggcatgaagtaacattaccctaattgtcttatgactctaagatgtttctgtattcatagatctttgctgtgtttaaatcttactgacttctcttgtttttggaaagttatacagatcctcatctgtgttaatacatcagtcaactgtctcttttataaaatatatatagatatgtgtatatatgtggatgcttgttaagtcaagactaagaatatttttcagttttgggctcagtatgtttcaccaattcaaaagttaaaaaaaccaatttttttttttaattgagacagggtctctgtcgctcaggctggaatgcagtggcacgatctccgctcactgcaaattccgcctcccagtttcaggcaattctcctgcctcaacctcctgagtagctggggccacaggcacgcactaccacacctggcaaatttttgtatttttagtaaagatggggtttcaccatggtggccaggctgatctcaaactcctggcctcaagtgatctgcccacctcagcctcccaaagagctaggattacaggcaagagccatctcccccagccaaaacaatacattagtctatagtggtaaattaatactgaccatgaatgataaaaacccctcaatatctgaatcctttctgtttaatataattgagataatttcttcctctaagagaaataagaaaatttgcctgaaaatttacctcatatagccaaataactgaaatcagaacttttctcaccattatcatctttccttattctttccttcccctcccaaattctaaaaatgattgattataggtaaataaggaaatggtaaatgaggatatctgggcttgtgtttcatcctgatttcaaagtacataaagataaatgcaaagttcatttatgttgcaatctgtcatttcaggtatttgacctgtccaaagacgacttgatacctctataatgtaacagaaaaggtcagaaaatattaagcaagtagaagtgtggagcatattaagcaagatgaacatctcgggaagcagctgtggaagccctaactctgcagatacatctagtgactttaaggacctttggacaaaactaaaagaatgtcatgatagagaagtacaaggtaaaatcttttcttaaatacttacagcagtattttgttgagactgtagtggctttgtatacctttgtatgacagtcctgtttattatttctatttcagcttttaggttccgggggtacatgtgcagatttggtacatggatagattgcatgttgctggggtttggtgtgcaaatgatttcatcacccaggtagtgagcatggtaccccataggtagtttttcaatccccaccctcttcccacccccctgaccctccaccctcatgtaggtcccagtacctgttgttcccctctttgtgtccatgtgtactaaatgtgtagctcccacttataaatgagaacatgcagtatttctgttgtctgctcagggtaatggcttcatctgcatccatgttgctgcaaagaaaataattttgttcttttttatggcttcattgtattccatgatgtatatatacttttttttaattcagtccactgttgaattttgtacatttaatggccatctttaaattcaaagatatcttttttttttttttattttttttgagacagggtctcactgtgtcaccaggctggggtgtagtggtgtgatcacagctcactgcagcttcaacctcccattctcaagtgagcctccctcctgtagttgggaccataggcacacgctgccatgcctggctaattttttattttttgtagagtcagggtctcactatgttgcccaggctggtcttgaactcctggcctcaagtgatccttctgtctctgcctcccaaagtggtgggattacagacgtgagccactgcgcctggcccaaagatctcattatttatttatttatttatatattcatgtatttatttatttactaattaattttcagagaggttctcactccgttgcccaggctggagtgcagtggtatggtcacagctcactgcagctttaacctcccaggctcaggtgttcctcccaccttagcctcctgggtacctgggactacaggtgtgcaccaccacgcccagctaattttatgtattttttgtagagacagagttttgcctttttgcccaggctggtcttgaacttctgggctcaagcagtccactggcctcagcctcccaaagtgctaggattacaggtgtccgctgctgtgcccagctgatctttttttctttttctttttgagacagggtcttgctttgtcacccatgctggagtgcagtggtgcaaacatggctcactatagtgtcaaactctcgggcccaagtgattgtcccacctcatcctcccaagtagttgggactacaggcgcacgcaccatgcccagctagtttgtttttgtttttgttttttttaaacttatccttcaccttagaacacctagctagtttttgtattttttgtggagtcagggtttcgctatgttgcccaggctggtctcaaactcctgagttcaggtgatctcccgccttggcctcccaaacagctaggattacaggcgtgagctgcgcccagccagatctcatttttagaggacatttacaattgtagtttttgtgattcatttttatggtcaaattggtgctttttaaccacagaacatagtttgtatacaacttgctgttatttacttgtggtaatatgtatgagatagtggaaaacgtatacaatttgttgactgaagacctgcatttgaattctgatttcatttacccacttgctctgtgatcttagcctaattacctaacctctaaatttaattttcttctataaaattctttgcaggatatagacataaaaatactacataaagtcatttgacaaacccgtagcactgaaatacaaaagtgaatggccacttaccttcagacagcctgcagtcttagtagagtcgtgtaaacagataattacagtacagtgaaataacagttaaaaggtttttatgacgtgcaaggagttttagaggattaagcaattgtggttgagatgagtaaatattatttgtgttaaaagatacaccatatgaagctaagctcaaggttttaatattaaattttaatatactttaattctgtaactttccctatgtccctatgtatgagaaatgcttcatattacatttgtttcttgattacctattataagtttaatattgcagtgctttatagctgtatcattacactggagtactattaaaacataatcaacctgaatctaaagtgtagtatgtgagtctgtattagaactttcttatggtaggctgggcacggtggctcacgcctgtaatcccagtgctttgggaggccaaggtgggcggatcacctgaggtcaggagttcgagaccagcctgaccaacatagagaaaccctgtctctactaaaaatacaaaattagccgggtgtggtggtgcgcacctgtaatccccgctactcaggaaggctgaggcaggagaatcgcttgaacccaggagaatcgtttgaacccaggaggcggaggttgcagtgagctgagatcacgctattgcactccaccctgggcaacaagagcgaaactccgtctcaaaaaaaaaaagaactttcccatggtaagtttagtttcttgcaaaacttctggtgacacccttattaattaatgagttttgaaatatgaacaaccccaaaagtattctttcaagccccagtgttcatggagacacaaagaaatgttcaagaaatgttttttgggcacttactatgtgccagaccttgtgaataagaataaatcctatatagtgctagctttaagggaatttctagtctagaattttaatgcagtatactatgttattatctgaaaacatgaaggaagaactgagggtgtgtgtggttgcatggggaagtgggtttgtgcatggtttatgtcagaccaggcttgataattaagtctaattagccaggcaaggaagatggtggaaggggagggaattttctgagtagagagaatagcacatgcaaaagtttgcagataagagcttgattttattcaaggaactctggatagttaggtttagttctaagaggaaatggaatgggagattggagttttgggggaggtggataggatatgatgctagaaatgtacatagatccaaattatgtaaaatggtatgtgctatgctgaagagattgtcatcttgccttgactttaggacagatttctctatttctgcaaaaaatgttgggattttgggatttgggattttgataggtaatgcattgaatctgtagattgctttatatagtattgacatcttaacaatattgttttgtagtccatgaacacgggatacctttctattagtgtcttctatatttcttttttttttttttttttgagacagagtcttgctctgtagcccaggctggagtgcagtggcgcgatctcggctcactgcaagctccacctcctggattcatgccattctcctgcctcagcctcctgactagctgggactacaagcacccgccaccacgcccggctaattttttgtatttttagtagagacggggtttcactgtgttagccaggatggtgtcgatctcccgacctcgtgatccgcccgcctcagcctcccaaagtgctgggattacaggcgtgagccactgcgcccggtctatatttctttttaagattttttaatttttaattactaatttttagagatgaggtcttgcctcattgcccaggcttgagtgcagtggcacaatcatggttcgccgtagcctcaaattccagggtgcaggcaatccttccgcttccaccttcagagtagctaggactacaggcatgcaccaccgaacctggctaatttatttttttatagagacagggatctcattttgttgcccaggctagtctcaactcctgggctcaagcagtcctctgacctcattggcctccaaaagtgctaggattacaggtgtgagccaccacacctggtcattctataatttctttcagcaacattttctgattgtcattgtacaagttttttgtctccttggtgaaatgtattcttaagtattttattcttttgatgctactgtaaatagaattgtttttttaatttgcttttcagattgttcattgttagtgtatagaaatacaactggttttagtgagttgattttatattctgcaactttcttgaaactcttgatttctatttttgttttttatgttttgaaacagagtctcactctgtcacccaggctggagtgcagtggcatgatcgcagctcactgcaacctctgcctcccaggttgaagcagttctcctggctcagccccgcaagtagctgggactacaggcacgcaccaccactcctggctaatttttgtatttttagtagagatgaggtttcaccatgttggccaggctggtcttgaattgctgacctcaagcaagccgcccatctcggcctcccaaagtgctaggattacaggcaggagccactgtgcctggctatttataagctattaatttaatagaaataaaatatttgacagatttcttcttcctattctttggtgttacaggatcttcatgaaatccctattttacagtgaggaagcatcaagaaacaaatggtatactctttaataggaacaatatgccatatttatcaaattatagaatatataaagcttgcaaatattatgtagtagataattcctttaaagtgtactcctcatggttatgttctaatcacattcccacaaaagtttctatactctgaataactttaagggaggaatacagtaattgttggtgtatatgataaggtccatgtgttttatgaatattaggtattggatatatgagctcataagagaagataatctttggtacgttatattgatcatgccactttcccaatttcaaataacttatggattcttaaaggtattaaatgaataagtactattttttaagtagatatgtcattttaaaacattttggtttgggccatgccttcgtcaatatgttccacatagttccatataaaattagagtctctatatgataacatcaaagacatgcctgaagggaacttaatttttttaaggaggtggggaatccatttgtagaaaccagtgtaagaagctgtttgaaagacatcaaacatggacttgtctggactttgcaggttttaaggtatatataggaatcaaaattgactcatgacttttaaagcttcatgtcagtaaaaaataaaagagaaatgttgggaatggtaatatttgagatatatagtttttacttagctacagaaatgtacccataggaacttgcttgaatctgaatgctctgctacacgtgtttagaattatttttgcctcttttgccaaaacataataaaatgatagcaaaatatgacagtatgtgcactgatcacaacaatataataaactgcatccatgtcttttaaaactaggcaagaatagacaaaatgctctaatttctgttggagactagcaatatgcaaaccagaccatttttgttgaaaaattctggagacatttatgaccgagtttttatatcctttaagataattttatcctttcatgattgtatcatttcatgatatgttccttttgtgacaaatgctgctagtatcagtgtcacagattgttactgatgatatacagtgtttatgctttaaattccgaactcacagaatttaatggaaacttcagaattctttaaatttcaaaagttttaaagcatatttatttgggtacaaaattttattgcctttaaaaatctttttcagtatcaagtttattatcaaaagcacaaataataaaatagaatttaaaatatttattttcagaataccactattttaataaatgatcttttgcctatgccagcgtctgctattaacatctagctaatatattttctgtgtctagtaaatatggtaatcagtttcaaagaaaactaggtaggttttgtgaggcaaagttgaaacaccttgaagaaatgggaaagtttgggggctctaataggacaggataaatatttcttgattcattttttaattgctccatttattttctatacatagaatcaaaaattctaaaaagagaacattatcttaagactgcacaaattaacagtgaaaggaattgtcccactcattattaagaatgctgtcaggctgggcacagtggcacacacttgggaggccaaggcaggaggattacttgagtccgggagtctgagaccagcctggacaacaaagcgagaccctgtctctacaaaaaacatttttttaattagctaggcatggtggtgtgtgcctgtggtcccagctacttgagaggttgaggcaggaggatcgcttgggcctggtaagtcaaggctacagtgagccgtgattgcaccactgcaccccagcctgggtgacagaaatcctgtctcaaaaataataataatattattattattatcagtaactctcacaccttttattttttatttgcattcacatctgtaaataataaaatccacaaaaattaatttacccattttgagataattcaatcttaagcaaagtgagcacagcttaagtatggctttggaatttaaataatttgttaggcaattatagaaatgctagcagtagtagttttggttgaagtttaattacttcatttgtatataaagcccccactgtttgtcaagaaagtgatgttaggggtattatttataattcagaaccataaataacttgtttaaaatgacagtacatacattttatatatatatatggtttggtctgggtaaagaactaaaataagaacatagcagtgatttttgttaatgcataaggaattcttgcctcatttctgaactcttaaatttgctttgtgtattacaatatacaggcccttgattgtttcatttcctccaaaatttatgtatgagtgtgtgtaaggttaattgtagcacagtgcttggtcttgtgaacactgtttcctcaataggtatcttaggttgccagtgttacaatcccagatactttgttcaacagattacctgttcatacaggagctacattgttgtatagcctcattccttccgatgggtgtggagcaggattaaagcacactttataggggttctaattgtagattcctaattgacttggtgaatagcaaatgctaaaatttaaacacacacacatatacacatataaacctgtttcagggtgatctacgtgacagaacaaatgcctcacaggtgttgaatgcttaccagataaaagagtagttcttcccctgtttcccaaggattttcttttgaagtttatatggattttctgtctcattgtttcttttcttaaaatggtttgtggcaagaatccatttcatctttggctgcacttttcacttttaaaggcagaactgattgttagaagtcagccaaaattaaaaacaaaaaaaaaatctgtcaagtaaaatttcgcacatttttgagaagggaaaacatgtgcatggatgcaccacaggttttggttttttaaacaactcacttattgaaggatgtttgggttgtttctaatgtttggctaagactgctgtgaacattcaatacaggtttatctgtaacatttttttcaccatcttatttataacattttatttattcaaattatagagcatagaatcgaagataaaatgtgtcatatcagttggacattttctaaaggtgaaatttgagacataaggaaaaaatgtaacatccaaaaaattctccagggcctttatttttccacagtatatggatttcctggcaataaatcattactatggagggcaataagaagagatgacttcttctttagtgtctatgtgaccatggttgggaaatgtataggtttgtttttaaaatttgtatttgtctaaattatgttgtccaaaagattgtatcaagtttaacaaataaagaaaaattatgttcttaggaatgataaatatattaatgtttctatacacatatatgaaaaacttttctgatttataacttgatagaatctgtgaactaccaaaggcatatagtaaatattcttgggttcttcggaaatcagtcaactagtaattatttattggtaactaactgccaccaaataaaaattcttgagtagatctataattgggtaaattgtagaatagtaaaagcactgattgagaaattaaagagtaaatattgagggcttttttcccctttatgttaatcacattgcagaaaatggggagcatagagaaaatagagggcacagcaatattcaacagaaaaaattttctagttttttactattttaatatttgattaaataacttcattttattttattttgttttgttttattttattttattttattttttcagacggagtttcgctcttgttgcccacgctggagtgcaatggcgggatctcagctcaccgcagcctctgcctcccgggttcaagcgattctccccagcctcccgagtagctagggttacaagcatgtgccaccacacccggctaattttgtctttttattagagacggggtttctccacgttgatcgggctggtctcggaactcttgacctcgggtgatctgcccaccttggcctcccaaggtgctggtattacaggcatgaatcaccgtgcccagccgattaaataacatttttaaatcaatattgggttttataatttttacaattttgctagttgttttggtttgacttatatttagttgctgatgatgtatgtattttcatatttgttcagtgacttttttcttttgttaattactgttcatgaaaattagaaatgtcaccctgttttgtccatatccttccttgcagtttcaatgcctgtcagtctgctttcttctcagtaattacctgagtccataggcagtggtcttctcttatgttttgtatcagacttaattaaaattaaaaattcatgtaatagatatcttgagataaaacattcatgccttttgttaggtacttttccataaggaattttgctactagtccaggacttcctaccacagtctagtttaatcccagaagatttgtgcctacataaacaccattgctgttagcaaatacacaggctatgtcagaacatagaccttcatttacagtgaacttctaattatatgcttgccctgctattagaaaagtaataacttactttagatggggaaaatgttattccatttgactgtcatatgatagactaaaagcaatacattgcagatatgcttttgtgactgcagagtacacgtaaggggcatatactgtaaactaatgagacctggtttattatttagaggccagactgatgtgacttaatagtggagcatttgactcataaaggaactgttgtagaagtaataccttttctttttacttttcaggtttacaagtaaaagtaaccaagctaaaacaggaacgaatcttgtaagtatcagtatgtaatactcatgtgttatttatagagtagttgatactgatgtccaatttgacattcatagagtagttgatactgatgtccaatttgaccttaatgtcttatttataaaaaaaattagccctacttagtatgggccttggtagtcagcagcagttttttttttcaaattctaaagtaaaaagaataattttgcaattttaagtgtagccttaattatgtatgtttatattgtaatacaacttacatatgtaatcttttcccataaagtattaaaatgacaattgatctgtagtctcattttgatttgtcagcggagttctttgttgagccataattaacacatggaattcaacatgctacaagacgaggagcagaataattctgggatttctaaactcatatgaatggaaactaaatgggtattttaagactccttttaggtagtttgaaattacttgaagattctctgaattgttttgcttataaagttctaaatcagatctgattttttaagttcgggaacatattttactcatgattctctagagcttccacattcaggaatctgaaacagatggcagagtagctttgtaacacttactaagaaaattctctttagctgctgagaaatttagaaattctggaatatagactattcaccttcagataaactcttgttttcttttaaaattattttaattaagaaatttaaagaattgtaaagacaaaaaaaattttccagttgtgcagcactgttttcatgcttttgattccttatcacaaagtttctttgtagagggtataactcgaacataatgttttgtccattttattcatagtagttcctatccctccctatagatccccccaccccagcccccatatatgacatttgatttaaaagtaatgaaaaaattgttgaatgtgctgcataggtatgtaaaagagacaggaaggtttgttatctattttattacagttacattttcaaatacaagatttacccagcttcttatgccagttgtatttaaaatgttcagttaccttagaaagacagaaggccaccaattaggaaaatgatactgagtttttagtaaaatgctgctaatggcattgagcttgctttagaaatgaagttagtgattggtgtagtaataactcttcctttggatgaggtccagggtagacctgtctttaatatattagacacttccctgtttttgaaattgcatgactctttttgcactgtctggaattcatcaatttgcttttttaaagaccttgttaaattatttctgcaattagtaaatgctctttatgttaccactttcttgacctgaatattttattaagtaattgaagttagttttaacttcaacttaggttattcatctacataatagtttagctttaagacaaatactgtcatgctctgcgttattctaaatagaacagtaatggaatatatgaatatgggaaaatcagataactcactactattacagagttctgttcatcatttaagaaaaaaccctttgctattaacttttcactccttaagagtgaaaatgtatatgtgtgtaaatcttcaatgtgtgtgtaaatcttcaatttaatatttactgtattttatgatacagattatttaaggcaaatgtgtgtaaattttcaatgtaatatttactgtattttatgatacagattaagttaaatattaaatttgaatacatgttggcagtctgttttaggacatgattaatcacacctccaggcttagacaagttatctggttgtatttgctgaataggatcagtgaaaacctggtgttccttctgaattaaatatattttctagaagtagtaggaaatattttatttatttatttatttatttatttttgttaaatgagaaatggccaggttaacaagcttcaatgatatattactttctgttattttcaagttctcagatgtccctacatgctaccataactatatttgttgtatagccagaaggtgttgctcttacgtgtattggtttttcaattaatataaacttttcaacaaatatttaagaaattccctctatatttgatacctgacattttggcttagttgttttactcatctattttggtgccagtgacactatattctagccactttgacacaatcattttgacatctactttttatgacagactgatttgccactcttaattgatttgatattttagacccttcaagggactgggagaaggtgtttgaatcatagtattacattttcagcttcaagactatacagaaaatcctaatcaaatttctaatgggttttcttagaattaaaatatgtgaatactttatataataaggtgatttttaaaaataatgatagaggggtaaaatatgacaactttggaaggtaatcaggtttaagtagaagaagattctggttgtctttgttagttttttttctcactataaagtcataatggtaaacacttaacataaagcctactgtgtgccacactgttccgtatccaatacatacattaatacttatttctcagaccttttggagtagatattaatgtatctacacttggtgaggcacagagagtttaggttaattgtatcaggtcacacagctggtaaatgaagagctggactcaaacccattttgcatctgggcgtagggttcccgttcgtccacttcactgtaagctctgacttaaaagcaagaccaggtaaaaattttaaacaacacagaaattagtaaaatagaaagtatgagttccccataattgaagagatgatgtgagtagagaaatactatttacattaataaatatatgcaaaataataaaataatgtacattttgatagctattttgacaaagttgagtcaatagtggcatgatgactttatggtatataagagctctgcagagaaaattctggtataatttgaactgtgatttacaagatattccaacctgaccttttcagttgttttgttttggtacaagaaatttgttatataaacacggtggagctcttagaattatcctgttaagagtatttttatctgaaaaacttatttattttttgacctttagagatgcacaaagactagaagaattcttcaccaaaaatcaacagctgagggaacagcagaaagtccttcatgaaaccattaaagttttagaagatcggtgagtctggcacttaggtcttgagtaagaagtgatttcctccataataagaagtacattgactttcatttgtaattagttttgggattgaaagtgatctttcccacagccttctctcacctttgaatgaatactttatgaaaacaaggatctattctttaagattttcattaattctgagatcacatcagtttaccctttaaatgatatctttatctggtgtttgatgtagtggaagctcaagggtagcaatgttctaattcatttaatgctttaattccagttttacttctaagtaggtggaaactgcttcacaattctgtttctgtcgtcttttcttgttcttgctgttctcttttcttctttgcagatttcctcactttgagggagtctagggatcttctttctgagtattcctgaaataatattatcacttacttccatacacagacttctttctttcccactcctatgaggttaacactgaggattagaaaaggcttccagcatttgctgttttcccttttctgaattgtaagtgctatttaggacctataaactacctacctgctatagtaaacaatattccagccaagcgtggtggctcacacctgtaatctcaatactttgggaggctaaggtgggaggatcgcctgaggccagacattcaagaccagcctggacaaacaaagcgagaccctgtctctacaaaaaattttaaaagctgagcatgatggcctgaacctgtagtttcagctactctagaggatcgcttgagtccaaagtgattgaggctgcagtgagctatgatcgcactgctgcgctccagcctgggtgacagagcaagaccgtgtctccaaaaaaaaaaaaaaaatacaaacccacgatatcccatactttctttatagtttttatttttccagggtaggcatagtggctcatgcctgtaacctcagttctttgggaagccaaggcaagaagatgattgcttgagtccagtagttcaaaaccagcgtcgcagtatagcaagaactcatctctacaaaaaattaaaaattagccaggcatgtgactggagtcctagctactcaggacactgagacgggaggattgcttgagtccaggagtttgagcaagctatgattgtgccattgcactccagcctgtgtaacagaacaagaccctgtctcttaaaaaaatttttttcttgatatttttgtatatgttacggaagggctgggtgatttgagtttgtctctatccttttagtggtgaaataatttaatattcttcatatgtgcaaactgaaattgagtactttctacaactaccaactcaatggatgcacatttgttggaataggcagtgtattgtggaataaagacctgtgcgctttagaatcacatatgtttttgaattccagcttcaccctgtgttcttaattcagattccacaacaaatatttgagtccttgctgtcttaggtgttgctctagggggctagggatgatacttttcctagtatgtcatggattaaatgagacagtgcaagtaacaatacataacagaagttgaataagacttacatatcttagttggtgaatataatttagcactcctgtctgtgcatatatttaattttcaaaggttgggagtgagccatacgacaaacaaatgagacaatttcagattataaatgctatgaagaaaataaaatcgaattatgtaattgagtaaccacaggatctgtgtagaaaaaaaaaccaaacgcagcttttcccactgtactcgtacaacatgcttcagacaccagatgtgaggaggagtttcccctaccaacaagcaaacaattaattctacagcagacactagctgggtatcctcttaattcaattcctacactggatatggcatcaggtcccacaggttgagggctttgtccccatgactgtgtccttccctcaattctgatgccaatttcaagccccaggttgtttacccatgctttggacagactctaaattggggttcccacaaccccctcctcgggttatatttactagagtgactcacgaaactcaggaaaacatttatatttatcagtttattacaaaaaatttgttaaaggttacaagtcaacagccaaatgaagagatacatggggtgaggtctagaaggatcctaaacacaggagcttctgtcaccatggagttggggtgctgtcttaactgagacttgattgacagaaaggaaccatccacttgaagaactagagacaaaaggaaatagaacagacaaatgtgaaagtctagggtagaaataagtttgaaatatttgaggaacagaaagtctactgtggttctagtttaatgagtaaaggggatgagtgataggagtgagattggaaatctagtggggcaacaactagatttcgtagggacataggcaaaaagtttggattttaattgtgatggaaaccacttaagcaggagaataacaaagggatataagtaggtagcaacagcctgtctatccaaatggaaatgtcaagtagatagatgtatatgtgaatctaggattcagtggatctcttaaggacatctttgaatagtataggaagaaagaagaggtcttagggctgaatcctttggcattcctgattaaggtttcatgaagaataaggacccagccagcaaaagattgagaaagagaaactattaaaatagaagaaaagccaggaacataggtcttgaccactaacaataccttctttgcagggctattttgaagtttaaatgagataatggaagcagcagtacataacagatatttaataagacatatactatctcctaattggaagatgattccaacttttagcactctaatctgtgttatataacacagccatgtctaggctgtctagctgagaagccaggaaactagaaagccatctctcccactcaccctttcccaggtcagcaatggaaaggaaatcattagttactcatctgtagtgtggtgaggcgcttccttctgttttctctggatatgtagtagaggatttcagggaacatatctctctcagcctttaactccagccattgaagagcttccttctcttatttcaccacgttttttctctcatttctaccattacaccactttctacaagcagtgaggttggagtgagtaatggcattaacgccaagagattaggaatgctttttgttccatcattcctatgtaaagaaaatttcaagattggtattaataacgaaatatgttagcctgagttctctgagaagcaaacatcaataagactttggacactgaagagatttattgggaaaaatacctgtaagaaatgaggcgtctgggagagctgtcagaccctcatgcctctaactctgtgaagaagagagggaagaggatactgtacttgtaagagagctttgacaaagctaacagggagtcctggagccatagttgccctgctttcctcatttatagcaggatctgactatgggatgcctggtgtattcacctatgtggaaacaggtgaaggatttcacagcacagaaggtggagccagggattttattctcctactgtggtaggagacagtaagatgactggccaacttatattgacttccagtactcttcctgtttagttgttccttagcaagttgttagagcccaaaattattacactcaaatttactggataacattttcattatgtttttcttgaaacattggcttaatacaattggctctccatttcatccccaagatagtattcttcatcctgccccttgaagacattgctttccagtgtcttcaaaacactcttcattttatggcttaaagtttgagcttcctgttctggtaacctttgcagtcttgtacttcctttttaagtagtttttcttctccaggccgtttcagagaagaaatcagtggatgagtgcctcatctccttcccattaaattactttcttttatgtagtctatatattttttttttatttttatttttccctgtattagtccattttcacgctgatttaaaggactgcctgagattgggtagtttataaagaaaggtggtttagttgactcacagttctgcagagctggggaggcctcaggaaacttacaatcatggcagaaagggaagcaaacacatcctttttcacatgatggcaggaagaagtgccaagcaaaagggggataagccccttataaaaccatcagatctcatgagaactcactcactatccacaagaacagaagcatgggggtaaccacccccatgattcaattacttcccacagttgggactgtgggaactacaattcaagttgagatttgggtggggacacagccaaatcatatcattccactccttgccccttccaaatctcatgtcctcgcatttcaagacaatcattgccttccccacagtcgcctagaatcttaactcattacagcattaacccaaaagtccaagtccaaagtctcatctgagacaaggcaagttccttccgcctgtgagcctgtaaaatcaaaagcaagttagttacctcgtagatacagtggggatacaggcattgggtaaatacacccattccaaatgggagaaattggccaaaacaaaggggctgcaggccccatgcaaatccaaaatccagcagggcagtcaaattttaaaactccaaaatgatcccctttgactccatgtctcacatccaggtcatgctgatacaagaggtgggttcccacagtcttgggcagctctgcccctgtgattttgcagggtacagccccattcccagcttccttcacaggctggcattgagtgtttgcggcttttccaggtgcacagtgcaagctgttggtggatctgggtgtttctggggtctggaggatgatggccgtcttattacagctccactagacagtgtcccagtggggactgtgtggaggctccaacccaacatttccctcccacacagttccacatggttggggaggcctcagaaaacttacaatcatggcgaagggggagtaaacacgtccttcttcacatgatggcaggaggaagtgccaagcaaaagggggaaaagccccttatgaaaccatcagatctcgttagaactcactatcaagagaacagcagcatagcgttaactgcccccatgattcagttacctcctaccagatccctccctcctgatttcaagcagttctcccacctcatcctcccaaagcgctggtattgtaggcataagccactgtgcgcagccagttgatacatttaattgttaaaattatgtgttttattctgcatttcttaaaactaggttcttttctctttaagatctattctacctctggtggatgccatgctgctttggtatttctcattctaaatattcccttgcctttcattccattcacctttacatcctcaggtacatgggcctgtaattcattaggtggtattaatttggtggcagggagtcggggtgggatgagggatatgtagctcgttgttttgtagacttgcttttgctcacctttcttcaaatgcaaatccaaaatttcctgtgggcacacttaaagatttatctcttgtttcatgaagctccatttaattaagctgaagatctgtttttttaaatacagtagttagtatgtattgaggattcactttgtacttaggcatccagcgctaaatctttctattaacgctacaggatagatgatagatccattttgcatgtgaggaaactagctggcaaagagcaaagaagctttcccaggatcacatagttaatacataattaggtttatatcttttttttttttttttgagacagagtcttgctctgtcacccaggctggagtgcagtggcgcgatctctgctcactgcaagctccgcctgccaggttcacgccattctcctgcctcagcctcccgagtggctgggactacaggcgcccactgcctcgcccggctaatttttttttgtatttttagtagagacgggttttcactgtgttcgccaggatggcctcgatctcctgacctcgtgatctgcccacctgggcctcccaaagtgctgggattacaggtgtgagccaccgcgcctggccaggtttatatcttaaatctgatccccgcttccatttttactatttcatgatgcctcccctttatattgtcttaactttattaatgttatataaattaattacatcttaaatgatcatctcaaagtatttgtgcttgatctaaagtttaccaaaacagacactctgaaatatcaggtcttcaacattgcctattgtatagtctgtttccttggaaggtttttttttcgtttttgtttttttaattgttgctaactaaatactacctttaaaggactaagtaggtaacttttggtgaatttctgctttatttaaaattttcttttagttctatgtcatatgtaagaatgattatctagagtaagctttaaaaatctgtacaaactaacattttgctgagacctttaaaagcaacatgtattttgttaatttttttttcttttgtttggtctttttgttttgttttgttttgtttagagacagggtcttactctgttgcccaggctggagtgtaatggcaccatcatagctcattacagcctcaaattccttggctcaagagatcttctcacatcagcccccccaggtagctaggactacaggcaagcaccacgccatgcctggctaatttttttgtttttatagagactgtcttgctgcgttgatcataggctggtcttgaactcctggcctcaagtgatcctcctgccttggccttccacggtattgggattacaggcatcagccactgtgttcagcctattttgttaaaatttctgaacagtaattcagcctactcttcataaaacaaagcaattcttagtatgttaatgggaaaacactgagatatttcaatgaagggaattacctagtaaaagtaaattagataataaaaagttctaagttctaattttatgtggctcatttatgtttaatgattattatgttttatattatgtttaataattattattatgtttaatgagtatatttacagactttccttccaggaactaaagtatttcactaaatctaagaaacagtcactgtgctggagaagtagatagaacgcattttttttgaaaatctgaacaaagaagttaaaacacagttgtctaatagagtttaatattttttaaagcattttggcagtcagtgagctcattttcagatgctgttaaaaggaaaattgatacttataatcaggagatgtatggttctgcaactatttttcaaacactgaagcaagtgtccgcttttgtgttgctgttattcatagatttgaatttaaacatcatattattcaggagactttctctaacttgctagactaggttaagttgctgtgtgctttcatagtactctgtatttctgctgtcacagtatgaattatactttgttgtaattactttttcttttttttttttttttttttgcctgtctttctctggtagactataagctttttaaagaaatggcattaccttcatctctgttgtatttacagcactgagcacattgtaagtaaacagtgaaaccatattgaatgaaaatgaataaatgtcaataaatctttttgggctatagcaaacaattgagcataattgttactctgataagttttagtagcaaatggaagcttttatttcttcatctttgtgaactggaataaactcagaatgcatgttgctttctgccttttgtggaattgcccttttttccctttacctgttacatagctactgaaactgcattctcttgtgaaattgggagtgttttttctttagcagcagcagtggaagataggcaagaggaaagcaatggaaccatgctgatggaaacaggagctagcacattttcttgcttctatttaaatttaaactaggatcagcaatcaaaaattgaccctttttcacagatactattatcaagaatggtaggtgataagaaaaactgaaagtaataagctagggaatattgcttcattttgtttcattttgtaaccatctagccagtgatattttaaaaatccctctcctgtatttgaaaagttattgttttagctcttctattttacctttcaaccttaatatatatatttaggtctttgttttatattgcttcacctgtgaacagtttccctgttcttaccattatgttacaggaagatactggtgtttcttaccctttcctctatcacttttccgctctttctaccatctgcctttgatgagctgaacctttacgatataaatatggtcaaggttgacaatagttatcttcttttctattaccagatttcagtcttttttgtattttgtttataagctgattctagaagttggaaaatagtaaactgagtttatttattgactgtataaatattcactgcagagctaggattgcatttctttacgtatctgatgtcatggcctttctgccactgagggaaattgtttctaatgtccagatgaaatacattgttttttactttgtccccaatcagttgttcaaatcagctcataattatgttatgataatgacttatttaaatgtttttttctagaatttctcactaccctttttcatgttgagacaagaaccatgtttccttacatcattaatattatttaatgccttagttattctactcattcattaatttttttttgttgtaggttttgtttgtttgttttgaggcagggtctcgctctgctggagtgcagtggcgcgaccttggctcacttcagcatctacctcccaggcccaagtgatcctcacacctcagccttagagtagctgggactacacataacactacacctgactaattttctgatttttttatagagacaaggtcctcctatgttgcccaggcttgtcttgaactcctaggctcagaccatcctcccacctcagcctcccagagtactgagattataggcatgagccactgtgctcagccagttctttttcttgaagaaatatttcttgggctaaaaaacttcttgtactaatttaggtcattcactttctagactattctagaaagctgtcattctggatttctcttcattagatccctgcattaattcagttatttcatttctctcatgttaaacagtcaacaaatacttaatgaaccacctgttttgttccaggcactgttttagaccttggggatacaccagtgaatgtgatcgataaatgtgggcctttctattggttttttaagctcattttgttacagcttaccctcaagtaactgctgaaaaagaaggcacaggaactaaattttcaaagggtccttgcattctcgaaaatatttttattctactgtttattatatagttgatattttgactggatataaatttctaggtttaaaatagttttccctgaaaactttgaaggcatttctcattgttagcattccagtactgatacagtctgccattctcgtgttaattcttttgtaggtaacagattttcttttcctttctgaaatttttccttgttctgatcaaccttcgtgatgctctgtgtgtgtgtgtttccttcattgcactggacactcaacctgttaacctaaaaactagcactcaaagtctggtaatttttttctgccactttctctattttttaatggtctctctttctggagcacttcttagtcagagactgattttttatcatcttttctcttattttctattacttgtttttcttccatgttctgtgagatttcttttattctccaaccctactattgaagttattttgacaatcacgtacgtaatatccaagaactttttattatttgttgattgttgctgtatatttatatgtgtgtgtgtgtttgtgtgtgtgtgtgtgtatactcttgttttatggctgtatcatttcccagatttttccaggaatgctagatagcttttgcttttccccctcaaggtctttttgtgtggtaaaaatctatataagatgaactttctttttttttttttttttttttggtggtggttgttgttttgagacagagtctcgctctgtcacacacgctggagtacagtggtgcaatctcagctcactgcaagctccgcctcccaggttcacaccattctcctgcctcagcctcccgagtagctgggactacaggcacccgccaccacgcccaactaacttttttatattttttcgtagagacggggttttaccgtgttagccaggatggtctcaacctcctgaccttgtgatccgcccacctcggcctcccaaagtgctgggattacaggcatgagccaccacacctggccgaactttactattttttaaaaaacaactttattgagataaaattctcataacatacagtttaccaacttaaagtgtacagaggctggtgcattggctcacacctgtattcccagcatgggaggccaagtaggcagatcgctttagcccaaaagtttgagaccagccggggcaacgtggcaaaaccctgtctctaaaagtacaaaattacccagcatggtggtgagtgcctgtagtcccagctactcaggctgctgaggtgggaggatcacttgagcccaggaagtcaaggcagcagtgagcagtgatcatgccactgcactccagcctgggcgaaagagcaagaccctgtctcaacaaaaaagacaaatgattatcaatgcttatattacagtctccctttataaaaaaaaagtttttttcttctgacagtctcgttcagtcatccaagctggggcgcagtagtgcaataatagctcactgcagattctcctgcctcagcctcccaaagtgctaagattataggagtgagccactgtgcctggcctataaaaattttttataatgtaatttttagtatcctgaaatgaaatttaaataatataacctacctacatacataattattttttaaatatcacaactatatagagaaaattgatttgtagtatatcagaaagtaaatattacgggtatgtctgttctaaaagatgagttgttgagatactcgttcctttgtataaaatgatcattaatgtgactgatacaagtatgtttattgatgattcaagtaacactaactgcatttttcgtcagtgacatgatttttcaaaattgtaaagattattggtaaataggaacagttccaacagacctaatcatttttgtttgtttaattaaagttgtactagctcctagtttaacttgtaaaaagcattatatgtatgtgaccagtaatcagcaagaaataaggaaaagcgaatgacaaaaaagaaaaacttgcatgtgtagctgggagatcagcatcaatatcagatgcctgttagccttgtttaacccttctcttagctgtgagtttaagccagacttaaaagccaagcatgagtggaagagctgggggcccagctatacaggtaggaaagctaagcatgtaatgagtgctgatgatgaaacttattgcaagccatggatggctccataggttcaaggcataccatacttcttacaccccagagtgagtggtagggcaagtgtgtatattttaagtactcaggcattagattttcactgttaacaaaatggctcaatataaggataagacatgaaaagaacataggtaggagaagatgagagtgccttattctaaagcaagcttgtctaacccacgacctgcgggctgcatgtggcccaggacagctttgaatgcagcccaacacaaatttgtaaactttcttaaaacattatgaaatttgtttgacttttattttttaagctcatcagctatcattagtgttagtgtatgtgggcccaagacagttcttccagggaagccaaaagattggacaccccgttctaaagctttaaggatcaatctgtgaagagaagcttctgagcagattcccgggccccgtccctgcagattctaattcagttgatcatgggtagacttacaaatctttttcctctctttctccctccctcccttttaaatctgcttaggtggttttgagaaatagccaggtttagggaccactgatctaactatctattcaacatgtgtttaaaattaccttcctaatttctgagtgatcgtcttttctgtgcttaaacatgtccagtgacaaatgaaatcactcccttcttaggtaacacattccatccttaaatactgtaattggaaagttttctttatactaggtttatatctgtagaattgctgcccattggtcctagttttagtcctttagatcataaatctctttcacatgattaacttttcagatatttagacagctgtcagccctcagtacccttctgacttttttttttctcctgctgattttcctctttgctttactctactgaagttatactggcctccttgacatttctttaatagtccaggcacttttcaactgtaggaattttgtactctatcctcattcacctgtaacagtctcttgcaggtattcttaaaactcactccctctcatcatttacatctcctcgcaaatgttaacttcacagtgaagtttttcttcaatagcctatttaaaattgcaccaagttccccaacctaactggatcttctatctccctctgtgatttgtttcctcccaaagcacgtatcaccttgtttttttttcctttttctttttttgagacagagtctcactcactctgtcgcccaagctggagtgcagtggcataatcttggctcactgcaacctccacctctcgggttcaagtgatccccccgagctcacacacatacacaccccctcctctccaccccccctacctcaacctccctagtagctgggactacaggtgtgtgccaccatgtccagctaatttttctgatatttttcgtacggacagggtttcaccatgttggccaggctggtctcgaactcctggcctcaagtgatccacgtgcctcagcctcccaaagtactggagttacaggcatgagccaccgcacccagccccaaagtacataccaccttctaatacgctatacaacttactttactttcccttttttttgtctattttttattgtgtctcttctaccagattccaagtcaaacaattgtactgatctttctcatctttataatttcagccaaaagaacagacatttattcagagtaggagatcaacaaacataattaagttctccttctttccaatttccccttcttcagaagcagtcattttcaattcttcatattgttttgctgtttacttcaaaaatctctttttaaaaatgtttatgagctatctataaatttttcttgacttaggtgtttttttttcttttttctgctttctacatagacgccattcccatttccctcttcctcctatgtagtgtataataattttggttagatcactattgagtttttattttatgattatgtaaatgcagttcaaagctgaaacatattgtaaactgtaatttttcttcctatgcaaatttctgttgtccatagtgtttatgatggacctttttttcatatgcttagtgttcttaccaaccactagttcaaccacaacgttctatcatttatctaaatgtatcaaggtgtttagatgggttgtatcttctgtcatttcaccttttcaaacagatctgtctcagaggctctgatctgcttcaatttggactctgtcctctttacctgctacgtagtggtcatcagaggttccttttactgctttcctttttcatatatctaggacttcttttctattttttcttattttggtagaatgcctcctccagtagatttctgagacggagtgtatgagacctaaaaaaagtttattttagaaaatcacacatatataaaagtagacatagtagtataaccaattccgttgtacccatcacttggtttcagcagttaattgtggccattcttgtttcactttatttcgattagtccctctcactaccattttgagaccttgtctcaaaaaaagagtaccattgtcatgcttaaaaaaaattaatgataggaagcaaaatttttgagatttttacatgtctgaaaatttttgttgaaataatagttggagaatataggtttaggttggaaataattctctttcagaattccaagtcacttcttttagcttctaatgttgctgttgaaatcccacactattctgagttttcttttttcccccacaatccccaccaaaacagtgctgttagtctttgtttgtttttgagatgggatctcatgttgaccaggcttgtctagaactcctggcctcaagcgatcctcccatctctattctgattttttatcttttctgtgtactctttaaaaagaaaaaaatttcttctgaacgcttatgggctcttatctttgcagcatccagaaattccataatgatgagttcttttgtatagatctgttaacatccattgtgctggagacttaggttttttttttttttttcttttcagtcctttaagtagtgggccatgttcttgattttcttcactattccccacactgcctcaaatcccctcctgcgtttccttgcttttcctggaactcctattctttatatgatagaccttctagaataattgcccagttttatctaaattttctctttactttttgagtagattttcttagctttactttcttaccttctatttgtagttctttcttaatatttttaatttttaatttttattttattttattttattttattttggtttttgtttaaatagtgacaggatctgactatgttgcctgtgctggtcttcatctggcctcaagcaattaattcttttttgcttcagcccccaaaaatgctgggattacaggcatgggctgccacacctggatactatttttaatttctaaagtctcttttttgttctcagaatatttccttttatggcaatcccattctcattttatagttttcacatcatttcttacctctagaatatagtatgtcctcacttaacattgtagataggttcttggaaactatgactttaaaagaaatgacctacagcagccttcaaataacatcctttcctttgacatcatttctttttaacagtgagggggaaaaattagcttgcttatacatcatttgacttaaagtcacagtttccaagaacctatcaatgatgttaagtgaaggcttactgtattcttcataatttgatgattgtgactgtgatagcattggcattttttctttttctttctgtatagcttattatttcttccagattttttatttctttttttaatgttttgtttgctatggtttcttataatttataagcatttctcagatgccttttgatacttggttatttgttatatttaagagatgagaataaagtaattggaagctctgagtgcatgggtagagctgtagactgtgagcttctctgttagaatgatctggctggtctgtttcctcgaagatgccctaatgtcagtacctttaggtctttcctgtcaggttggtcagatttcctaaagaagactccttaattctattttctagaatgtgtaatagggctgactcccagtgttcttggagccaagtagatgacgagggcctaggctggaatctgagaatttggtgtgtatatatattcatttcattattgtactcctactcctaactgagcctcatggctcccagaccagacactctctgttttagattgtctaagcattaaacctccagtctgctgctgggatgtcaaaggggtaatcacttgactgctcagaatataggagagaatgttcgtataataatttcttaaaacgtgcttttaatcagtcactcccagaaccaattgttgagccttttgggaattttacagtgtgaatcaggttggttctaggtcagtactgtctaatagcattttctgtgatcgtggaaattgttctaaatctgcactgttcaatatggtagcaagtagacatgtggctgctgagcacttgtctgcaactgagaagctcagtttttatttttattttatttatttaaattgaaatagccacatgtgtctgtgtctaccatcctggacaatgcaattctcagcttttcctatcattggcttatgatttagcattctcaggtcactttctatttgcc

SEQ ID NO: 217 - DNA, 32744 bp, Homo sapiens
  source 1..32744: mol_type = other DNA
cccccgccgcccccgggccctgatggactgaatgaaggctgcctacaccgcctatcgatgcctcaccaaagacctagaaggctgcgccatgaacccggagctgacaatggaaagtctgggcactttgcacgggccggccggcggcggcagtggcgggggcggcggcgggggcggcgggggcggcggcgggggcccgggccatgagcaggagctgctggccagccccagcccccaccacgcgggccgcggcgccgctggctcgctgcggggccctccgccgcctccaaccgcgcaccaggagctgggcacggcggcagcggcggcagcggcggcgtcgcgctcggccatggtcaccagcatggcctcgatcctggacggcggcgactaccggcccgagctctccatcccgctgcaccacgccatgagcatgtcctgcgactcgtctccgcctggcatgggcatgagcaacacctacaccacgctgacaccgctccagccgctgccacccatctccaccgtgtctgacaagttccaccaccctcacccgcaccaccatccgcaccaccaccaccaccaccaccaccagcgcctgtccggcaacgtcagcggcagcttcaccctcatgcgcgacgagcgcgggctcccggccatgaacaacctctacagtccctacaaggagatgcccggcatgagccagagcctgtccccgctggccgccacgccgctgggcaacgggctaggcggcctccacaacgcgcagcagagtctgcccaactacggtccgccgggccacgacaaaatgctcagccccaacttcgacgcgcaccacactgccatgctgacccgcggtgagcaacacctgtcccgcggcctgggcaccccacctgcggccatgatgtcgcacctgaacggcctgcaccacccgggccacactcagtctcacgggccggtgctggcacccagtcgcgagcggccaccctcgtcctcatcgggctcgcaggtggccacgtcgggccagctggaagaaatcaacaccaaagaggtggcccagcgcatcacagcggagctgaagcgctacagtatcccccaggcgatctttgcgcagagggtgctgtgccggtctcaggggactctctccgacctgctccggaatccaaaaccgtggagtaaactcaaatctggcagggagaccttccgcaggatgtggaagtggcttcaggagcccgagttccagcgcatgtccgccttacgcctggcaggtaaggccggggctagccaggggccaggctgctgggaagagggctccgggtccggtgcttgtggcccaagtctgcgcgccgagtcacttctcttgattctttccttctctttcctatacacgtcctctttcttctcgtttttatttcttcttccattttctctttctcttccgctcttcccctactttcccttctcccttttctttttctttcttactctctccttgtccctgagctttcattgaccgacccccccccatttcattcgccctcccctcaatgtgccaacctttgccctatttccgatcttcccaggtactgggaggcgggatgggggtgtgcgttttcctctaggagccctgtctttccaagacccacagaaaccaggacctgcccttattcaaaaccccatgcacttcaagtctcttttagacaacacatttcaattttccgggctgactagtctccctgtgcagaggcagttgagaggctttgctctgcagagggaaaagagctctctactctcccacccaccatataggcaaacttatttggtcattggctgaaggcacagccttgcccccgcggggaaccggcggccaggatacaacagcgctcctggagcccatctctggccttggcgttggcgcagggactttctgaccgggcttgaggggctcgggccagctccaatgtcactacctacagcgagggcagggtgtaaggttgagaaggtcacattcaccgctttgggaggacgtgggagaagagactgaggtggaaagcgctttgccttgctcaccggccgtccttgccccggtcccagcgtttgctgggatttgccaggatttgccggggctccgggagaccctgagcactcgcaggaagaggtgctgagaaattaaaaattcaggttagttaatgcatccctgccgccggctgcaggctccgcctttgcattaagcgggcgctgattgtgcgcgcctggcgaccgcggggaggactggcggcccgcgggaggggacgggtagaggcgcgggttacattgttctggagccggctcggctctttgtgcctcctctagcggccaagctgcgaggtacagccctctattgttctaggagcacagaaacctcctgtgtgggcggcgggtgcgcgagctagagggaaagatgcagtagttactgcgactggcacgcagttgcgcgcttttgtgcgcacggaccccgcgcggtgtgcgtggcgactgcgctgcccctaggagcaagccacgggcccagaggggcaaaatgtccaggtcccccgctgggaaggacacactataccctatggcaagccagggtgggcgacttcccatggatcgggtggaggggggtatctttcaggatcggcgggcggtctaggggaacaattcgtggtggcgatgatttgcatagcgcgggtcttgggatgcgcgcggttccgagccagcctcgcacagctcgcttccggagctgcgagctcaggtttccacccccgatcccccgggctttcctcgcaccgctgagcccagcttgtggggtgcactcgaccaacgcccgacagggctggggaatgtgacaggcagcaggttcacccgggcttggggagggggagtttccgctttgacagcattttcctttgccgtctgctggtggattcctattcccagtcggtaatcgccccgcagtgttgatctaagaaggtaaagaaaactaggtttccctgcaaagagcctcccccaaatcggcggactccggatactttgagtggatttagaaatttatgtaatctttctcctttagtttatttttcatcctctcctacagttttctctgatttgctgttggttcggggcaagataaagcagccagtagagagcgataataatagcggcgggaaatgaactggagactggctgacagttcttaacattttgtcatagatccccccgaatgtcccaggctgtctctggtgggttttagtacccgccggcttcttgggcaccggggaccagaaggaacttggcagctggtcttaggggtacagttaaaggcaggatgacagctattctcctgctcatctcagagcgctgccgccccctcatgccggtcgcgcaaagaacacagcttttaaaaaacacgtgccttctgcccatataggtctgaaagtgatgaggaaagtaatgcttcgcctattagcgagtttcagcttttaaaatgatcccaagcgttgctgagatgagaaagcgtggcatcccgggggtcctcagccccacccgcgcccatggtgcaagtctgcagggacaggcccgggacagcactgcccacgctgctagattttccgcagaggatcgctgaagctgccttcgtgggagacagaatgcctcctccagcgagtggaaaaggcctgctgaggaccccgctttgctcgagcattcaaatgtgtgtctgttttattaccctgggttgaaaagggacaagagctttagcctttttatctggccattttatcagcaactacaagtgtgttgagtggttattattacataggaggcttttcagtttggggtcagtagatcagtctcttcagacactgatgcagaagctgggactggtaagtaggtattatgtgctcggagcgctaggggacaggagcaaatggagaagaaaagcggaggctttctccgcccggagtatcgatcggaatccccgccggtacgccgcagagggccctcgccgttgggccccgggggtttaacaagcccagccgctccgcaggcggctcggccggactctcagaccggtgcctggaagacaccgtccctgcccccctcccgccaaacctgcctcttctctttctctcataggttataggttccctttctctctcattttggccccgcccccgggtcctgccaaacagccaagcaggccggggtttagggggctcagaatgaagaggtctgatttggccagcgccggcaaagctcacccttaggcgaggtcacaacagaggcaggtccttcctgcccagcctgccggtgtagtcacagccaagggtggcacttgaaaggaaaagggagaaaacttcggagaaatttagattgccccaacgttagatttcagagaaattgactccaaatgcacggattcgttcggaaagggcggctaagtggcaggtggttgcaaccccgcccggtcgggccttcgcagaggttccccaagaccagcccttgcagggcggttttcagcaacctgacaagaggcggccaagacaaatttctgcgggttcgagcacacactctcgggcgttgggccccagagacctctaaaccaagcacaaacaagaagggagtgagagaacccaggctagaacttgcacgggcatcccactgaggaaaagcgaggcctcggtggcaggcatgttttcttccgacgcccgaaaatcgagccgagcgcccgactacatttactgcagaggtttccgcctccagtgagcccggatcccccagcggcctgcccggagctggtctccagtccccgccgtagtccgacgcacggccctctcctggcagcaagctcccagcggccagtctgaagccaattctgttcaggcggccgagggcccttagccaacccaccatgatgtcgcctgggccacctgatgcccgcagcggcgggacacggcccgggcagtgcgcagtggctcctgctaggggcaccgcgtgcgtgcttgtctcccgctgcgccggggacgtccttgggtgacacgggccgctgggcacctcccaagccgaggaaacggacccccttcgcagagtctcgcgcccaccccccaacctcccacctcgtttctcgctgctagggctcccgactcagcccacctctcctggcggtttagttagggatcagagctggagaggctgaacgcaacccgtgccagtacggaacagacgatatgtttgcctgctagctgcttggatgaataattgaaaagttcgctgcagtctgtgcttcgtcaagtcccgggtgccgggagaacaccttcccaacacgcatcagggtgggcgggagcgggcagaggaggcgggacccgagggaggagagtgaacccgagcaggagaagcagcccaggcagccaggcgccctcgatgcgagaggctgggcatttatttttattccaggctttccactgtgtggttatgtcactttctcaaacaaatgtgtatatggagggagatcgatgctgataatgtttagaagattaaaagagcattaatgctggcaacaataacgtaaacgtgtggacccagatttcattgatctggaacttgatccggcgcgtttccagtaagcccgacggcgcgctcttcccagcagagcgctcaccagcgccacggccccgcggttttccagcggtgccgcttcgccagctctgcgcgggttctcccgtctgaccgcagctcctcccccgcgaggccccagcccgccttacttccccgaggttttctcctcctctcgcggggctctctgccctctgcaccccctcccccgacctctgcaccacccgcccctgtgcgcacacaccgctacttgcgcttccggcgatccgcctgggcggctgggtccgcgaagccaatgcgctgaacggtgcccgagtcttcctaactatcctgtgcttggccgttgccactgggccctggtgactaagcccaagtttgaaaatgacgtggctaaagctgcctgctaacggcagagcttaatcagccgcagatcccctcctatcctcatcggttctcgtactaaaaaggctcacgcgcagactttttacgcaggtgcattcgttggacaattaaacgtggccctagtaacaaaagcctgagcttcatccctccgagtagcaggctctgcgctggactggtcgggtctaacagggagaatcttgtgtcctaccttggctgggacaggaagtaagagaagcaaactggggaacccctgccccaccccttcccaccccctggacgtcctgggccgaggcccgggtcactggcccatcgcgggtaaggaggtgtcctgtggaacacctgcattgactggaaaagaaagaactttaaagctcttccttcccgcttgtgggggacaccaccacaccctgccaaccactcccctggccaaatggtggcttgtttttccagaaggagcactaaggtgaattttatggaaaaaaaataaaagatcagggacctaagtgggagtaggatgagaactaattcttctgggttttttttttttttttttgaaattatgaatcccacctgttgaagaaggctgagcttttccaacagcgggtatcaatcgggagggaaagcagtgttttccagccctctccaagaacagtaattaataagaggaaggaaaagagagatgggaaagcaaatcgtgcattgttctgctttgagttgaggcagagggtaggctggtgtttcttcctcatcttcccactagtgttcttccttaaagaagggagctttggtacaccaccttggttcctagtcagaaagtgccctaccggacccttttaaactacaatgagatagctgggtaatcagatatgtaactaaggaggagagcaggtggtttccctttggtctggcggacaactggctccctccccacagcccccacttgaaagactcctaggccctgggaggggcgagtgggcctttagaggatagaatcatagactctctcctactcccatcttagaattccaagattgggcaggattcctggtgaatggtgaggtctgggcaaaggataaactgattaccccagattctctgtccctacaaggcaccagcagctgcttcactctccttttgagccaggtctgccctgaggtaacagtaccctaggccagttttaccatcccaagtgccagacttcagccctgagggaaggagagccagcctctcctgctgtcttcaaaccaaggcttcattttacagtcacccccgatatgagagagagcctccccaccaggttttctggcctttagacacttctcttcaaagaagagaccagaggaacaggactgaaaaactctcaggaagaaagtcctgggctccacactccatggctagtggctggatttggcagaaactgtcttcatgaaaagtggtatcatggagggggatccctggagcaaggaagacctcaagggagaagcagagagatttagtttctgggttcttgccaaaggaagggaaattaggagggaataaatagaaataattgcctgtataaagggccctggggaggagggtgaagacagaggcaccctaggccttaaacttcatctagactccctgggctgtgctgacttctgacccttttagggacctttgtttttgctgacttgggaaaagttgcttcctccagggagacaactcttcttagaggggagagtccataatgaggaagccctctggggtgatttatttatgctgtcaggtatagagctccgtcaggctaactcaccctgtggggccctatcaccccctcttatcacccaggctttttccctaaccaacctctgtgcctttgggggaaaggctttttgatttcccagtctcattcaaggcaatggctgaaaaatgtgcataggtttttctaggggcaggtggggaaaaggtagggacgtggattgtgtgacccagcccatctaatgcctgacatggtgcagatgggcaagacttggaggcaggctgtgggctgtgcagatagagatagcctcacttcgggagcaggattcctagaagctgtggacgtttattatgaaaaactgtcccacacaaattgtcccaaagggcagggaggctctgcattccacctcggcacctctttcaccatttgaggacccattactcttctgtagaaagcagactttgtttgggttggaagcacacctccaatgtaatttaatcagcattggactttggctcttgtaatcaaatatacatatactttctcctgcaagaagaaaaataatttctctgtaactggtattgacttgaagtcatgtaatctctggaaagcatcacatttttaaagggaaaggtaaaattaaggggaaaagaacccgcagtgttagtggtttgctttgtcatactaagaagagccagttaccacttaagaaagggcagaagaagcattcctagagcataaatacttgtgctgctccaattgtagatatttcatttacagttttctctgtgcaatcagccttggagatggttaaggataggaaactaggttgactggctcaccaaattctagaatgtgggctttattacttatgttgcattgacatccttgaaggaacctgtttgacggctcatttttctgccgtatttggagaggccacaggcagcagcagctccttgagttccagcaggatctgggtgggtagcaagcctttccttttaagggtgattggcagccattggcagcttgcttcccactccaccccagtgcccttgagcatgaagctgtgccctactgcgtcctcctggagcaagcttggagtccccaccccccagggtgaggttctgggctttgcccaagttgagtctgctagggaatctgttgtaaacacagatccattgatttgcatttgtcagagagtaaagttaaaccagtgaaaagagaagcccttatccttttatgcagggccagggaaacctttcatattgatcctattgatccaacctttccctttaaggaaaccacatagttaaagaccctcgttcaatagatttacccttcgtgcttgtgatattcctttaagtgttctcatctaggatagctgggcattaagcccacactccaaaccaaacaaaaatgggaaggggggtgggaagagagggggtcaggaggcagaattgtgggaagtgaaattaaatcaaactgaaatgtgtaatgacccagttggggatgtttttctcattcttctaaaatgacatgcagggataaagacaaaatagatgcatttggcatctttttttttatgagaaaagaaaatctgtttatatgcctagagtaaaaatgtctcaggaacatcattttctactgtaaaattatttcaattaagccaccagtttgcttcattaagattggttcacttaaaagcagtgatgttgccacaattattttggttcatttgtagcaaatcagaaaaaggattctccccagaaatgcaatattttggactctgtatatgagcataaacactgaagtcacttgaaaagagagaggatttggagtttttgtgttctgctggatgtgggaagcaacgggtagaacttttgttgtggagcagagtagacgcaataggaattgccagatattgctcagtatccctcttgcttgtagatatgaaaatgtaagtctcatttgcctccagaaccatcggcacaatccatttcatttcttccctgatccttttttcctgtctaaataacatccatttgtgatttttttcaacacggtacatgacctgtttctaattggctatctcttgggttgtttttgtacattcatgtttgttttatgtgattgaaaaatattaatgatttcgtaggtgagctaatgtatttatctgctgagcgagttcaaagggcagagttcagctatggttcaggttaattgaacaggaagcagtgagctctccaggctgtgttgaacaagggatcagtcccttaaaatatcacactcagcaaacacaatttcactgtcttcatcctagagtctgatgtaaaaggctcagatcaacttggatcacttgtttaaaaaaccaaagcaaagcacagtaactgcagcaataccctggagtccccctcggggaagaagagttttctcattggctaattgctttattggtagcactgacctgcagagcagctgcaggagcctggatgaaggcttaggcctcagaataatgtgctccattagaacagggcaaggcattttttgtttactcaattggagctccctgcaaagtgccattaaccccggcccaactgcttgtgtgctgcaaaagccaaaggtcacgccagtcagtctgtaggcatagcagctctgccctggtaggaaggttggggtcgcatcctgctggcactgccctcccaggggctcgggccagccctctgggccctttccagagttttgactaaagcaagcaattgcacaacttgtttacatttcccaactgctgaatcatgttttgatgattaaacagttttgatctgagcaccatcaatcacacacatacagaaaatccccccactgcccctctattttctatttatgttctcttcattactgtgcattacagtaaacagaattgtgcaaacggtgcttttagcaggaatatagttctgataagtgcttggatcaaggggaagacagacctccaaacatggctggggggctgtttggtggaagaaaggtttcaagtggagtcggggagcacagtcagggcttccaccgccagcaggtgaactagagtgccacctgccgggagtcttctaactgcactaagccctgcaccttccacaaggtccaagccccttccttcactttgttcctaatatccttgtccccattccccaccctgcagatcactacccatgcaagcattatcttcctagaagtagcttaaagggctttttcctggtcctttgaaactgtaacctctgcctcttctaattcattgccaaggagaaatcaacagttctgctgtcataggtgaggtgatttgcccatcctgcacattgaggtaatagtctcctgcttagttggactgtgcttgggggaagagaagcaaagaaagcaaaaaatagccgtgggagggaaaacgaatgattatgtgtggaagaaaaatggctccgttgattgtgccagtgagggctgtgccaactgtaaggtgttctgcaaagataaaatattgtacaaaggagagaggatgggagagaattagcatctacagggaggacatcgagaaagagatatgccaaatcagcaaactcgagtttaggctttgtgaaatcccctggaaagagaaaaagtgaaccagccgttttgcaattgcaaagaagtgagccagtgagctagacttcgagccagactgtggagctggctgtagctctgtgggtggcagctatttccacacttgcttcacatggacccctgcctggagcccctggtagcagagcgcctgtgggtgggttgctgcctccacgccccggcgcaggcttcagcaccacgaacagcgccatggaggaacgctgtttgagcgaattggagatggaccctctactgcggttaaatccaggcaagagcctgaccagtatctccagctctgtaggtctcagcgccccagtgcagggcctcatattttcctctggagccctgtggcttttcagctctctgtgtgagatcagcgataataaagggaagaggaggcggcatctgggtgagaagacaaaagatgctgaaagactttccctctgaagaggaagagcattaccaccgctggggggcgggggattgaactatttttctccatgttgctgccttctgcaggcatgattgccaccctcaacgggatgttttagatttaggatttcctttcaagtgttactgtctgcctgcccccacgccccaccccccaggtatacacaaacggatgcttttgtttccccagatgcatgctcctgatttttgaaagcatgacttttattatattaaacaatattctcacattatagcagcagtaatgtcacaaggagaaccaactgtggagcatcaccaccttcgataaatctagaaactggatttgatttcttgagagtctagtgatgaggctctttttaatgaaaaccttgccactgcttctgtccctgaccccctacgaagggccagagatgttgagtgacttcctccaggccacacagtggagtcatatggcactggccagggtgagaactgacagtaggcactgacccctgactctggcctttttcaatcagttgctttgctttatttctggttttattccagagaaaagagataggagagtccttttggtcaatgattgagcacaactcacatctctttgggtttcgagtaaaatggtccttgacttcccaaagctaattaaaatgtaaaactcttgctttatttcaaataactttagttcagacctaatttattgctaaggtggttctcagggaggtagagcattggaatagacaagtgtgtctcctttaaaagtcaagggtatgataaatgagaattttttttcccctgtgacaatttatcttcaagttccaggtggccctttgtgtaaaaggagggaaaatccatcccaaaacaaaacaaacctggtagagcattcaaatttgatgttgaaaaaaattgtttctgtgtgtctaaatgcccaaaattttgttctaaaaatgagcaggaacatatctgaatcagatataaaaatgggtgttaaatgtattttgtaagctttgactaaagaagtttcttccagctgtgtagtcttcgaatctgtggacgtgcctttctcaggagttgttgggttccactgtcaaaaccttttccagtaaaacatggatttggcaacagtaagtgtagcctttttggcctactttatatgcatcactgcatcttactaaaatgaggcattacactctacaaggacttgtactgaatgcatttcctttgtagtgaactcaatatgcttttgaaaagatattttacagaactgccacataaacaagaccttttctattatctgttttgaccctaaatactgaaaagtgtgtggagtaagataattttatgcttttctgaatcagtgccatagatccccaaacctaaaagatgtaggggaaaaattcgtcttggatgcaattgcctcctaatgtataccagagttcatttctgttcatgttcaagggacaagagtgaattctgtattcactttcaatgactaacccttctcatcctttccttcattcttctgaagaggaagaggtggacttcctgttgaagaccaaatcctctcctgccttctcaggaccccatgcttcctgtatatagatgtccctgcttttgtgaagttttctctgtcctcctaaattgggatctctttggaccatccctccctttgcatttagaacatagataggtatcgcctgctgacttgtcagtgtcagcccattagattaagatccagaagaggaggttagatacagcatacaggaggcagccaataaatatctgtgaataagttaataaatacttttcttttatatgacactgtttctacccattgtatttcccccatattattgtagatggcatctgagtaggaatcatcagccccagcacatcatttaggagaagcatttcacaatgtcaagttctcatcaatgtcattttcctcccaaattacgatattataactatgtattaattttaagggaatctcaaagtaggattgagtcttatccaaatcttcagattatcgccagtggagcaagagatgtgaaatgatcatcactagactctagactaaggacccattttgccaattggctctagttaccccaaagtaaccctccccagtcagtcagttctcctcgttttcctgctcaggcattgtcctcactgtcctgtccatgtctttgcacgttctgttccttctgcctggaattccttatctcatcagtccttctccaggtcctatcattcctagccacctccgatctgcctctgaaatcttcccagctaactttggcccattcctttctgtttctttctgaactcgatttgcaatcattgcaaatgacagaacagccttgttggctctggtcttacactgctctctaggtcttttctgtgtctccctttcttccccatggctctggaggggagatagcatatctttgagctccccatggactgctggtccatggctgaacccacaccaggtattcttttttgagtaagtcatttggtggcctcctgtctatctttacagaagcccctattctcaacgagagaataggttgggtatgtttacttacatctatcattcttttctagcttcttctctcaaaagggggtattcttttcttattttatttttttgatctggagccgtactttgtcacccaggctggagtgcagtggtgcgatctcggctaactgcaacatccgtctccagggttcaattgattatcctgcctctgcctcctgagtagctgggattacaggcacctgtcactatgcctggctaatttgtgtatttttagtagagatggggtttcaccatgctggccaggctggtctcaaactcctgaccttaagtgatccacctgccttggcttcctaaagtattgggattacaggcgtgagccactgcacccaacctgaaaaaggggtattgttttctataaatgctttggtcattgttggaaatattggctacataatttaaaatggatttctatgttaatctgaaatgagacataagcttaatatagagaaacagggcttgtgatgtcttcgttaatagcaaaggttgttctgcttcatacaagatggaaaattttacccacctcagggcaattgtgccagcaattatatcagcaaatcagagggactgctttcctattttaagtcattttaattatcagtaaactaaacttgcatctaaacagccattacttgagatactgcaagtgcttaggttgttaataacgtaaagttacctgtgaagaaaaaaaacagaggttaatatttttatctttttattttattttaattttatattttattattttcctttgatgaatccattgctgcctacactgtactgaactaagtagttgggagtgaaaatatatgaactagcccttgtccctttttgactttactgtatatttaagatttgaatggatacatcctcacttacctttacatatccatatggaattgagtgagaacagagtttattactatgtcaactttagttggaaactgaaactaagatcatttatttgctatacatcttacgtggaaattatatattagctcgtgatatttcatcttttttacagttatgttttgacgttcatattacatgagtaacaaattatgaagactaaccatttatgaacagaatttagtgttaaatgaaagcattccagatttttattttctgttgccttgaattgaatgcattgctgtgctgcatgataactaggtaagcaattgacctgtgtgactgtcatttctgtgccttgcataaccaaaccaagtttcctctgacactgaggcagagacaggcagggttgcgctgggcaggaagcagctctgaggcctccctgaagggccttagactcccaatgggggagtcagaggccaccctgttctctggctacggcaccatagcctagacatgggtgtcaccaaaggctatacacttctttacctccttttctgccctcttcctaaaggaagcatctggaaccagaaggagtccatatcgctagccccactcctccctaaccagttctccatcccgagccttagattcaggcttgcataggcagattctggaaagtccattaaaagggcaggatgtggagtaaataggtgattggattggagggtaaagggcggaaaattcacagcagagacaggtggacttttctaactggataagctacaccaactcatgaatccaagtattccacccctggaaagcaagaggtgaaagcaagttggttccattggtgaaagcaagtcacctgcctgagcccagagacagggtggaaaggctctacaaagttacatggcaggaagcatgggcacagaaaaggcaagcatgaggaatggggggggcggtgttggtgtttttctttgtttgtttgttttgttttgtttgcattctacctcatgccatgtattttagctcatttattcttggaagctgccactgctatggtgatacacagacatcaaggatgtccaatagtatagggctaattttggcaacacagaagataagtgtgggggtatttcacattcataagtaacaaacctatgcccacctggacaggaaccacgcctctttgtattgagactgtttgtgacatgcttgatcttctcgactagatcatagcaagcagggaccctgagctttgttctcctgcatcttccctttagccccaccacaatgcctaacacatagtttgcacttagtaaatatgcaaggataaatgatccccagaatcccactgctctagtgtcccaatgggagatcccctcaagacccaccaggtgattgcttgtagctcaacctgtattttattttattttattttattttattttagagacagagtctcactctgtaacacaggctggagtgcagtagtacaatcttggctcactgcaacctccacctactgggttcaagctactctcctgcctcagcctcccaagtaggtgggattacaggtgcccaccactatgcccagctaattttcatatttttagtagagatggggttttgccatgttggccaggctggtctcgaactcctgacctcaggtgatccactcaccttggcctcccaaagtgctgggattacaggcgtgcgccaccacgcctggcctcaacctgtattgtaaaatagggtttcactttaaacttttaaattttgttctactacaataattaccaaattccaggggagcaaaggtccaagcctgttgcctacagaattaaggcatccaattcagatctcaattattttgtgttaagaaaatctaaacaaagcaaacactgcttagggtttaccaatgaataaagaagcaagttggaagggatatcaaaaagatcaaaatgtttgcgcatttataactttaacaatgtctaagtttttttaaacttaggttctacatctggagcatacttttttaaaaatcataagcagtgttaaaaaatacttgacagttttgtcttgattcttaatgtgggtgttaagggatgccgtccattagtgagtacaccccagatcatgtgtttattgcatcctccttcttccctgcctgtcccctaatgatctggtgcacagagggctacttgagctgagttatatggatctcagttgctgtcatttgcacatacttaattcagagaggtgatcacattgatttccaagacccaatttttaagacactgtactcacgtagatatcttagctgctctgactatgttgtctgaaaaggaaaacattttaagcctttggaagcaattttgatggacatttcattgtgttctatattactcacataattaaatttccttcaagtcaaagtctgtttaaaattaaattgagaaatatttttgagttccatcaggcagataactttgtttagctagatttgttctgcattcacatgaaatggcgtcctacgaatcaatacccagtgctcacagttcccctgaatgtgaagaaatggcacccttagtagttcttgtgtttttatgcctatggttttgcaggctggtttattcagattctgagcattgtgaactaaattcataacttctttcatgcattagccggagtcataggactctgatttacagactcgcagtccagctcacagcggctagctttctttgggtcataccagagtttcatctgcatggccaaaggggtagaattccaacttgggtttgaaagcaaataggataaattgtcagaagatgtattcctgtgtacatctttggaaacaagacataggaacaaacccttatttttcaactccacccaccctgctactgaggacagaagaacaagccctcctcatcttttatcctgcctctccttgagacagccattccattaaattctatggcgagggaatctatggtgttcgagctgtaattgaagaattagcattccataaatgctgccttaatttttttaaaaaaattgttccaaagaactgctttttgttgcattgttaattagcctttgaacatttttgaattcattataaccttcaaggtctgccaaggtctttaaggtttcttctttatggctttgcctctaaataacaataggtacattgtaaggttattgtgagccttaagtaagttaatgcatacagatgcttagaataactggtaaatagtaaatacttgctaaaatatctgccattattgattgattgattaattttttgtaacttctccatatatcagcaggaaatttggcctgagtcaccaatgttcccatagcttttatatattaagaatattgcttggcattgtcaatgacagcatgagccaaacagatccagtttgtatctgagccaccatttactagctctgtgatgtcaggcaggggacgactcttgaagagcctcagttccctcctctgtaggaggaggacaaggtaggtcctgacgttatctagttggtgtacagattaaatgagacgccataagggtatatggcacctggtacattgcctcctatctcctcagttttacagctaacatcctattacacatgggccacatctgtacttcaacataaattttttgtcattttctcagatgagatttaggatgagtgagattgccagactctacactcatcactgggcatgctgtttgcaaactggccaaccatgcagccggactatttactccccacccccaatgtccttttaagactcccttaacagttatggacattttgctaagctcgtgcttagaacccagaagttgactgtgcacacagtaggttctgactgaatccctacaggcttagattggaatacagtccattttgcaagtgtggtatgtattgagcagacattctgtatttgatggaagttcacatataaaaatggcaactgagccaacaaaactcacatcatctgtctctataatgatcacaggtttggggggccttatcagaaagttatttttatagacaccccggtggtcatgagatttaaaatgctaaggagaatggcttcctctttaacctcttttctgtttttgatatgtctgggccctgcttctttatcttgttccccaaatccattcacttaggttctgacttggctccctggagagctcctgttttggttcacaccatcatctttattcccaaattaggatccttaacaagaaaagagaaaagaaagaaaacctgtagacatccagatgttgctttttctgaagtaacaactttatttgataatattttgaagccatgggccaccgaattctcaacatgcaagtttatttaaacagtctctagtatcctttcctgaccccaaattactttcaagcattaattgtcctagtggtttcatggccatattatttcatattcattagtgttttcatgaaaaattataacactaattagagtggcttccagttaattcacttggtgattcattactctctccttcttggtgatctgcatgtggtcatcctggagaaagcatccaagggtaattgcagctctattccctgagtgattgcctaatgccattagttctgatccacaggagcatctcgggaagctctgatggggtctggttacagctgcacccttgtcctgccctttggatgcagggagaaagggaagcctgcagtgaggactggtcctccggaggggtctagggaaacagaggggagggacgtcttagggaaaaggaagtaggggcaggggagggagttcagggatttgaacatcactttaacatcttctagaacttgggtaaggacagtatagagtaaaatctgccctgagaacttgcacgtagagtaaggaaggtggtttctcttcagtttcagcagacttgtggccaggcactgagctggagtttggaaacccggttccctctcagagctctgacatccagttcttccaactgaaagtttatttgacctcattcccattaggatggctgctgtaaagcaaaatgaaaacaaaaaataacaaatgttggcaaggatgtggaaaaattggaaccttgtgtgctgttggtgggactgtaagatggtgtagccactgtggaaatagtatggcagttcctcagaaatttaaaatgtgagttatcacatgacccagaaataccacttctgagtatacactccaaaagaactgaaagcagggtctgaaagagatatttgtacacccgtgttcactgcagtgttattcacaacagccaaaaggtggaagcaacccaacagttcatcaagaggtgaatggataaacaaaatatggagttttcatacagtggaatattatttagccttaaaaaggaaggaaaatctgacatatactatggtctgaatgagtcttgaggatattaagctaagctaagtgaaataagccaatcaccaaaagacaaatactatatgatttcacttatatgaagtgtctagaatagtcaaactcatagaaacggaaagtacaatggtgcttgccaggtgcctgagagagggaaatggaaacttgtttaatgagtatagagttttagttctgcaagatataaaagttctggagattgtacaagaatgtgaatatacttaacactatggagctataaccttaaaagtagttaagatggtaaattttgttgtgtatattttaccataatttcaaagaaagattgtttgttatttatattgtattgcttgctcaatttttaaaaaaaattaaaaatagaaaaacaaaaagccaggtgcggtggcatgtacctgcagtcccagctactggggaagctgaggtgggaggattgcttgagcctgagttctggactgtagtgccccaggcccatcaatgtcctcactaagttcaccatcaatacggtgacttcctgggagtggggtatcaccaggttggtgagggaaaaaacaactactgccatgttgctttcagttcttttggagtatatactcataagtggtatttctgggtcatgtgataattcacactttaaatttccgaggaactgccatactatttccatagtggctacatcatcttacagtcccaccaacagcacacaaggttccaatttttccacatccttgccaacatttgttattttttgttttcattttgttttgacagcagccatcctaatgggaatgaggtcaaataaactttcaactggaagaactggatgtcagagctctgagggggaaccaggtttccaaactccagctcagtgcctggccacaagtctgctgaaactgaagagaaaccaccttccctactctatgtgcaagttctcaaggcagattttactctatcctgcccttaccccaggttctagaagatgttaaagtgatgttcaaattcctgaactccctcccctgcccctacttccttttctctaagacgtccctcccctctgcttccctagacccctccggaggaccagtgctcactgcaggcttccctttctctctgcatccaaaggtcagttgtgtttgctcagtagtgggatactgcctgtgaatagccactgtactccagcagcttaaaactccatttcttaaaaacattttttatcaaaagttctgccactccactattcacaatagcaaagacttggaaccaacccaaatgtccatcagtgatagactggattaagaaaatgtgacacatatacaccatggaatactatgcagccataaaaaaggatgagttcatgtcctttgcagtgacatggatgaagctgaaaaccatcattctcagccaactatcgcaaggacagaaaagcaaacgctgcatgctctcactcgtaggtgggagttgaacaatgagaatacatggacacagggcggggaacatcacacactggggcctgttgtggggtagggggctgggggagggatagcattagaagaaatacctaatgtaaaagacgagttgatgggtgcagcaaaccaacatggcacatgtatacgtatgcaacaaacctgcacgttgtgcacatgtaccctagaatttaaagtataataataaaaaaaagttctgccactcaaagagaaccacattaatattttgcttttattaaaattatttttaattatttaagcaatgcattaaaacattctacttataaaaatcaaaacattaatgatcagaataaagtcctctttgcctatctcctttaataccagtcttcttcattacttcccagcagtaaccactcttctggctacaaagagtgggtctgccaatccaggcacttccagtgcatttatttacctacatatgtactcatataaattgtataaataggtagaaagacagatagatagatcgataggtatcttaggtttgcgtattgttttcacataagtggcatcacactgcatgcatcattccaaagctccttctttcctttgatagtatgcctacccagcttctacatataaatgaggttcttgcaacccacatttattgcatagtgtcctatggcatgactattttcatttatttagccatttctgttttgatgggcaattaggctgtttaccatttttggttgtttgcattatttgctaagcagtgatgagtgaacatccttgtacacacctccctgtgtacccatgggaatgtttcctagggtggacaccgagaagcaaaatgagaggtcatggagatgcacatactgtaattttgataggcactaccacactgtcttcgaaattggctccccatcagcagtggaggagagagctcctatttccctgacacttgccagaagttaatatattagccattttacttttttttgcatagttgctggatttaaaaataacattttgtggttgctttattttgttatatttttatgatttctaatgaaccttgatataatcatatacttgctggtcatatatatttccttttctgagaatgtcctgttcatatccttgtttggcattgttttttatatattctggatgcaaatttttgctttacaaattacaaatgtggtctcagttctccagttaaaaggcataaagtgattgaatggttaaagaaacaagacccatctatatgttgccttcaggaaacccacttcacccataaagacacacatcgactgaaagtgaaagagtagaaaaaatatttcatgcaattggaaaccaaagaagagtgggagtaactatacttatatcagataaaatagactacaaatcaaagactgtgaacaaagatgaggagggtcactacgtaatgagaaaagggtcaatacagcaaggggatataacaattataaatatctatgtgcccaacactagagctcccaggtatataaagcaaacattaatagatctaaagggagggatagactataatatattgaaaacattttatcccatggtattattttgaaacttaataaggcttcttttaactttgatgtatcaaattcatcttttttattatttattttttatgagacagagtttcactcttgtcgcccaggctgagtccaatggtggtgcaatcttggctcactgcaacctctgcctctgggttcaagcaattctcctgcctcagcctcctgagtagctgggattacaggtgctctccaccatgcctgcctaatttttgtatttttagtagagatggagtttctccatgttggtcaggctggtctcgaacttctgacctcagatgatccacccgcctcagcctcccaaagtgctgggattataggcgtgagccaccatgcccggcccaaataaatatttttgttgctcttcctttactttatgtgttttgcttcttgggtcatttttatttattttatttattttttagaggcaggatctcactctgttgcctaggctgagatgcagagccccaatcatagctcactgcaacctcgaactcttgggctcaagcgatcctcctacaaaagcttcccaagcagctaggactacaggtgcctgccacctcatccagctaattttattttatttttttcatacagatggagtcttgctatgttacccaggctagtctcaaactcctgagctcaagcaatccccccacctcagcctgtgtgctggggttataggcgtgagccaccatgcctggccttgggtcatttttaaacatttgaatctttattctttaatttttctgaagttgctttttataaattatgtgaaattggaatctatttttttaaaatctcaaatggatagccaactaatccaacagtttctgaacaattcatctcttctcactatttgaaatgcaatactttctttataatatattatattcccttatgtacttgggtcagtttctgcactccattctgttccatggatctattaaattctgtgtcaacgtcatactatttaaattatttttgctttatgatatatcttgagctctaataggatatatattttctctcctcatcttctgtttctacatcttcttagccttccttgtattttcacttttccataggaattatagaatcagcttgaatttatatattattttgatcttctcaattatacatagggcacagagttctattcattcaaatcttttttttttttttttttttgagatggggtctcactctgttgctcaggcctgagtgcagtggcacaatcacagctcactgcagccttgacctccctagctcgggtgatcctcctacctcagcctcctgaataactgggactacaggcacacccaccacacctggctaatttttttgtattttttgtagagacagggtgtcactctcttgcccaggctggtctcaaatgcctgagttcaagtgatcctcccacctcagcctccctggcattatggcgtgagccaccacgcctggaccccaaatctttatttatgtcctcagcaagtaaaaataagttttagttttggccttttgatcttttggttagagttatttctagctacttgttactgttgtgaaggtttttttctgttgcgttttggtttcatagttctttatactcaagtatcctaaccactatagtttagtgttgctgttttttttttaacttcatataaacagactcactatatgtgtattcctttgtgtctgatttcttttttccaacattatcttcatgctgttatgtgttgctgcatgtagtagcagtcattccttctttttcataactctataatattccactaaactcatatgccacagttaatcaattctcctgtcaatgagcatttggattgtttccagttttactacagagctgctctgaacattcttgtacatgtacatgcatcctaatgtacttaaccatacatttctgtggggttttcttaatttgagtttcttcagaagcaaaccctaaaacaagaattcaagtatgggtagtttatttgaaaggtgattccagaaaacactagtaaaagagtggagaagcaagacaggaaagggaagaagcccaataagagtcacttcatgaagcacattagtagagtgggcaaatggagcttaatcctgctgagtaactctgtgaaactccagagaaaatatgccttagagttgttccagctgaagaacaagggtgctggggtatttatctggcagctccaattattccctaattgaggaaatctcctggacccttccccagcccttctggcctgcactgcatgtgggcagggcaggctctggcagccagacaaagccctcaggcaaagagctgaaggtactggcagttagaagttgggctgtcgtgccccgcagtggtgaaggccaggagagtgtggcagcacatgacagagtctgctacaagagagtctttccatgagcagaatttctgggtcatagggcacatatatattcaaccattgcagatactgccaaacagtcttccaatctgttgtcccagtttgccctcccaccagcagcctaggagaactcccgcaaggctgtgtccttgccagctcttggtattgacttttacatttaagccattttgataggtgtttaatgttgtctaatttgcaattcctggattactgataattttgagcatcttttcatgtaatttttgaaaatttggatttcttctgtgaagtgcctgttcaagtctcttgcctgtttttctattggaatgtttggcatttccttattgatttccagaagattttatatattctggattcaggccctgtggcagacatatgtgtttaagatatctgtggctctcctttttactgtcattcctgtcttttgaaaaacagaagttcttaaatttttttaagagacagggtctcgctctgttacccaggctggagtatagtggtacgatcatagctcactgcagctttcacctcctgggctcaggcagtcctcctgcctcaaccttccaagtagctgggactactataggcatgcaccaccacgctggctaacttcttaaaattgttttttgtagagacagggtctcactttgttgcacaggagaagttcttaattttaacgggccccaatatataactatttctctttgggctagtactttttgagtactaagaaatctttcctgtgattatgaagaattaccctatgttattttctttctttttttttttttttttttttttttgagacagagttttgctcttgttgcccaggctggagtgcaatggcccaatctcggctcactggaacctctgcctcccaggttcaagcgattctcctgcctcagccttccgagtagctgggacaacaggcatctgccaccacgcctggctaatttttgtatttttagtagacacggagttttaccatgttggccaggctggtctcgaactcctgacctcaagtgatctgcccgcctcggcctcccaaagtactgggattacaggcataagccactgtgctcggcctaccctatgttattttctaaaaactttattgttttgccatccatactaaggtctgtaatccatgcagaacttattttttgtgtatgacatgaggtaggggtcaagaattacattgtgacacaatgcctatccagttattccaactccattacaggagagaacacatgttcctcatgttctgcatatccaaccttgtcattgaatccagtgtccatatgtgtatggatctatttctgggtttctgtccttttccactggtctggagttgtatgtccttgctgcagtattacaccatctattgtagcctcattaaagatcttggtagttgaaacagaaagttgtcctacgttgttcttcttcatctagaatagcttaactgttcttcgatttttttgcattcccagttaaatttcagagtcagcttgtcaaactcaaactttctttcctttcctcttgaaaggaaggaaagaaggaaggaagagagggagagaaatctgctgggattctgattagagattgcattgtacctgtagatcaatatggaaagaattaaaactcttcacaatattgagttttccaatcaatttatttaggtattctttaatttctctaacaaagttttgtagttttccctgtcaatgtcttgtatacctattgctagatctattctatgtacactcttgatgttttgatcctattgtaaatgatatcattttcatttactgtttgatgtgttatggagaaatacaattgattttgtctactgacttgagtcttagaatcttactaaattctcatactaattctaacagttcattgtgtattctcgtggatttttaagtacacacaatcaatattgattttctatgttcatcttgaaactggccaccttactgaacttttttattagttctagtaatttgcctttcaaaatcttgagttttctaggttacaaaaccaaaaaaaaaaaaaagtccctcatattaacttataattatgaggattctgtttctggctgaagacgctgttaagtaaaagaagtatggagtcacactacctgaatttgactcccagcctgttatttactatgtaactttaagtaatttgcttaatcctctgtaccttggtatcattaattataagctgcctcatagggtggttgtaataattaaatgagtttatacacgtagaattctgcctgtcaaataatgagcactcaacttatgtaagcttttgccatttcatcagtttcctaaattcctttataaattttctttctaaattttcacttcttatttattttttcttattttattgtattggctccttttccgatataacattgaatcatagtggtgcttacacccctcatctgaaatttcaacactttgaaacatttctttctagtattttttttgttttttgtttttttgtttttgtttttgtttttttatataggcatgttgttttgttttgcttttcatgtttgacgtatctgaaattgtctttgactggacttccaaatctggtggtaaactatgcaagacagagatacttttccaaaggaatgtcttttgttcaaactatattattcacataaagatgaaaagtaataacgaaacaatttgtttttaaacattgagatttggttgtgaatggagacaccgaccctttttccttcctgcagattcattagtgtagtcttaacaaagaggtgctcttcattcatgtaataaaactttttaggatgtttggaaggagctcagggatattcgtagccacatagggctgttggccaattcttttttaagacaatatcacattcttgagcttttaagtttgattaaattcttagtaagctagagtatgtcttcaagttattttcatagaaaatattttcatagaaaattttcatagaagttattttcatagaaagcctatagttagaatttttgagtcattaaataactaagaatgcctttctacgggaaagaccacctgaaccacataaaattctagcattaccgccacagtgtcagttttgctcttaatttcctccaatgccactactgtatttctcattttcctgcaaattttaaaaatcttactcctctttttttgcggggggcgggggttgtttgtttgttttgagacagggtttcattctgtcacccaggctggagtgcagtggcatgattgtggctcaccacagtctcaaccctctgggctcaattgttctccctgcttcagtctcctgagtagctgggaccacaggtgcacaccacccacgcctggctaatttttgtagtttttgtagagacagggtttcgccatgttgcccaggctggtcgcaaattcctgggcttaagcaatccgcccgccttggcctcccaaagtgctgggattacaggcatgagccacctcatccagcccatcttttgtcttactactttttcattacatatggttacttacaaattgctattttcttcttaataattttctgttcctgtttcataaaagccacctctttttgcatcatattgttatatcaaatgattctctaaaatgttctttaagtttctggaagatattatctggtaaattttctctggttttcagatgaggatccctttttgtcttctactattttttcaattgtctctttttcctgtttattcattctcaaatgagaagagacccattctggcttgccatggtcaatagaaagggtgtatgttttgctcatgacctcttttctggatgttagtgcactcattctctaagccctatactaaatcgccagttgatacacctaaccaagcttccatctaatcagcttccttgttgtgtggccctgctgaactgatgtgcactcatctcctgcatccgatcctgggatgctgagaagctgatcaaatggaatacacacgacaacccccggtatactgcacatcgagggctcctcttgtacctgtgctcaccctgagtgctctggaaactacttctccaagggagtgatgtaccagccttggtgtccctcctccaccctgcagttttgttttgttttgttttgtttttttgcctagttgttttctgagagttgcagttcttaattggcaggtggaagggagtggggagtactctggctctttcaaaaggcagcacctaccaagtagatggatggctgctgaatttaaatttctcaacagttggaggactcagatgttattttttcaatcctgatgtcccatttcaacccagttccattggccttggccttgtgtttaggtaaaaaatctccagatcccccaaaacagactgactgcagtcctggtttttggtgtgctaagttttgtgtttcattacaggacttcgagatgattttagcagaaagttgaagaagctgccccatgctctcctagccattttaagccagatgtttgtatctggaattaaatatttgttttagcaactcacgacttcctggatggcttacaggaatgcagcttggcagcagagctaaagatccctctttgccaggcttctgcataggcagaagagatgactgggaattgtgatttcaaaggctgagtgccccaaactatttattctaataggaaggtgggaaataaaagccccactggactagacaggagggaatatgggttctcagggctgtgtcactgcataggtgaccctagctgggagttctgatctcttatttctaaaaacaaggttagaccaagtgctctctaaaatcctgcctttctaggagtctgtggttttagcagctgacctagaccatctgctattagaagcctgttctttgaggctactcatgtttgttagagcctctgctggagagaagcagaagtaagaggtacatctccactcggtgtacaggctccagtgtgcttcctacaggcagcacctgcgggcagctacaggggcctgaaccttcccctgggagatctgcccaccaggggcactctgggcctttttcaggccatgcctccatataagaaagtcgtgagacatccaagagccctcatttcctgagtccccttcagtgactttgtattgaaagtaaaaatagagacaggaaataaaacttgtttttttcagagaatgtctttgaagcttgggaacacagaatggtcgctgtgcggtctgcctccagccgacagtaagtggacactggggagttgctctagcgcttgtcaagaccagcttcgacatccaagtgaaagcagaggcggcggtgtggagaaagagcagagatttgccattgatcatccacatttcctttggttttttttttgtttgtttgtttgtttgttttttttcctaagacagagccttgctctgtcacccaggcgggagcgcaatggcgtgatcttggctcactgcaatctctgcctcccgggttgaagtgattctcctgcctcggcctcccgagtatctgggattacaggcacacgccaccacacttggctaattttttttatttttagtagagacagggtttcaccatgttatccaggatagcctcgatctcctgacctcgtgatccacccgcctcagcctcccgaagtgctgggattacaggcatgagccacctcacctggcctatcatccacattttctagatgagaggaagaatgtactacaggaaatctccccaggatctgagatttgtcctgtgtcagaggtgaagcccaagacacggctcacaccgacattccagggcagtgccaagccttcccggactccgggcagctcggaacttggggactttgcccccaccctccagcatctccagaatgaggggagtgtgtatgtgtgcatcgtgcatggcccctcctgccttcttgttccttctccctcctgtctcctttttcctcttgctccgccattctcccgcccacaatatctgctctaataagccaggcggcagtgctccaactagcccataggtggttcacgctggagtaccttgtgcaggataatttgccaaatgggttagaggtctgtcttgcaaggcctgtgcatacatccacaattagaagggagtgaaaggaggaggggaacctaacaaccaagaatggctccacatccatttgcacagtgtccaccctgtctctgcccttggcctcccaaatggatgttggtctggacgtcactggctccgctgcctgtctgtattggcatctggtacatgaagaccaagtttctgaggaaagccagctctcaaccttgaaacaaagccattaagtttctcatctgactcagatcaggcacgtttggagaaatgagggccaagttagagtttagttctagaggtggttgggggcggagggcaggttcatggtactggctccatggtcatctgaac

SEQ ID NO: 218 - DNA, 21283 bp, Homo sapiens
  source 1..21283: mol_type = other DNA
atccggaagttgcctctgccctcaccaaagatggcggccccggcgccgctcgcccacctctcgtaaccaatggaaccgcggcgctcggccgattctcgcaggcgccctcagatctacgctctctgatgcaacgccggaatcgcggaaaccgccggtgcacgttggagtcataagacggcgtcggtgttgcagtctgtgtccttggaggtgaccagggccactgcaggcatggtgctaggtgggtgagactcagtgtatggcgcggtgttccctgcctggggcaggaactctgctccagtcgggtttcggcgctttccttagtgcctaccagagtgggcgccccgcgaatgtttggggaccgattgcagggagggagggagggagggtgctggcctttgctgggcccgggacttgaagggccaggccgggcttccccgagtccgtcgttcccccgggctgcgatggcggtggctccgggcccttcccctgccccgctgcgaaacctcccgattgcgctgagactcaggcgctgggacgggttcagacacagggtagcccctactcctgcagttcttcaaagtgatcgtcaggaaggggctttaggattctagttgtttttctcccaccctcatttttttattgaggtttccggggagaccatactgtgcagtaggaaaaaaaaaaaaaaaaagagagagacctggatggatgttaactgttcagacctactagttgtgaggccttctgaaattttctaacctcagagcttctgtttcctttaaagtccagagggagctggtgtttatttgccatctctacaaaaactggcactgggatatctgatttgtatgtgttattttatttcatcctcagcacagcctttcaagatggggattgtttttcctattttataggtaaagaaataagctcagaaaggttaagtaaattctccagagtcaccctgccttttaaggtacaaaatccaacattccagcgtatgtctgatcaacttcaaagcccatattttatttttgggtgcccaattagatagaataaatatcacaaattaaaatgatcagagttcattttgaaaacctggattattaactaatgtttttatgagatggatgttattgaaatggagtggggaaataactaggatattaattacttatggacctcaatttttattaatcgatgcttgttctgtttacaaagataaggaatgaataaagtagtaaggtgactaatagttaatggccagaccataacttaccctcattttgtcaaacagcagagctgtacgtctctgaccgagagggaagcgatgccacgggagatggaaccaaggagaaaccatttaaaacaggtctaaaggtagagtctcttctcattaggaaaatgagactgcatttattaatgagttatgtcaattttcttgtgacttgccaagaacttaatttcaaacactaggttccaaagagaattttcagaaaagggaaagtaaggaatgcatacagatatgtgactttaagattgttagatgatcaaagtctaaacttactttttaacattttgaaaaaaggtctcttctttcttaccacatggcattgcttcttggaatttttctctccattgagtcagattgctgggttttcaattcttgtaaagataaaagttacctttcctcagttacagtgagctcatgaccagggggctcctgagagggcttttggtgaatttaccacaatccagagtgtgatcctgagatttgactccaagaccaccaagaatggattcatttgtcagagctgactcatgagtctggagcttcaagctagaatgccaatttattaacattctgttaatgaattaacagtgctgttatttctcaggatctagaatccttgaatgagtttagctcattctcaaaggggtttgtcaagagcttggactcaggcctggtgtggtggctcacgcctataatctcaacactttgggaggccggggcaggtggattgcttcagcgcaggagtttgagaccagcttgggcaacttggtgaaatcctggctctacaaaaaacataaaaattagcccagcatggtggtgcgtgcctgtggtcccagctactccggagactgaggtgaggatttctttagcctggaaggtggaggttgcagtgagccaccattgcgccactgcactctagcctgagaccctgtctcagaagaaaaaacaaaaaaagggcttggactcacaacatgggtgttaggtagttgattatatcagagtaaagtgtggcctaagacaaccttcttaaaatagaccatggacttagctgttgaactcatatgctagaatccattggctataactgccacataaggaagatggttaaaagttccttccttgggtctgggctttggtgcctcacgtttgtaatcccagcactttgggaggctgaggctggaggactgcttgagcccaggagtttgagaacagcctgggcaacatgataagaccctcatctctacaaaaaatttaacttcttaaaaattttttaataaatttaatttaaaaaataaatagagacaggatattaaccctcccaaagtgctgggtttataggagtgagccatcacactcagccaactaccaaaaaaaaaaaaaaaaaaaaattagccaggcatggtggtatggtatgcacctgtggccccagctactcgggagactgagatagggggattacttgagcccaggaggttgaggctgcagtgagccgtgattgcatcactgctctgcagcctggacgacaacaacaaaaaagttccttctttgaactgtattaggaaaagcagtgccttgacactcctttttctgtgcatcccctttttttgttaactgtgttacaacatttatagttactatcaagtcctaatctgggagcattctcctctcttttaggtcataccatatggttataaactttggtgtgtcatacatgggtacttgtttttaatttaacttatttatttatttttctgagacaggatcttaatttgttgcccaggctggagtgcagtagcgcattcatggctcactgcagcttcaacctcctgggcttaagggatcctcccacctcagccttccaagtagctcggaccacaggggcatgtcaccacacgcggttaatttgtttcttatttgtagatacgagatctcattatgtttcccaggctggtcttaaactcctgggcttaagcaatcctgctgccttggcctcccaaagtgctggggctacaggtgtgagccgccactcctggctgggttttactttttaaccactcttaaggggaaatctttcatttctggattatcgggtgcctcgttttgcagctcctgaaaactgacaacaccgtttagatgaacgtttgcagaatgtcactgttaacaacagaatgtcactgttaacaaaagtgtagcattctgatttgggaactgatagtttggctctttcaatttcaatgatacaaaaggagggatcagtacagattgtcgggtaataagtgaattccgaacgacctacatgtattcatgggaccttctctcttggttttgcattttcatcaatggctatctttttttttttttttttgagacagagttttgttcttgttgcccaggctggagtgcagtggcatgatctcggctcactgcaacctctgccttctgggttcaagcaattctccctgcctcagcgtcctgagtagctgggattataggcactcgccaccatgcctggctaatttcttttttttttttttatttctagtagagatggtgtttcaccgtgttggccaggctggtctcgaactcttgagctcaggtgatccactcacctcggcctcctaaagtgctgggattacaggcgtgtgccactgcgcctggcccctacatgtattcttacaatgtctagttgttaaaaggatgaactattgaatgttttcttttttttcttttttttttttttgaaaaggagtctcacactgtcacccaggctggagtgcagtggtgcaatctcagctcactgcaacctctgcctcccggattcaagagattcttctgcctcagcctcccgagtagctgggaccacaggcgtgtgccaccacacctggccaatttttgtatttttagtagagacagggtttcatcatattggccaggctggtctcgaactcctgacctcatgatccgcccacctcggcctcccaaagtgctaggattataggcgtgagccaccacgcccagcccttgaatgttttcaaaagatccagattccttccttctctattttttttttttttttttttttgagacggagtcttgctcttgtcacccaggctggagtgcagtggtgcgatctcggctcactgcaagctccgcctcccaggttcacgccattctcctgcctcagcctcctgagtagctgggactacaggtgcccgccaccacacccggctaattttttgtatttttagcggagacggggtttcaccatgttagccaggatggtctcgatctcctgacctcgtgatccgcccacctcggcctcacaaagtgctgggattacaggtgtgagccaccatgcccggcctcagattccctccttctctgcagcagtcgtagaactgagaaaaagtccgtttttgcaggctgcagatcttgcaacagagaataattcactgcatttcttgtttgattcaataacttggaagagattttgaaagattatttgaggctttaaaatattcatcttttatgtactttgaactattttttaaaaactacaaacaatacattttatcaaatgatatataacacagcaatgcttgatatgtcccattggggaaaagaggtattctacatgggggagtttttcagattaaatgagtttagctttttgtgctcttttttttttttttttttttttttttttgagacagagtctctctctgtcgcccaggctggagtgcagtggtgccatctcagctcactgcaagctctacaggcgcccgccaccacacccggctaattttttgtatttttagtagagacagggtttcactgtgttagccaggatggtctcgatctcctgacctggtgatcctccctcctcggccccccagaatgctgggattacaggcctgagccactgcacccggccgctttttgtgttcttaaccattgttttgttgaaagtttcaaaaatgtctgacacttctctgatttctcacagagaactaaccttttagatgtcacttgcagttgagttttgctgtcaggtgtctcttctgttgtccttgtacctgtgctggttgctacagccacttaagatctgttgcttatagtctgcttttcctggggaactgtatcgtgtatacccgaacttgctgtaattgtttgtgagaggacctcagagcttcagctttaaccagtgtgcttctttttttttttttttttctcttgagacagagtctcgctctgttgcccaggctggagtgcagtggcacgatcttggctcactgcaagctccgcctcccaggttcacgccattctcctgcctcagcctcccgagtagctgggactacaggtgcctgccaccacacctggctaatttttttgtatttttagtagagacggggtttcaccatgttagccaggatggtctcgatctcctgacctcacccacctcggccttccaaagtgctgggattacaggcgtgagccaccgcgcccagccaaccagtgtgcttcttaaatgttcaaccagtcactgtgccaatatcagcttttggctgttggggtctttatgcttagattgttccagttgccttatacttgagatgttattttgattttaagtattgtacaatgttcaagaactgtcttttctctcctccctacccaaggctttgatgacagtagggaaagaaccatttcctaccatttacgtagattcacaaaaagaaaatgagaggtggaatgttatttctaaatcacagttgaagaacattaaaaagatgtggcatagggaacaaatgaagagtgaatcccgggaaaagaaagaggtgagtcctgaccttgccatcgtgaacgttgttaaagttagaactctggcaaccatgttaacaaactgcttcatcattaaaattaggcagaagatagtttacgaagagaaaagaacctggaagaagcaaagaagattaccattaaaaatgatccaagtctcccagagccaaaatgtgtaagtttgtttatcttttcaaataccgtggacttggctacatcagatcattatttctgtgtatgaggggcatgtcacatggtttgttcctttacattttgtttttactttccatttatttatttatttatttatttttgagacggagtcttgctctgtcgcccaggctggagtgcagtggttcaatctcagctcactgcaagctccgcctcccgggttcacgccattctcctgcctcagcctcccgagtagctgggactacaggcgcccgccaccacgcccggctaatgttttgtatttttggtagagacggggtttcaccgtgttagccaggatggtcttgatctcccgatctcgtgatctgcccacctcgacctcccaaagtgctgggattacaggcgtgagccactgcgcccggcctactttccttttattttttatttcttaattttaaattttaatttatttattttgagacagggtcttgctctgttgctcaggctggagtgcagtggtgcagtttctgctcactgcaacctctgcctcctgggctctaacgatcctcccaagtaggggggaccacaggcatgcaccaccacacctggctaacttttatttatttttaatttttgtagaaacagtctcccatattgcccgggctggtttcaaactcctgggctcaagggatcctcccacctcagcctcccaaagtgctgggaatacaggcgtgagccaccatgcctggcctactttcctttcagaagggacatagagaaataatgttttagagttatgaggctagttctttaggggttcattttattacacagttaagtaaatgcatgttgaatgaattctgtcccaactgaatgccagcagatgggggacccaggcctggctacgcttcatgatgttggtcaagtgatttaaccctctctagtgtcagtttgcttataaaatgaagaggttgaaatctatgattttcatgttttatttaaatagagtaaaagtttgtgaattgtgaaattagattcactcttcttctgttctttctggaacccaaatagattgctggactatgaatgaaaatggtttgatttccagtagttcttattttattttattatttatttatttatgagacagagtttcactcttgtcacccaggctggagtgcagtggggagatctcagctcattgcaacctccgcctcccgggttcaagtgatcctcctgcctcagactcccaagtagctgggattacaggtgcctgccaccacgcctggctaatttttgtatttttagtagagatggggtttcaccgtgttggccagactagtctcaaactcctgacctcaggtgatctgccctccttagcctcccaaagtgctgggattacaggcttgagccaccacgcccagccagatttccagtagttcttattgctgatgaatttttgtattatttccttagtgatggagctggggttttttggccacatgcaacagccccttcctctactcatctcctctctccttcatcccccaaacaaaagctagccttttaagtaccatgttctggaaggtattgaagaactgtggggtcatggaaaaggcttcatgtggactgggattgttgctgttgtgggaagcaagtgctccacttatgacaaaggaattcatttattaattaattttatctagcaatatctgaaattcttctgggtgtttctcattatcagttttacattaagaaagaagacttggatttttttttgttttgttttaaaccatgccaatacagtgaaatgcgtttggttctgagctgcagtagaggggctgtctccagttttgcaccatttgtgatttttaacacttactaccgtctgcctaatattagtgaaaaagttggtgtgtataaatgacattattgaacaaatgttgtttatttcaatttgacaggtgaagattggtgcgttagaaggatatagaggccaaagagtaaaggtgtttggctgggtccacaggctgcgcaggcaaggtaaatggcaaagcttttccttctttttaatgtttaaatatccctgctcttagatgaagaaaaacatacaaagatttgcaggggtttttttctctccccctttttttcttagacacagtctcactttgttgcccaggctggagtgcagtggtgctatctcggctcactgcaacctccgcctctcaggttcaagcaattctcctgcctcagcctcctgagtagctgttatcacaggtacctgccaccacacctggctgatttttgtaattttagtagagacggtgtttcaccatgttggcccgtctgctctggaactcctggcctcaggtgatccactgtcttggcctcccaaagtgctgggattacaggtatgagccgctgcgcccggccctctttttttttttggtatgctggctagacttgaactccccccagccatcctcctgcctcagcctcctgagcagctgggattacaggcacatagcacctcacctggctttaaaggatagagtgatttatatcttaaatttgttcttgtttaaaatgactattgaaagtataaaaatttttaaatgctcttttaatggttagcaattatagtgatgaagatgcgtccagtaaatatttgtcaagttgagttttaattatttagtgaaaatcaagggatgttactataggaggttgacatctgagtctgaaacttggccatagttttgactcttataaacagtatatttgcattctcccttggttctgacattttgtttcctctttccccttttattatatattttataatatataaacatgtcacttttactatttattgtaagggattagcaaatctttcattgaaaagtgggacaggccaggtgcggtggctcacgcctataatcccagtacttcgggaggccaaggcgggtggatcgcctgaggtcaggagttcaagaccagcctggccaacatggtgaaacctcttctctaataaaaatacaaaaattagctgggtgtggttgtgagcacctgtaatcccagctactctagaggctgaggcaggagaagcacttgaacctgggaggcagaggttgcagtgagccgagatcatgccattgcactctagcctgggcgacaaaagtgaaactccatctgaaaaaaaagcgacggtggaggggacaaaaatacaaatgaaatgttttaagcggatttcagtaattggacctttaggacataaataagaaaaagtgattttgttcaagaacatttatgtatcaccgagtgcacagtactaccccaggcattgcaggggactcaagggtagataaggcataatcccttaactcatgttgccttctgtcctgctttcccctggttgtgtggatcttggggatcatgtaggatttgaaagtccaatacattgaaaataaaatattttacaaatactgagtagtggtattaccagtgggtacttcaggggcagggagccatgtgggaggtctgaacttgaatgtttaaccttggagtttcctttagataagattaagtcatggctgggtgcagtggctcacacctgtaatatcagcgctttgggaggctgaggtaggaggattgcttgagcccaggagcttgagaccagtctgggcaactcagtgagacccttgtcactacaaaataattagccaggtgtggtggcatgtgcctgtagtcccagctatctgggagggtaaggtgagaggtttgcttgagcccaggaggtagaggctgcagcgagctgtgattgtgccactgcactctagcctgggtgacgaagtgagaccctatctttaaaattatatatatatataaaatttaatgccttgagaacagtctgcctaaattattatttctcattttttaggaaagaatttaatgtttctggtgttgcgagatggtacaggttatcttcagtgtgtcttggcggatgagttggtaaatattttctcttatttatgcctgaaaattagatgttttcagtagattcctttattgttttgtatacatttatttaaaacatttattatgtcgacagtgaatgtcaatgaatcaaaacatcacattgtataccataaacatgcaatttttatttgtttattataccttaataaggctagagggagaaaacttttgtggaaaatttccagcacattacaaaatagaaccatataaaaaatcatcaaatgcccatcacccagcttctgtaaccacctatatatggctaatcctggtatgatactgcccctcagacatcatatcattttatttaattacacatgcttatgcatctctaagaaaaataatgtggctgggcatggtggctcatgcctgtaatctcggcactttgggaggctgaagtgggcagactgcttgagcccaggagtttgagaccagcctggcaacatggtgaaatcctatctctacaaaaaatacaaaaactagccaggtgtggtggtgcatatctgtagtctcagctactcaggaggctgaggtgggaggatctcttgagccagggaggcagaggttgcagtgagccaagatgatgccaccaccttccagcctgggcaacagagtgaaaccttgtctcaaaaaaaaaaaaaaaaaaagataatagtcacctactattatcacaccctccaccaaattaatacaactactaaatatcatctaatatccagattcttgttatcagttcgtactgcctttttatagttgattgatttgaacgaggattctgacaagactaacatgctgcgtttagtgatatgactttgaaattttctttataactctgctgctctctttgcattctctcttcttttgcaacccgccccctctccccacccattactatgtatttcttgggaaaaccctggtggattgtcctgtggaacttctcacattatggatttggttgtttgcatccttgtggtgtcctttagcatgttcttctagtgtctgcattttttataaattggaggttaggtctgattaggttcagttttttggcacaactacttcatgggcaaagctgtgttcttttagttgcatcacgtcaagaggcatgtaaggtgtggttgtctttttcttttttttatttgagacagagtctcgctctgtcacccatgctggagtgcagtggcgtgatctcagcttagtgcaacctctgcctcccagattcaagtgattctcttgcttcagcctcccgagtagctgggactacaggtgcatgccaccatacccagctaacttttgtatttttagtagagacaggtttttgccatgttggccaggctggtcttgaactcctgacctcaggtgatccacccgcctcggcctccgaaagtgctgggattacaggtgtgagccgccgtgcccggccagttgtcttttttatgactagtgggttcaggtgttggcagcctgacttcttccttttaaagttccccatcagttttttcctaatgactttagtaagaagtgattatagtgtagatgggctctgtatggttttgtttgtttgtttgttgttttgagacacagggtttctcagaaagagtacagtggcatcatcatagctcattgcagcctcgacttcccaggcccaagcaattctcccacctcagcctcccgagtagttaggactataggcaagaaccaccacacccagccaatttttattttatttatctctccctttgttgtccaggctggtcttgaactcctgggctccagtgagcctctcaacttagcctccttcatgggattacaggcatgaaccactgtgcctaacctgtatgttactttaatagtctagatttttaaaaataaataaataaactgtccagatatttttaagtgatgtgggtcagtgtcatttatccatgtatgtaaaatgtgtatttacatgtatatgtatatatttacatgtatatgtctatatatagataaacctctgtcttccacaaaaatatctattttaatattaagaatcagtggccatctcactctttattttactagtatttgatcagataacttgtttgtaaacaatccctttaactttctatatggtagaatttttaaatcaatgtgaataactaaatttgagctttgacctttttatagtgtcagtgctacaatggagttctcttgtccacggagagcagtgttgcagtgtatggaatgctaaatcttaccccaaagggcaagcaggtgagtggattgagtttcgcactgggtgaatgaatagtttatttattggtttgttttccagtgtctttgtttgtacatttggcatatgtattagggttcttcagagggacagaactagtaggatagatgtatatgtgaaagggagtttttaaggagaattggctcacaagatcacaagatgaagtcccacgataggccatctgcaagctgtggagcaaggaagccagtagtggctgagtccaagttcaaaagcctcaaaagtagggaagccgacagggcagccttcagtctgtggccaaaggcccaggagcccctgtcaaagaactggtgtaagtccaagagtccaaaagctgaggaacttggagtctgatgttcaatgacaggaagcatccagcaccggaggaagatgaaggctggaagacctagcaagtctgctcttccaccttcttcctcttgctttttctagccaggctggtagctgattgggtggtgcccacccacattgagggtgggtctgcctctcccagaccactgacttaaatgttaatcttctctggcaacacccagatacacccagaaaatactttgtatccttcattccaatcaggttgactcttaatattaaccatcacagcatataaatacaataaatgtgaagtacatgtcaaattcactatgccttttccagtgaaatatgtacattgtacaactcaggtgataaaaagaatacaatgatttccagccttacggaattcctgaatcatcctcatgggctataatatagccactgtgctgtagatatatgaattacttttcagccagatggaaataaaaacttaacaacccacctaaatatgttcagagaatttcttattagaatttgagcctgtttttattgtttttttttttttttttttttgagacggagtttcgctcttgttgcgcaggctggaatgcagtggtgcgatctccactcaccacaacctctgcctcccaggttcaagcgattctcctgagtagctgggactataggcgtgcgccaccatgcctggctaatattttgtatttttagtagagatggggtttcaccttgttggccaggatggtcttgatttcctgacctcgttatccacccgcctcagtgagccaccgtgcccagacacaaatatcttttaaaaatggaaacgcacaggctgcgcatggtggctcatgcctgtaatcccagcactttgggaggccgaggcgggcggatcacgaggtcaggagatcgagaccagttttgccaacatggtgaaaccccgtctctactaaatatacaaaaattagccagacgtggtggtgggcgcctgtaatcccagctgctcgggaggctgaggtaggagaatcgcttgaacccaggaggcggaggttgctgtgagccaagattgcgtcactgcactccagcctgggcgacagagtgagactccgtctcaaaaaaaaaaaaaaaagatatttgtgtgtatgtgagtgtgtatttatccagaaagaacattggtaaaaatatcaatataaaactaaactaaagctgagaattaggaggttcttaaaaatctcagcttaccaaaactttgacataaattaaaatcctcaatactgttaattttttatttccttttccctctttctctggaccccacttttaaaaaatgcaggctccaggtggccatgagctgagttgtgacttctgggaactaattgggttggcccctgctggaggagctgacaacctgatcaatgaggagtctgacgttgatgtccagctcaacaacagacacatgatgatccgaggagaaaacatgtccaaaatcctaaaagcacgatccatggtcaccaggtgctttagagatcacttctttgatagggggtactatgaagtaagtatgcattcgtcagcttttgcaaagaatatgttttttgccgttttgaaacttgaatagtggtgctcacgatagcattgatttattccttctttgcatttgaacaggttactcctccaacattagtgcaaacacaagtagaaggtggtgccacactcttcaagcttgactattttggggaagaggcatttttgactcaatcctctcagttgtacttggagacctgcctcccagccctgggagatgttttttgtattgctcagtcataccgggcagagcagtccagaacacgaaggcacctggctgagtatgaagttgtctttttgttttatttctttctaggtaatatctttagagaagaaatcttagtgtaggtaaattatgtttatgttttaaaaaaaaccaactgatatattaagtggttaatggaagaacatataacaaagttttgccaccttagatcgtagctaagttctcttttttcactttgacttgatcttttatatataaaggagcaaacaagaaattgctactcagtggagaagaggggagtccacagctaatttgcaaagttgggaattggtagcattgttggcattttatggacagcttcccaatgttaaaagccttgctggataaaaaaccagtgcaggagaaaagcagtgctgagctattgtctcgttcttcaggtacactcacgtggaagctgagtgtcctttcctgacttttgacgacctcctgaaccggttggaggacttggtttgtgatgtggtagatcgaatattgaagtcacctgcagggagcatagtgcatgagctcaacccggtaggtgcagtgtttatggaaagaaaaagtcacagtccttttttggaagacaatgaagtcttcaccctcagtttttgtagatttgatggcttggtgagctgaaataagtgactaattattttgaagactagaatttgatgttagtcactgtcaataattttataatgttttcagttatataacaggctcatgttttccattttaggaatgtctacatagttttctagtctgaagttatatatatatatatatatatatatattttttttttgagacagagtctcactctgtcgccaggctgaagtacagtggcgcgatctctgctcactgcaacctctgcctcccagcttcaagcgattctgcctcagcctcctgagtagctgggactacaggagcccaccaccacccccagctaattgttgtatttttagtagagatggggttttaccgtgttggccaggctggtcccaaactcctgacctcaagtgatctgcccacctcagcctcccaaaatgctgggattacaggcatgagccaccacacctcactgaagtaatactttataatagttttttaatggaaattttagtgttaatgtttatatttatgtatatatacacattatatttttcctttcttctgtagaactttcagccccccaaacggcctttcaaacggatgaactattcagatgctatcgtttggctaaaagaacatgatgtaaagaaagaagatggaactttctatgaatttggagaagtatgtatccctttctctcattgtttccaaggtgggattgggctccaattctcttcttctggttaatgaactagtaacatgggtggcatctgcctgtcctcaaataaatggtaacagcaggacctgcttcttgggttgcctgcagattcgctgagttaacagagtcagccttaggacagtgcctgttctgtaccacccagtaagcgtaagtgagtttctttttttttcttttttttttttttttttgagacggagtctcgctctgtcgcctacggagtgcagtggcatgatctcagatctcggctcactgcaacctccgcctcctggattcaagcgattctcctgcctcagcctcccgagtagctgggactacaggcgcacaccaccatgcccagctaatttttttatttttagtagagacagggtttcaccatgttggccaggatggtctcgatctcttgacctcgtgatctgcccacctcagcctcccaaagtgctgggattataggcgtgagccaccgcttctggccaagtgtgagtttctaagctgccttcatgtctcatgctttgcctcttccctcttccttcattgttcttccttggccacagcttataagctctctttatcattctctaggctggtaggagtgctttagaaggttgtgaagcctttgaaatcacatgcaaaatgttggtatatagatatatatatatatatatattttttttttttttctggagaatgtatcttgtgcttttaaaaagaggttcatcccctcccccaaaacagtgatttaaaacttcttaatgtggaaggcgagaaagaagatagccattggttaaaaatgcaaaaccaagagagaaggtcttggagaaggtagcctagtgccccaggtaaacttagcatttcggttttgcctgagaaccactctcccagcatgcacttgggttgcaaattttctttatttgggacagcatctccatctgtcgtccaggctggaatgcattggtgcgatcatagctggctacaaccttgaactccagagttcaagtgttcctcctacatcagcctccaaaagtgctgggattacaggtgtgagccaccatgcccagctaattttttattatttgtagagatggcgtctccctatgttgcccgggctggtctcaaactccttggctcaagcagtcctcccaccccagctttccaaagtattgggattacaggcgtgagccactgcatctggctcaagtttccaagactatgctaggccctctttcctgtgcatttaaccattacttacataatatttgcacatctaattgttttacagttgaaatgtgtgtagatgctgctaactagttttgggttttagaaggaattaataggtgaaacaatatactgggtctatgtaaagcactcttgtttctgtgaattcagtttggttttttggttttttttttttaaagagatggaggtattgctgtgttgactgggctggtctcaaactcctggcctcgagcagtcctctcacctcggcctcccgagtgttgagattataggcatgagccacactgtgcccagcctatgaattcagtttatgatgtataatgacaaaattttgtattgagaacttgcatacttttagtgttcctaatacttagtaaaatagtgtagttgagtggaaagaacacaagctgtggagtcagaaggccccccaggtgggcttagctcccacctcttttcttttgtgctgtgtaactgaagaccagtgaccccctctcaggttccttatctctaccttggaagtaacatctgttttgcaagattgtggggactaccggagctaaatgcctaggcaggacaatggcagggggagcctgtcagcatttactatacattgctactgttccacacacatgaggacactagagtggatacatgaccctcaggctttggggggtatgaaataagacctgttttcccctaactaaatcttatgcagaaccccgctgtgtaaagcagatgcaagctgagagactagagctctcccactcatctcctgttacctctcggcgtctccgaggacgcaagggctccagagcctggagcttgaaaacaggtgtgctaggtgattgctacctccatttcacttcttcattaaacaaatctatgagtcttctccagttctctcaatccatttttactgggacgagagttgtcagttttaacttctgtgttaactttaatttatgtgtggtatagaaggatgttttgagagagaaactgatgcgcttaagtcatcatctaacattgtttgggtaactattccaggtgtgcttacacttaccagtttgacattggttatttgtcttatgattgtgtctgtcatcgaaggcataactgattgattacaacaggaaagaagggtagataacaggagagtttaaagataagtgtcattagtaatatactctgtgtgtagatcaatgatgttctggagcattcatgattaccgtatgccttacgggactaagtggacctcatttgcttcagagctagacaaaacgggccactgagaaaaatactgagctgtgtctagtcacagcttggggctggcttttgtttttgtttttttttttattttccttcatcaaacagcatggtgcttgagatatgctgtaaagggagacagatcttttatgcttcattaaataactgagttttaagaatatgtttatttctttttgaaagaaattattctttacacaaatgtgtatgggttaagggtaggtgtgtatcctctactctgttgaattgataggaggaaggactggtacagggtgaaggagctgcttctgtcttgttgcgatccaagttgtaaatgttaatgaagtcttgtttgacctcaggatatcccagaagctcctgagagactgatgacagacaccattaatgaaccaatcttgctgtgtcgatttcctgtggagatcaagtccttctacatgcagcgatgtcctgaggattcccgtcttactgaatctgtcagtttctgtttcaaagagtattaataattttgctttttaagggggtggggactgtcatctggaatcaggtacagctcatgccaaatatttcattctctatctagaataacaatatttaaagacgttgggttttttcaccctcccctgattgaagttgacatgctttgttaaattagagaaatgtaaacatttgaatattacatgatcatagtggctcctttagcccttggagcttaattgtaattttcatttaaactctagggcagtgctgtgtctgatcgcttgatagtaattgtgtatcttctttcacttatatttaaaggtcgacgtgttgatgcccaatgttggtgagattgtgggaggctcaatgcgtatctttgatagtgaagaaatactggcaggttataaaagggaagggattgaccccactccctattactggtatacggatcaggtaaaaccaattttttaagtactcaacatttttttccactgtaatcgttctgtatatattgaaatttttaaaaggggagaattcagggtagtactttggtatttgaatgagctatattcagtttgcaggttataatgtggtgtgtgaatattgccagctttgttttggccaagttatatgttaatttcatttgaaaacctgtttaacggccggcttgttgattgcaactgagttttaaaaaattgatcctaccagtatctagtacccttcttcattttcctcttataaatagacattgacttattttaaaagtttttaaaaatctcttctttccagggtagtacttattccctggttgattttttcataccaaattatttctttatgcatggttcatgaaggcatagagattaagtgctgggattacaggcacgagccactgaatctggccatagttgaattcttaaccacagtgagctaactcctttcatggtggaaaattttaactgtcttagatgaaagttttaacttaagtatttactcctctttctttctttctttttttaaacagagaaaatacggtacatgtccccatggaggatatggcttgggcttggaacgattcttaacgtggattctgaataggtatcacatccgagacgtgtgcttataccctcgatttgtccagcgttgcacgccataaccattttctccagaagcgtggaggaaagattatgaaaggaacaggctctttaaaaaagaaaacaaaaagccagaatcttcctttttttgtttcattggggtttctctttctgtttttctttctactaccataaaaactatctcaaatcacctgaacatcaagtgatattaaggttgtcatcttaagaaaaaatatccatttttttcttaagttcgggaaacaaagttcggggaaaatacctggcatgaaactgtagttagggatacatttcagcattttactcactttatccaagttattcattttattcaagttatatgtatgtataattcaacaattttagattatggtgtaagatactccagtaacttatctttctgtccttttaagtgtaccttgaattctttgatttattttattgcatcaatgaattaaaacaaaaatcttgggggaagaaattggcaatatcgtataaaaatctgctcatattagaacacagtataattcagcagtaaacactagaatcaaatgaatagccttttgtatcagttattaatcttttctaactctgcttagctgctaataatcctgaggcatagaaattgaagaatttgtaaaaatagaattgccttaaaggatttgaagtaagaacataattttggggagagttttttagtgattcacagtatccctcttagcattaatttaaggtaaagaggcagattgattttccctctttcctggtaattcctaagtaattaagaataaataagttccaaaagaaattgtagctggaatcttaataacaattgtgagtggctgtttgagttgcccccaccatgtccttagatctaatctgtgctaccttattaactcacagcaggcttactgaatggcttcatttcagatttagttgatttctccaccaaatgcatgtcatgtattctcaataggctgtattcccagcagtcaataaatgaacacccgta

SEQ ID NO: 219 - DNA, 32744 bp, Homo sapiens
  source 1..32744: mol_type = other DNA
cttccgcgtttctggcgcgtggtcttgcatttcctacttggtcctgttcgtggcgccgcgcctccgggtgttggggagtccgggatgatggggaatccggggctcgccctagtcgcggggacaccgccttccaggagctgtccccaggcaaactcacagacatcttcaaagagccttcttggacattctgctttttgctcctcataacaggcttcggtaagagaacaggcaaacatcactgcgggcgcctctagggctcgtttccctgtcccagtaccgggaatcggggaggggtccaagcagagttcacttagttaacaaatcagtgaagcagttggaaaatctcagttatattttaaatgagatcgagggcggtgactcacgcctgtaatctcagcactttgggaggccgaagcggaggtggagggtcgcttgaggccaggagttcgagaccagcctgggcaacgtggtgagccacccccgcccccgcccctctataaaaaatacaagaattagccgggcttattggcatgggattgtggtcccagctacttaggaggctgaggtgggaggtcgcttgagccatggaggtcgaggctgcactgagctgtgatcacgccactgcactccagcctgaggctacggagagagaccctgtctctaattaataaataaattatagatagatgatagatagatgcaataaaaaataaaattggcttgtaaacggcaaactaaaagtggaaattatcattacaatgaaaatattaatttgaggaaccgaaaacttaactttccttttcctgtagttaagtttaagcacttagatttgcttcagtgattcccaggcttcatgattgcaagctgcttgcttgtaagcaccttgtctctcactaaaaaaaattacagttattttaaagtcccgctggatgctcattctttaaggagggtgaacaatggtaactcctgtaccgttagagctctgaatgaagccagatacgttccatagatcacagaactcattttctggcttggtgagcctggtcaagtttcttaacctttctgagccacagatgtttcaattataaagtgataataacccttcactgggaaggttattgtgaggataatatgagatcagctataccaaaatatgcctaacatgtacttgacatccagtaagctttctgaattaggatataaatggcattaatggttaatcattgttattcttttgttccatgatatgcatgaataacaacttgaagccttcaaactgctgagagctgcttggtggacctcgtctctcaatttgcccttcccactaaacctgtcttcccccaacagtgggctttctggtcagcatttcagaatgtctcaaaccgtaggtccttcccacagccccaaatctcagcaaatgaccagtctcttgcttcaagctattaaatggatgctgtctgacagccctcccttgaaacctgcaaactctcgtgctttggcatccatcctttccctctagtgcaatgcaagtcacatcctccctctggctaacctctccacccatcttctggattccccacacctctccaatctaatcttcacactccagccagggcgaacacttacaaatataaacacagtcatttcattctctatctagcaactttccatggacttccttttgctctcagggttcacctcaacatccttacaggctttccaggctgtgtatgctctggcttaccactgcttcttatttttttttttattatttatttatttatttatttattgattgatcattcttgggtgtttctcgcagagggggatttggcagggtcacaggacaatagtggagggaaggtcagcagataaacaagtgaacaaaggtctctggttttcctaggcagaggaccctgcggccttccgcagtgtttgtgtccctgggtacttgagattagggagtggtgatgactcttaacgagcatgctgccttcaagcgtctgtttaacaaagcacatcttgcaccgcccttaatccatttaaccctgagtggacacagcacatgtttcaggagagcacagggttgggggtaaggtcacagatcaacaggatcccaaggcagaagaatttttcttagtacagaacaaaatgaaaagtctcccatgtctacctctttctacacagacacggcaaccatccgatttctcaatcttttccccacctttcccccctttctattccacaaaaccgccattgtcatcatggcccgttctcaatgagctgttgggtacacctcccagacggggtggtggccgggcagaggggctcctcacttcccataggggcggccgggcagaggcgcccctcacctcccagacagggcggctggccgggcggagggctgacccccccacctccctcccggacggggcggctggccgggcagaggggctcctcacttcccagtaggggcggctgggcagaggcgcccctcacctcccggacggggtggctggccgggcagggggctgacccccccacctctctcccggacggggcggctggccgggcggggggctgacccccccacctccctcccggacggggcggctggccgggcagaggagctcctcactttccagtaggggcggccgggcagaggcgcccctcacctcccggatggggtggctggccgggcagggggctgacccccccacctccctcctggacggggtggctgccgggcggagacgctcctcacttcccagacggggtggctgccgggcggaggggctcctcacttcccagacggggtggctgcccggcggaggggctcctcacttctcagacggggcagctgctgggcagaggggctcctcacttctcagacagggcggttgccaggcagagggtctcctcacttctcagacggggcggccgggcagagatgctcctcacatcccggacggggcgacagggcagaggcgctccccacatctcagacgatgggcggccgggcagagacgctcctcacttcctagatgggatggcagccgggcagagacgctcctcactttccagactgggcagccaggcagaggggctcctcacatcccagacgatgggcggccaggcagagacgctcctcgcttcccagacggggtggcggccgggcagaggctgcaatctcggcactttgggaggccaaggcaggctgctgggaggtggaggttgtagcgagccgagatcacgccactgcactccagcctgggcaccattgagcactgagtgaaggagactccgtctgcaatcccggcacctcgggaggccgaggctggcggatcactcgcggtcaggagctggagaccagcccggccaacacagcgaaaccccgtctccacccaaaaaatacgaaaaccagtcaggcgtggcggcgcgcgcctgcaattgcaggcactcggcaggctgaggcaggagaatcaggcagggaggttgcagtgagccgagatagcagcagtacagtccagcttcggctcggcatcagagggagaccgtggaaagaggggagagggagagagagggagagggagagggagagctgcttcttatttttatttattttatttatttattattattatttttttgagacggagttttgctcttgttgcccaggctggagtgcaatggagcgatctcagctcaccgcaacctccgcctcctagcttcaagtgattctcctgcctcagtctcccaagtagctgggactacaggcatgcgccaccgtgcccagcttattttgtatttttagtagagacggggcttctccatgttggtcaggctggtcttgaactctcgacctcaggtgatctgcctgcctcggcttcccaaagtgctgggattacaggcgtgaaccaccacgcccgactattttttatttgttcttttgagacaggggtgatcctcccacctcagcctcaaaagtagctgggacttcaggcacacaccatcacacctggctaatttttttttttttttttttttgtagagacggggtttgggggttttgccttgttgcccaggttggtctcgaactcctgggctcaagggatatgcccaccttaacctctcaaagtgttaggattacaggtgtgagccactgcgcccagccctattgctttttaaaggtacaattaactttagcccaggctagctttttcactgaattgatctgggtacgatgtggggtttgggatagctgttcagaaaggtgaagacagagtcaaagagagaaaaacattttctctatagaggtggggaaactttcagagagaattaattgtgtcctctaaaagcaatgaagtccgcttggttagtttgaagaacgatcatgtatcagtttataggaattgagacttttttttttttttttgagatgaagtctttctctgtcccccaggctggggtgcaatggcatgatctcagctcactgcaccctccacctcccaggttcaagcaattctcctgtctcagcctcccaagtacctgggattacaggcgcctgccaccacgtctggctaatttttgtatttttagtagagatggggtttcaccatgttggacaggctggtcttgaactcctgacctcaagtgatccgcctgcattggtcccacaaagtgctggggttacaggcgtgagccaccatgcccggccggagttgaggctccaaggggtctcggggggtctcagaagctcagctgatgatatcttaatcaggtttgggtttttttttttttctgttagaacaggtcataaaaatactttcaccccaagccacaaaatcctataaaatagctcagtctttgacaaatacagtgaatataaaagagctcttttgagtttctatttactcaagatgtttgcagtgataaaatcttgatataagttttctagaatcttgaactttcaaagctcctttagaaacagtcctttgtgttgtttttattaaactcttcaatgaacacaaagtttttatgttgttcacacaaaatttaaataaggaagctgaaggtaggtgggaacccccaaatggatggtaatagaaaacctcctatagcatttccatagactggtttattcattatgcagcttggctcagcagaaccattttataatgaaactgcaagatgactcccagtgggcaaatcaacctctattctaaaggttgattcttgtcaactgggagaattgattcctgatgagaaatgctagactaaaaaaccctcccacattcacttcacaagccagatccaatatctttaatcctcttatggaaaagaaacaaggagacatttcagggcttacaacagccttccagaataattgcaacagtctcacagcatcaggggccaaaggaatattgacatctttccaactggaaatcctaaaccggttatctggagtgagacaatctatgtcttaaacttggccagagcaccttggattttttttttttttttttttttttttttttttttgacggagtcttgctctgtcccccaggctggagggcagtgatgtgattttggctcactgcaacctccgcctcctgggttcaagcgattctcctgcctcagcctccccgtagctgggactacaggcatgcgccaccatgcctgggtaatatttttgtacttttagtagagacagggtttcaccatgttgatcaggctggtctccaactcctgacctcaaatgatccacccacctcagcctctcagcgtgctgggattacaggcgtgagccaccgcgccaggccagcaccttggattttaaccaccatcctagatcaggaagtttaaatttctctccatgttaaaattttcctttctcatattgttaatacattactatttgattaatacaaattactatttgttaatacaaatacatgctatttgattcaggttttgaagcaaaattcctgataattttaaaactatgagagttatttctttctatgcatcttattgctgaggtcatcttagctgatcattaattggacaatatagtggtaaatccatactggtctttgactctgaaaacattctttcaaattccattggtgctttccactgttttgacacgactttaagatgttatccagactcttctgagcgcaaagaatatgtgtctgcatataaatggcctaacaaaacacaccactctgtctatagccatgaacaggaagtccccatctctgggcactgccagtcacccaagaggacaatgtgaagagctggggttgctgctctagggagaagcttgtgggcttgggcgagtttcagtttgggagtctttgtgacttaagcaggaaaaatattaactcagattactccctttggcctaaaaatcatttctattttttattgtttaatttttgaaatagaaaatgtattcatatggttcaatatttttaaagtatgaaaagataattcaatatttaaaagtctcactcctcataacaactgtagtctctttttttttttttttgagacggagcctcactgtgtcacccaggctggagtgcagtggcgtgatctcggctcactgcaacctctgcctcccgggttcaagtgattctctgcctcagcctcccgagtagctgggattgcaggcatctgccaccacgtccggctaatttttatatttttagtagagacggggtttcaccatgttggccaggctggtctcgaactcctgacctcgtgatccacccgcctcagcctcccaaagtactgggattacaggcgtgagccaccgcgcctgccctactagtctcttttatatctagagattcttgttgaaaatatgactatattcctctaaatctacctcctttattccttcccttaaaacggcctttttttttttttttaggcataaataatatacaacagcctgggcactgtggctcatgcctgtaatcccagcactttggaaggctgaggtgggcagatcgcctaaggtcaggagttcaagaccagcctggccaacacggtaaaaccccatctctactgaaaatacgaaaattagctgggcatggtggcgcatgcctgtaatcctagctactcaggaggctgaggcaggagaatctcttgaacctgggaggcagaggttgcagtgagccaagattgtgcccctgcactccagcctgggcaacagagaccgcatctcaaaaggaaaaaaatatatatgacaaagtgtacacatttaaaatgtgcaatttgatatgttttaacatatgtgtatacctgtgaaaccatcaccacaattggggttagggaaaaaatccatcaccccaaaaagttttcttttttttttttgagacagagtcttgctctgttgcccaggctggagtgcagtggcctgatcttggctcactgcaagctccgcttcccaggttcatgccattctcctgcctcagcctcccgattagctaggactacaggcacccaccaccatgctcggctaattttttgtatttttagtagagacggggtttcatcgtgttagccagatggtctcgatctcctgacctcgtgatccaccggcctcagcctcccaaagtgctaggattacaggcgtgagccaccgcgcctggcctaccaaaaagttttctcatgtatttccctagtgactaatgatgttgagcatcttctcatgtgcatttttgctttacctgtatcttctctgttgaagtatctgttcagatcttttgtgaggacaaggtacggggttccaggtagggatccaagttcattttttcgcatgtggatatcaaatgtcccggcaccatttattgagatggccatcctttctctacctcatcgcttttgtaaccttgttcaatatcagttgtccattgatgtatggatttatttatggactctattaggttccattgatctatctgccctctttaagccaatactatgctgttttgattgctatagctttataacaattttctcttttttggccctaatttcacatttattttatttttaaaattttgacttttattatagactaaagggtatatgtgcagctttgttgcatgggtaaatcgcatgactctgaggcttgaggtcccagcgatcctgtcccccaggcagtcagcatagtacttaactagtcgttcttcagcccatgctggtaacaactttcaaaatcaagtagtgttcttcctccaactttgtttttcttctgcagagttattttggctattttaggtcctttgcatttccagatgaattttagaatcagcttatcaatttttaccaaaaaaagaatctcatgggatttcaattggaattgcattgactctacacatcaatttaattgcctcctcttgtttcttttttatatgaaaggttgtccccatacacacagttctgcacctggctcttcacactccacaatgaatggagatctttcattcttctcccttagctcccattatagtttcattgtatccttttgttgggatggaacttatttcatttaactgtagtgaaactgatggattgctagcttactgctgatattttgctattacaaacagtgctgcagtataatcactgtacgtgtcatttcccttgtgggcaaatatatctgcaggatgaatttgagaagtgtgattgccaggtcaaagggaatatacatttaacattttactggcaagggccaggtgcggtggctcacgcctgtaatcccagcattttgggaggctgaggcgagcggatcacaaggtcaggagattgagaccatcctggctaacacggtgaaaccccatctctactaaaaaaatatacaaaaaattagccgagtgtggtggcacccgcctgtagtcccagctactcgggaggctgaggcaggagaatagcttgaacctggggggcagaggttgcagtgagctgagactgcgccactgcactccagcctaggtgacagagctaaactccatctcaaaaaaaaaaaattaatggttatggctaaatcctttcctagagtttcataatttatatacttttcattaatacattagaaggcttgttttgccatagccttaacagtgcattaccaaactttcttgtttttgccaaattaataggtgaagatggcctatcaaaatcattttgattttcacttctttatttcaggtaagtttaaacattgtttcatgtgttgaagagccatttgtatttctttcttttttttttttttttttttgagatggagtctcgctctgttgcctgggctggagtgtagtggcgcaatctcagctcactgcaagctccgccttccgggttcacgcgattctcctgcctcagcctcccgagtagctgggactacaggcacccgccaccacaccttgacagggtttcaccgtgttagccaggatggtctcgatttcctgacctcgtgatccgcctgcctcagcctcccaaagtgctgggattacaggcgtgagccaccgcgcccagctgtatttctttttttgagacagagtctggctctgtttcccaggctggagtgcagtggtgcaatctcaaatcactgcaacctccgcctcctaggttcaagtgattctcctgcctcagcctccctcgtagctggcactatagttatacacccagctaatttttgtatttttaatggagacagggtttcaccatgttggcctggctggtctcaaactcctggcctcaagtgatacgcccaccctggccttccaaagtgctgggattacagggatgagccaccgcaccccgccccattgtatttccttttttctgactttttgttttcacaaccttggctgctatggtctgaaggtttgtgcccccttaaaattcatatgctgaaatcctaacctccaaggtgatactaggaggtggagacattcagaggtgattaaatcaggagggattatgtctttataaaatagtcctgaaggagcttgttggccccttccaccacgtaaagacacagtcagaaggcaccatttgtgaaccagaaagcatttcctcagtaggcaccaaatctgtcagccccttgacctaagagttcctagcttctgccagaactgtgagaaaaaatttctgttgcttatataaaccacgcagtttgtggtattttgtcatagcagcctgaactaagactcgcacactttttctccattttgccatctttgcttataccttttttctttttcttttttttttttttgccataatggaggttttaaaaatatttatgcatttgaaattactagcctttcctttgaggctttagatttttagtcttaattagaaagtctttccccactccagtatttgaatttcctcgtgattttcttcaaatactttgatgagtttttttttcttttacattgaaatctcttcattatttggagcctattctactacagtgcatgatatctaatttgtttccctgttgtctcaacaccagtccatctttccccccacccacctttgatgccactttatatagtaaatgttcacgtgtttgaggctatttctggatttttctgttctgttccatggaatgtctgtgtaatcatgcatcagaaccacactactgaaactgtttttcaaattataatatggcgtaatatctggtaggagtggtctcacctcattgcttagttttctgacattaatttttccatatgaactttagaatcagcccattacaggaaactgtttgcatttttatgaggattatatgccatttttaagttattgtaggaagaatcaaccctttctagtgtgatttttttttctttttttctttgagacagagtctcactttgtcacccaggctggagtgcagtgatgcaatctcagtttaccacaacctctgcctcctggattcaaatgattctcctgcctcagcctcccgagtagctgggatgacaggtgcatgccaccacgcatggctaatttttgtatttttagtagagatggggtttcaccatgttggccagtctagtctccaactcctgacctccggtgatccgcctgcctcagcctcccatagtgctgggattacaggattacacggtggtgcccggcctcagttttgacgactttccctgatgactaatgatgttgagcatctgttcatatgcttattgaccatttatatcttttttttttttttagatggagtttctctcttattttccaggctgcagtacagtggcgtgatctcggctcactgcaacctccacctcccaggttcaagcgattctcctgtcttagcctcacgagtagccgggattacaggcacatgcccccattcccagctaatttttgtatttttagtagtgacggggtttcatcatattggtcaggctggtctcaaactcctgacctcaggtgatccgcctcggcctcccaaagtgttgggattacaggcgtgagccacccactgtatctcttgttcggaggaatatctaatcaagaaaatcatttttactgtttttattttttggtttgttcgtttttttcctgtgagatggagtttcactcttgttgcccatcctggtgtacaatggcgcgatctcggctcacttcaacctccgcctcccagtgcgtccggaattggtgggttcttggtctcactgacttcaagaatgaagctgcgcaccctcacggtgagtgttacagttcttaaaggcggcgtgtccggagtttgttccttctgatgttcagatgcgttcggagtttcttccttctggtgggttcatggtctcgctggcttcaggagtgaagctgcagaccttcgtggtgagtgttacagctgttaaggtggcgcgtctggagttgttcgttccttccggtgggttcgtggtctcgctagcttcaggagtgaagcttcagaccttcacggtgagtgttacagccgttaaggtggcgcgtgtggagttgttcgttccttccggtgggttcgtggtctcgctagcttcaggagtgaagcttcagaccttcacggtgagtgttacagccgttaaggtggcgcgtgtggagttgttcgttccttccggtgggttcgtggtctcgctagcttcaggagtgaagcttcagaccttcacggtgagtgttacagccgttaaggtggcgcgtgtggagttgttcgttccttccggtgggttcgtggtctcgctagcttcaggagtgaagcttcagaccttcacggtgagtgttacagccgttaaggtggcgcgtctgcagttgttcgttccttccggtgggttcgtggtctcgctagcttcaggagtgaagcttcagaccttcacggtgagtgttacagccgtgaaggtggcgcgtgtggagttgttcgttccttctggtgggttcgtggtctcgctagcttcaggagtgaagcttcagaccttcacggtgagtgttacagccgttaacgtggcgcgtctggagttgttcgttccttctggtgggtttgtggtctcgctagcttcaggagtgaagcttcagaccttcacggtgagtgttacagctcatagaggcagtgtggacccaaagagtgagcagtgacaagatttattgcaaagatgaaagaacaaagctcccacagtgtggaaggggaccccagtggattgcctccgctggctcgggcagcctgcttttattctcttatctggccccacccacatcctgctgattggtccattttacagagagctgattggtccattttacagagagctgattggtctgttttgacagggtgctgattggtgcgtttacaatccctgagctagacacaaaagttctccacatccccactagattagctagatacagagcgtctacacaaaggttctccaagtccccaccagagtagctagatatagagtgtcgattggtgcattcacaaaccctgagctagacacagggtgctgattggtgtgtttacaaaccttaagctagatacagggtgccgattggtgtatttacaatccgttagctagacataaaggttctccaagtccccaccagagtagccagatagagtgtggattggtgcattcacaaaccctgagctagacacagggtgctgattggtgtgtttacaaaccttgagctagatacagagcgctgattggtgtatttacaatcccttagctagacataaaggttctccaagtccccactagactcaggagcccagctggcttcacccagtggatcctgcaccagggccgcaggtggagctgcctgccagtcccgcaccctgcacctgcactcctcagcccttgggtggtcgatgggactgggcgctgtggagcagggggtggtgctggtcagggaggcttgggcctcgcaggagcccaccgtgtgggggaggctcaggcatggcaggctgcaggtcccgagccctgccccgcggggaggcagctaaggcccagggagaagtcaagcatagcagctgctggcccaggtgctaagcccctcactgcccgggctggcggggcccactggctgctggagcgtggggcccgcggacacccacgcctacccagaactcacgctggcccgcaagcaccgcgtgcagcccgggttcccgaccacgcctctccctccacaccttcccgcaagctgagggagccggctccggccttggccagcccagaaaggggctcccacagtgcagcggtgggctgaagggctcctcaagcaccgccagagtaggcgccaaggccgaggaggcgccgagagcgatcgagggctgtgagggctgccagcacgctgtcacctctcaccgggttcaagcgattctcctgcctcagcctccccagtagctggaattacagacgtgcgccaccacactccgctaatttttatttttagtagagacggatttctccatgttggtcaggctggtcttgaactcccggcctcaggtgatctgcccgcctgggcctcccaaagtgctgggattacaggtatgagccactgcacccagcctttactgtattttttagcagaaagaaaatgattgcattacagtggttatttttaagggccccaacctccactttgtcctgagatctacgttgtgttgttttcagtgttttaacaggcctttttatttttataaatgccccagaagttgtagcgcagccctaactttctagcaggacttttagaagctgacaattttcctaagtttcattcacatcacatgaaggcagcaattgttaaaatatatttagattccattagggtacattttgctatcacattgaagtctctcaagaatcattttattcccatcagatgttgttactgagcagtttctagtgctgaacatgactaagaacctttaggtggtgctctttgattaaaaacatttatccctcaaacaacttaaatacagtagtatattgcaggaaaaagtgacctttatttttttagggatgatctcccaggtctgctcaatttttctgccatttctattgcagaggctaataatttgcccatctcctcccagcccaagcaccccaagactgatacttttctatcacctgctgctaattttgcctcccaaagagtctcccatctcgacgcagagagaaccttcttagtggggtcacagcttcccttgcgtccaagagctgtctgtcccacagcctggtcagactcccacagcctcgtcagactcccacagcctcaaaccccaggtttgccactcacttcctcactcactcctctttgctcatttttctgccaacgattcgtcatgtatttctaggactatctgctcacttctcaccccttactttttttgttttgttttttgagacggagtctcgctgtcacccaggctggagtgcagtgtcacaatctcagcccgctgcaacctccacctcccaggttcaagtgattctcctgcctcagcttcccaagtagctaggattacaggtgtgcaccaccatgcctggctgcttttttttattcttagtagagatggggtttcaccatgttggccatgctggtctcgaactcctaacctcaggtgacccaccaccttggcctcccaaagtgctgggattacaggtacaagccaccgtgcccagccccagtccttacttttggttgagggttacctttcctttcattctggctaaagagttgaggtcagttggaaaaacccagactcaatcttccttttttttttttttttttttggagagagtctcactccattgcccaggctggagaacagtagcacaatcatggctcactgcaacctctgcttcctgggttccagcaattctcctgcctcagctgccagagtagctgggattacaggtgtgcaccacctcacccggctaatttttgtatttttagtagagacggggtttcgccatgttggccagactggtctcaaactcctggcctcaagtgacccgcccacctcagcctcctaaagtgctgggattataggcatgagccaccatgcctggctgatctccctaactctaaatctttacccctctgtctctaaagtctggccacctttttaattcttttagagacagagtcttgctctcacccaggcttcagtacagtggcataatcgtagctcactgcagcctcaaactcctgggctcaagtgatcctcccacctaagcctcccaagcagcagggactacaggcacatgccactacactgagatgtttttttttgaaaagacagagtcttgctatgttgcccaggctggtctcaaactcctggcctcaagtgattctcctgcctcagccttccaaagtactgggattacaggcgtgagccacagtgcccggtcctgatcaccttttctccatcaccttttccctaacacttagtttccctttctccatcacttcttccctaacacttagtttccctgtccccgactttctcactactaaaggacccctacattcctctagaaaccttgtgggactagattcttctgtcacataccctattcttaaaaataacaacaacaacaaaagccaatttaaatactttagaagatcatacttttcaaagattttactaaatcatttttttaaacaaaatatacattaaatctcagatttacagaatatagaaataatttatccaaagaaatttgcatttaaaattgttaatattgcacccaacagtatgtctttgacacatttgcattgtcaatctttcccacaatttgcaaaaacaggagagaaatctgaaactaacagaattacacaagctaagttttctgtaaaaaaagaaaaaacttacaattttttatttacaagttaaggaaaagttgtaaacgttcaggattttacttccacagaataaaaagccatacattcttttatcatacctagaaaatgaacatatacacattgtgattacctcataggaattcaacaggactgatattgtgaacattcacagcccaatggtaaaaaacagaattctcgaactatggaaactagtgtgtgaaagacacagaatgagaaaaatgtctggaaaaaaattactttctcctctttgaggagtttccataattacctaaagttatcttcaaatttaaaaggacacaccattccccagtcttaggaatgtggctgccaataaccttttctctcgacataagacaagtgaaaaagagtgaggtctttgttcaagtccctgataaaatactttgcatataggcaggcacaaaagtttgctttccaaaagaaagctttgcaaaatattctgcaatttattactgatatcctcagtttttaaaaaccccctttttaagcccataaatatttatatgctttaaaaaatgagagtagggaatcaaatcatttggtactatgggaagctgctaaaataatatttgatagtaaaagtatgtaatgtgctatctcacctagtagtaaactaaaaataaactgaaactttatggaatctgaagttattttccttgattaaatagaattaataaaccaatatgaggaaacatgaaaccatgcaatctactatcaactttgaaaaagtgattgaacgaaccacttagctttcagatgatgaacactgataagtcatttgtcattactataaattttaaaatctgttaataagatggcctatagggaggaaaaaggggcctctgggaaattatgctgaagatcaccgaaaggaaaatgtaactgtaattttataatacaataccatttgaactgaaatacaacatgctttgtaattctattgccctggattgagactggattaaaacgttccctttcaaccataatgtacataaccagttgaataataggacttttattattattaaaaaattttttttgagctggtgtctcactctgttgctcaggttggagtgcagtgccacgatctcggctcactggaacctccacctcccaggttcaagcgatttccagctaatttttgtatttttagtagagatggggtttcaccatgttggccgggctggtctcctgacctcaagtgatccacctgccttggcctcccaaagtgctaggatgacaggcatgagccaccatgcccggcctatttttaaatttttcttaagacagagtcttgctctgtcacccaggctggagtgcagtggcgcaatctcggctcactgtaacctccatctcccaggttcaagcgattcttctgcttcagcttctcaaataggtgggattacgggtgcccaccaccaagcccggctaatttttaatttatggtagagacagggtttcaccatgttggctgggctggtctcgaactcctggcctcaggtgatctcccctcctcagcctcctaaagtgctgggattacagacctgagccaccacgcccggccgaataataggacttttaaaagtcctatttcttggctctgctattgtttaatagtccaacccaaggagtttgttataaagattatttattgtcttcaatatctttgtgatgaatgcaattcacacacacacacaaagtcctgagagtctttcataaaaaaatagacgtgctttgtggccgcatcccagcctgggggtaagggatcagctgtccccggtgcgcctgtactccgcggtgccatccgccacgatggcatcaagcggcgagcgcttcttgcggatgctgcgcccggaggagatgaggtccgcgtagccccgctggtgcgagaaggcgtaggccgagcgccgcgttgacacgccccggcggaacacctgctgccgtcgctgccactgctcctccgccttcaaccgcttgcgatgcttctggatctgcaagggggagagatggggagggatgaaaataagatccacaccagggaggaggcctggccagacggttgacagaaatgaacactgatgaactcccctgacacctgccccattttgatgcaggcagttctgtccccacttgtgtgtgtgtgtgtgtgtgtgtgtgtgtgtgtgtatgtgtgtctatatctttttttttgtttttgagacagtctcgctctgtcacccagacttgagtgcaatggcacgatcttggctcactgcaacctctgcctcccaggttcaagcgatcctcctgcctcagcctcctgagtaactggggttacaggcacgcactgccacacccgtctaatttttgtatttttagtggagacagaatttcaccatgttggccaggctggtcctgacctcaagtgatctgcctgcctcggcctccaaaagttctgggattacaggcatgaaccacagtgcttggctatatctatctatctatctatctatctatctatatcgacatatatatatgatgatataaatctatatccatctctctatatctatacatagattgattgatcaatcgatctacctacctacctacctggagatatatattgaagccaagggaaggttatttaacttttccaaggtcacacagctagaaaatgcaaagccaagattcccactcctctgaagctagtgcccttttctagttcagaccagatgggtacagtcaaagagaaaattcagtagggcctctttcctgggttgttactgcatactgttggcactgcaaaagggagacccgagggatactgaaggttgcctcagtagcctctactctctccttctttctaatggaaattgattgtattcagattgccccccccaacccctcacagccacatttctcatgggcggtgggcaggttgatttcccttgctaaactagtccagaatgggcaagtgacctaattttggcacgtgagacctgagggcactgtactggggcccttgggtgagaagttccacggcccctaaggagctacagaataggctcttatctccccccgacactgataggtcaggaagtgatacccagaactgctctggccatcttccagcatccatatgaagctaataatgaaggtttctgagagaagagatggcaagaaccagcccaatcctttcttgacaacattaaattgctcaatcaactgggcctgaagcctactaatgattaatgatgacgcactactgtagagatgttttgagtcacagctttctgttccttgtagctcaaaggatcctgctacagaaggtgacatttttcttaaataaagaaaaaaaacccaatctgatttgtatgacaaaatgttaatactgtaattgttaaactgaggagatagatatatggggctcattctgttctcccttttttgtttatgtttggtaatttttgtattaaaaagcaagcacactaaactcccaattccaaaagacttatttgtgagatagagttaaagagaagcaatcatgaaaaatcattcttaccaaacttcccatgagcttagaattttgcaggaaacgtgctgttgggaaacgctttggtttctgtgagggacagagttgggaaaggactatattctttataccttatcactttctgatggccagatggtcattgacaggaatcgaatggcaacgacgggtagtaagcacacagcaacagccaggatgatagttaaccaaatgtatggctgtctcagagcgtttgaagctgtgcctgtaaagaacatggcaaatgcatcactgtggttcttttttcctaagaacatagttaatatttcgccaggtgtggtggctcatgcctgtaatcctaacactttgagaggccaaggtgggtggattgccagagctcaggagttcgagaccagcctgggcaacatggtgaaaccccgtctctactaaaatacaaaaaatcagccgggcatggtggtgtgcacctgtagtcccagctactcaggagacagcagaattgcttgaacccggaaggcggaagttgcagtgagccgaaattgtgccaccgcactccagcctgggtgataaagcaaaactctgtctcaaaaataaaaaataaaataaaaaaaagaacatagttaatatttcataatctataaatagatcatttatggtaaagttttacaactggattggcctccccaaaatatccattatggctcaaagaacagacattttaaaatcagactaagcaaagcaaaattgggaaggtaaattatttgaaacaaggcaaatttacataagtgagcaaataaggaaaaaaagcacatttgttgacattgcattgattaaaaatgcaaagttaggtgatcaagacttctgacttttttttgagatagggtctcactctgttacccacgttggagtgcagtggcgtgatcatggctcactgcagcctcaacctcctgggctcaggtgtcctcctaccttagcctcctgaatagctgggactacaggtgtgcgccaccacgcttggctaatttttgtattttttgtagagatggggtttcaccatgttgcccaggctggtctcaaactcctgagctcaagtgatccacccatattggcctcccaaagtgctgggattacaggcgtgagctaccacatctagccccagtattaggttttatgggaaagaaagaataggcttttatccagccttttaagtcttaagttatctaattcaacacacgtacagcgctattgtaaagctattttaatttgtcttcctcccatcatgttatgccctttcaacccaccatcaccatttaatttccagacaagacattaattttcactagcaataataatttgtatatatttgttttgttgtgctttgttttttttgttttttttttgagacagggtcccgctctgtcacctgggctagagtacagcagtgccatcacgactcactgtagcctcaacgtcccaggtcaagcaatcctcccacttcagcctctccagtagctagaactacaggcatgtgccaccatgcctggctaatttttttgtattttttgtagagatggggtttagccatgttgtccaggctggtcttgaactgctgggctcaagcaatccacttgcctcggcctcccaaaatgctgggattacaggtgtgagccactgtgcccagccattccaccttgtatattttattacttaacagaagttatgtcaaaatctaaactaatgacatttgtctgtacatttatttttggaatttggaaataccaacctgtaaattgaaatgcagatggaaagagaacatgtattccagcactatgaaagtcaaacatgatgccaaaataaagtgcaatgcttccaaaaattgaaaaagcattcacaaaagtccaataagaagtatccaagccaatctgttgggaaaccagagaaaaacagagcactcattttggggagttagcaagaaataaaggatctaacaatcctgaaaacagaattcagcaagttaggcatgatgtggcttgaatactggaccagaaactaaaccatccttgactcaggcaagaaatagaaaatgtgcttggtataagagatgaaaatagcatttatattttgtaagtggcacaggtgcagtgggagtcaggtggatgtgcatgccaccctatatacagaaatataagtaggtaccaatagacactgaatacggccaatgaaagccacgtacctggaaattgactgttattacaagagcagaggcaatggtgacggcaaaagactggtagtcggaaggtgcctctccatcctgccctacggtttgcagataagctccaagaggtatgaagaagaggatcatcgatgttaggaccccatgcaacaagcttacaaagaatctcttatagttgaatagtaagtctctttgtcccactatgtataacccagggaatcggaggctcagtttgtcactcacatccttaaggagaaaacaaaatgatggtattttattcatcaggtcaaagcagtcagagatatgttataattaatatctcacaaaaagttgcagcctgctgttaaattttaggaaggcaaaaactgaacaagataatcgatcaatcctgcaatatttgtggtgtgcagagctcaacctcattgcttagaccaccattacttaatatttaattcagagaagggctaggtataagtttattactttgctacttatggaaagaaaacaaattagtaatgtccaaaaatatgtagggaggctactgtttttacctcctgagtgaatatatattgttgcaaatcctttgggaaaaaattttctcatacaagttgatgagttaattataaattattactttttagtctttatagtgcttctttctttttaagaattggtattagataaaaatatgcactagctacataaattttggaaaggatttaaactgactttaaaatgagtaaattattattgtggagacatattggactctcgggtgcctttttttccttttcttttctttttttttttttttttttggagacagggtctcactttgttgcccagcccggagtgcagtggcacaaacacaactcactgcagcttcaaccttccaggctcaagcgatcctcccacctcatcctgccaagtagctgggacttcacaggtgtgcactaccatgcccacaatttttaaatttttctgtagagatggggtctccctatgttgccagggctggtctcaaactcctgacctgaagcaatttgcctgcctcagcctcctaaagtgctgggattacaggcatgatccaccatgccctgccttcaggtatcttcatagtaagctcttactgtctaaaaggaacataacaaatatgtgtgccaatgaattcaacccagtcacagaaatcctcttttctctttttttttttttttttttttgtcttagagatggggtctcactttattgcccaggctagacttgaacacctgggctcaagtcatactcctgcatcagcctcccgagtagctgggactacagagaaatcctctttccttattacaaaacaagaagcacagccatgacccttgatgcctgacaacagaattataatagggtttgatcagaaagaagtaaacaccagaagaatgcattgaaacgtttgcttgggacttctctaacgcattctcatctgtccagaagtgtccctgcttgtgcgaggctcctacctggtcgagcagccccatgaggagcacgggcaggctggtgtacagcacgttgtagagggtgatgaaccaatcctcgtatgcagtctgtgaggggatgacagaggctccatgtcaccaacaaagacacatgccagcctagttagcacatactcatctgcttcctttatttaacattttgtttgtttgtttgttttaatagagatgggggtcttgctatgttgcctaggctggcctcgaactcctggccttaagcgatctccccatctcagcctcccaaagtgttgggattataggcaaaactctatgcacctggcctgttatcaatattctttttttttttcttctgagacagagtctcactctgtcgcccaggctggagtacagtggcgtgatcttggctcactgtaccttctgcctcccaggttcaagtgattcttctgcctcagcctcccaagtagctgggattacaggcacacgccaccatgtctggctaatttttgtgtattttgttgagacggggtttcaccatgttggccaggttggtctccaactcttgacctcaggtgacccgcccacctcggcctcccaaagtgctgggattataggcgtgagccactgcacccagccctgttatcgctactcttaatgtcaacatgaaaaaataaccaaagataaagataaaaacatacaagcaaatcccctcctttttttttttttttttgagacaaagtcttgcccaggttggagtgcaatagcgcagtctcggctcaccacaacctctgcctcccaggttcaagcgattctcctgcctcagcctcccgagtagctgggattacaggtgcctgccaccacacccggaaaatttttgtatttttagtagagaccaggtttcaccatgtcggccagactgatctcaaactcccgacttcaggcgatccacctgcctcagcctcccaaagtgctgggattacaggcgtgagccaccatgcctggccaaatcccctcctttctaaggtaaaatgtttttacagcaccagaaacatttagagaagtcatgatcattcttaattatgccccaactgtaaggagacacagccccaaaactacaaatatagaagaaataaattgtcttttcagaactagatttttattcatttaagagctctacttagtaaataacaataataacaacattacattacctgcgcagagtagccattgaagaaggagtaccagaaatgaaccaaagtaaaggcaaagtttttgtaaaagaagtatcgtaggaacttgcacatccttatgtaagaccatcggccatgcaccagcagtagcctctgcagatatcggaactgagcaaaggaatagtcactcgacatgacagcttgcattccttcttgtccacttattccaacgccaatgtgggcagctatggggcagagggagaaaacactgtggatcataaaccgattgtgaggcaaaacatcagttgataaaaatggttccatagcaaacaaaaaacaaagacagacattgatggaacaataatacagaagctcttgctcaccatccctcacccccagctcttgaactcaactcaaagtctgagttacaagttgctaaacagagcacacagtagggcctccataaatatctgggaaaggatctcatgtgggtgacgaattccatttggattatctgccaagatcacagccatcccttccatccacagggtgagccccaggcacccatgtgtacactgtgtccttgcctctttggcaacagctgtgtcagtcatgggcagatatgtaatttgtggtagatactacaaatcggctcccccaacttcattccatccttgttctaattagagaggtgggaaaggaaataaaaaccctacatttcccagactcccttgcagctaggctctttgtgaattaggttccactgtttagatccacttatgacttggaagcagaagtgaatcagagcccagcatcgcttcctcttttgggatttctgcagcagagctcatatctactttccagctacctggatgttgacaggcaactataaaggcttcttaatttggaagctctttagaggaacctcttatcacttaccagaagagtagaagctcttctggtaagtgacccagcctagaccctgcttctgtagaccatccagagcttttgaaagtacctagtcccctgtatgaatcttttcttgcttaaataccaactggggtctgtttcctgtgctaaaccctgactgacagaaaacccaagctgagccagtctctctcttgatattctggaattagaagtcagttattttgtgtctagaattttaaggtctaaattcttgaggtaagaaatagttatatttctttctctctcttttttttttttttttgagatgaagtctcactctgtcacccaggctgcagtgcaatggcgcagtcttggctcactgcaacctctgcctcctgggttcaagcgatactcttgcctcagcctctcgagtagctgggattacagatgtgcgccaccacacccagctaatttttgtagagacggggtttcaccatgttgtccaggcaggccttgaactcctgaactcaggtgatccacctgccttggcctcccaaagtgctaggattacacacatgaacaactgtgcctggccgaaatagatatatttcttcctgaagatttctaaggggcagagaaataaagtagtggggagagaggggtggggaggagggagagaatggagggagagaatggggggagagaagagtggggagagaagagtggggagagaagggagggaggggagagagagaaggaggggaagaaggaggaaagggagagagaaggggagagagacagacagacacggggttcctggtgcaaatctatgtccttgttccagtatcttcctgaggcctggcttcttcttggacaacaggaggtgtttaaataaatttacttttttcttttttttcttttaagttacaggatacctgtgcagaacgtgcaggtttgttacatgggtatacgtgtgccatggtggtttgctgcacctattgacccatcctctaggttccctcccctcgtctcccactcctcaaatttaattttttcttaagctagctttggttgttctccaatacttgtaatcaaaagagttttaaccaagaaactattaaactttcaaagtcttattcatggccctctgggaccttaagacattttttttttctttacgggggaaggtttccagaatatataaaattaaagtcacaattttatttatgcttccaatagtcataaataacactttcaaattagagaatgattagttttgtctgggtcttaaaagtaacgaatgtgaagatagacaagatcatttagaaaagatatgttggagaacacaacctatcattgctcagaccctgaaaagtggctgcaatgctgcggcgttccaactaaaaagaagcttcaaaaatcctgccctagttacagaacacaaggtctggcaaattcaaaacataactgtagtgatgtatccaaacctacgttttcagtaacacttctaaaaaaacagaacaaactgcatctcatataatatttatgttctctttgaaaacacacaaatatttcctatgaccagcatggttgccaaacttgctctttcctgccaaaccatggccttttctttcctgaacaagccactgaggaaaatgctgagattctcttggcttatgtggctgaggaagaggaagccctgccccaggccctggtatccagtcctcaaccttcccgctgagcagaccaaggacaaatgtgaaatgaacactgtcatagttcccagggcaaccaaaagcactgaacagatacactataaggtaacattggtcttttttgtaaaatttaagtacaggcatttagagtttcctgaaatctcaaatgcggtgttaggtgcctcactggtagacattcttttatcattccttaacaaaaagaatatttcctcgctacagcaataatccctcttgcctttttttttttgagatggagtctttttctgtcgcccaggctggagtgcagtggtgcgatcttggctcaatgcaacctctgcctcctgggttccagtgactctcctgcctcaggctcccgagtggctgggattacaggtgcccgccacccccatgcccggctaatttttgtacttttagtggagatggggtttcatcatgttggccaggctggtctcgaactcccaacctcaggtgatctgcctgccttggcctcccaaagtgctgggattacaggcatgagccaccatgccccaccttgcctttatctctctcctgcttcacgtacattctcagggtctaagaccaagaagagacaacatccacccagctggtatgagatatcttcaggtaggatagagggagaaggcagcctatgatagtccttggatccttgctaggggcagaaacatggtgggtcatgattccttcacttcttccagactacactgctaaacgtgaatgttagcaaatgctcagattattttttgacacttgaataatttcactcgactactttatgaccaacaatttctttgtgtgtgtgtgtgtgtgtgtgtgtgtgtgtgtgtgtgtgttcttttttgttgttggagaaagggtcttgctctgtcacccagggtggagtgcagtggcacaaacatggctcactgtagtctcaacttctcaggctcaagtaatccttccgtctcagcctcccacgtagctgggactaccggtgtgtgccccatacttggctaaactttctgtatattgttattgatgtggttggaagaaatgacagcttttacaaagtacataaaggcactaatactacttgtataacttctaaggagacccctaaagtttcctatatttttatcccaaagggatgctctataacttatatataaaagtacctggggccaggtgaggtggctcatgcctgtaatcctagcactttgggagactgaggcaggcagactgattgagcccaggagttcaagaccagcctgagcaacatggcaaattcccaactctacaaaaaatacaaaaattagctgggcatggtggctcatgcctgtagtcccagctacttgggaggctgaggtgggaggattgtttgaggccaggaggtggaggttgcagtaagccaaggtcatgccactgcaccccagcctgggccacagagggagaccttgttttttttttaaatgcacctggcatataacagtgcttaataaaaattttaagacaacttaagaaaaacaagcccctctaagattatctacattgactttgtgcaatccctctcattatgtattggtgaactcagaggaacaaaatgtttcaagtctaagtcacataatcagttgataaatctccaaagcaaacccgtcccctcccattatctagaaggctactttataactgaataaaaatcatgtttgacttgtccttttggcacggctagttacgttaaaggtacgtaatggaaaataaactagagctggctggctatggaggaaagagatagatctaactccgagcaagcaataccattcgcatggtagggcaagcacatgcaaaaaaaaaaaaaaaaacagtgtggatgaattaaactgctagtgaccacagacatacgcactgataaagaaggcaagatgacatacgtcatacagctgactcctgttgaggaagataaagttggaatattcttagtatacatcaaggaggaggaggagactaagaaaagaaagagacagactcatgagtcacaaaatagactgaaaagtctagttatatataatgcatttaagcaacccagcatcacaggaacatgcaattacctatgtacagtcaggtaatacttcagctcagtgataataatacgacagagctggaggtgacattagggattattttcttttccgatgagaaaactgaaacctgagcataagcccaaggtgacaccggattttggcaataggatgaggatgaatatccaggtcattagtttgagtatttttaatacaagatactcccttatagtgacagagggaggaaaaaggaacagaattcagacatagagatgagggctgtgggtgtgcttctgcaggctttaataccagcacaactgtatttctgcatggcaggactcaatattttaattgtgtggacttaaattctagcatccagaaaaaggcagccttctagggaggtgaggaggatgatgagagcacgtggaagcttttcttcagtgctaaacatgttactctaaactcacaccaggtgacccaatgatgaagttcccacagatttaccaaaggtaggaagaaagtcccagaaagaaatgcttagatgaaggagaatgatattgtcaaagcaagcaccagccagagttcaataatttatgtcttacaaaacttattaaatatcagggttttttgttttgttttgtttttttgagatggagtctcactctgtcgtccaggctggagtgcagtggcacgatctcagctcactgtaacctccgcctcctgggttcaagtgattttcctgcctcagcctcccgagtagctgggattacaggtgtgcaccaccacacctggctaatttttgtatttttaatagagacggggtttcagcatcttgatcaggctggtctcgaactcctgaccttgtgatccacctgcctcggcttcccaaaatgctgggattataggcgtgagccactgtgcccagccaatatcagggcttttaataaacccaaaatatgggaagagaaccagtaagagagaaaaaaatacacaacatctatataaaagaataaaaatataaggataaatttccccccatagaccttattttcctcttcgcatccttcagaagccctgtcagtgatactctttcctcctgatgggctgtgggctttctgggggtagggtcacaggcgttgtcatggttaagtgactttatgaaacatctgctctatgaaaacctaagctgtaaaatctaaaaaaagaaaatccaccccctacacattccagccatttctcctctctagcacgttgggcctcactggccgtgggtgcatgactcacttttgatcatgttcacgtcattggccccatctccgatggccagcgtgatggctttcttgtacctcttcaccaggtccaccaccatggccttctgcttgggggtgacgcggcagcagatgactgcgctgcactcgcaggccaggtccacaaagtttttctgccgctgctctttcttagcttctagcctccttttactttgggtccgcatccgtctttcttcttctgttcttgggaacttcagcttcagaatcttatttctcttggtctttttctcgagaagaatttcattctgtgaaatcagagagggaaaaggttacattcactttagttttaccccaggagtaccattcccaagatttaaattatgtgaaggataatttttggattatgtcactgattatatttgacaaataaatttgattttataaccaaaacatgtatatatatgtgtgcgtgtgtatgtatatacacacgcacacatatatgtatgtgtgtatgtatatacacacacacacacacacacatatatatatatatatattttttttttttttttttttgagatggagtctcactctgttgccaggctggaatgcagtggcacgatctcggctcactgtaacctctgccttccaggttcaagcaatttccctgcctcagcctcccgagtagccgggactacaggtgtgcaccaccacgcctggctaattattttttttgtattttagtagagacggggtttcaccatattggccaggatggtctccatctcctgaccttgtgatctgcccgccttggcctcccaaagtgctgggagcacaggcgtgagccactgtgctcagctatatatatatttttcaatggagatggggtcttgctgtatagcctgggttgaagtgcagtggctattcattcacaagtgtgatcattgcatgctgcagcctcgaacacctaagctcaaaccaccctcctgcttcaacctccagaggagctgggactacaggcgcatgccaccacatccagcttataaaatatatatgcaacaaaaatttagaaaatctaacaatctataaagaagaaaatgaaaaaacccattaattagtaaaccaagataaccacttttacctctttggtatacatcctttcatatatcatatattattaagtctcaaacttggaaaaaccacactttcatgtataggctaagagacttttaggttggcagttaacatgtgaaagcatctaaaagtggctccaaatgaacttctttcttttgagttaaaggcacagatacactaatgatacgtaccaaccaagaaccagtgatgattaaggcacggtttccaccgggtggaaaaaaagattcctgcacaggaggtgcaaactttgcgtagacgccacctctattcctctggttttccatccttgcatgaagaagagaactaggggaaaccaaatttcagtgtttaaagtgtaagaccctaaataggcccttgactctgagataactttgacttaaaaaaaattgtgacaaaaaaacaaagtttaccatcttacctatttttgtttctttattttattttcattataatttttttgagagagggtctcactctgtcacccaggctggagagcagtggcatgatcatggatcactgcagccttgacctcccagcctcaagtgattctcctgcctcagcctcctgagttgctgggactataggcacacgctatcacgcctggctaatttttgtattttttgtagcaatagggttttgccatatcccgggctttgaccatttttaagtgtacaacttagtagtgttaactatagtcacattgttatccaaccaatctctagaactttttcatc

SEQ ID NO: 220 - DNA, 18980 bp, Homo sapiens
  source 1..18980: mol_type = other DNA
cgctgggccggtgggcgggggccggcaggtgctccgcagccgtctgtgccacccagagccggcgggccgctaggtccccggagaccctgctatggtgcgtgcgggcgccgtgggggctcatctccccgcgtccggcttggatatcttcggggacctgaagaagatgaacaagcgccaggtgacggaggagggtggtgagcgcgccgtggccgggaccgcctgtgctagcggggagtcggggcttcccagtcagggctccggctcccagtgaatgcggccgggcggccacccgaagctcccgcgctgggctctcaggccctgggttctacgcctacgtgtgggcatgggtgtgcacttccttgccctgacaagagcacaattaggggagggtgcaggaaaggggagaatagaaaccccgtgccatggaatgtcaaatgtggttgagaatgccacagccacgcttgtgggagagatgactcggtgaacgacagctctctgagcgtatttgaagggccacccggtgaagagggaaccgatttctctgtggggcttcagaggcctgactgccggcaggtggaagaggcagaaaggcaggcgagagggaagaactttcctacaacgggagctgtccagcgatgcctcccaaagcagtttcttcccagcctgggcagttgtttttcccctgaccgtgggtcgggactaaataatgctccttgtgcctagagagctcacaagctgtgcgcaatcattgtggactcaaccagtgttcccagcgagattccagaagccttctctaacttctgagatggctgcactctgaatataggaggcagtgtagggtctttgggcagctggggtggttgaattccctctcctttgtgagaggacctcagaggaaaacgttcctcttgctctctttttagccacttattggccatcatcactgtctttggggccttatctcttcactataaggttaagagtgagtagggattggaaaggaagccctctcagtcaggaaaaatacgactatgtaggcttctaggtagagaatttgggggacctgtaggacctgaatatcacggtggatactaatgccactattgctactaataaattgtgctaagaaaaatgggaccttccaaccagggagttttgattgtctttgaaaatggtattaatcctcattattttgatggcatccagtttcatttgctccatcatgttgagatgtggggtggtgcccatgggaggtcacagcttactcctttaggcatacgtgtttttcccctctcactctcctcccccttccccaagtagaatttcagactagtgcagtagtgtgggaaagtttgataatttctatttcatcaaccgtgtttaggatgtggtagtgtctaggtgtgcaaagctgatgactcctgtttctggaagatgagttgtagtagagattatcaccagcttaaaaaagtaactgctaatgtcctgagcattgatgctgttcacaagaatatcctccaggaagcagagctttgtttaaaaatctagacttaatggctgggtttttaaagtgtctctaaaattggtactgattactgatggctataattgcagactgtcagaaaaggccctctgatgagtgtattgatccctaaaccagtttgccctttgaaagatcagtgtgtttttgctctcagcgataaggcctgccagtagctggctgtattgcctgttttgctagtcttctaattaaaattcagcaagctcaaatctactgcttcttggtactttttaaaaaagctttgtctttttttttttttctcttcttccctccaaaatagcatcttatgacactttgtcaggcctgcatgctccaccagtcttgaaagcaggaccttctttctctgctgcccctgcttactattaaagcaggacccacatgcaacacaagggctctttgtttctgcagtgaggaagagaggaagaaatacagctactggcagtgctgctgctgtcagccagaatatttgatctgaaatgtttgcttaaaactcttagacattggctgtttcatcattggttgacaatgactgagtatggacttagttctacactctgctgtgagcattaagtgctgagcatacaaagttggtaggcaaaggtgaacaacaacaaaagcacctgtgaaacatggtggtggttttttttttccagaccgcagtcagcttgtcagtagttcaatcaaaattacttttctggattccaggattttatgcctagaatctgattcgtaggtttcttaaagttaaggtgttaaaagtgtgatctgtggtttcttagtttgatttttatatttttgtgtatttggacatttccttagcaggtagatggcttgctcaaaggaagtttttttgaggaattgattttgctttcccttaatgaacttttcaagcatgggaaattatactggaaaatatattcttggtacaagttctttactggctaagtggcaagattttatcggggtggagccagatgacttgaaaacttgtctgaaaacggcaatcgttgtttaaaaccatggtttggggctttcctcatcagatctgtaattcataatgaaacagcggttatttatcaaatcctttaagtcaggcagagccggtggggaggtttttgaatgtaaattccagtgaacagcttctgctttagagtgacgtgacttgtaaggctgattttactttagaagcagtgttttgttgttgttgttggaatctcaatatttattgaatgaagacatgaatgttttatctcttctaacggctcacttctttgcattcttaagtatttgctttgtgatctttgattttttccgttatgctctttgagcttatggtgaaatggtgtaaaggctttgattgtttcatggcaactttctggtaaatattcttcatttgatgagggataaaagactacatattgggtacagtgtacactgctccggtgacagctgcactaaaatcttagaaatcaccactaaagaacttaatccatggaaccagaagaagcaatggtttaacatattatagcccaacactttgtcaatgtctgcttagcactccagtttcctttttcactctcctgggaatatagtgatagtttcataatttgctattgacacagtagccaagtcgcttttaaaaatggtgtgtaggctgagtgcagtggctcacgcttgtaatcctagcactttgggaggccgaggcgggcagatcatttgaggtcaggagttcaaaaccagcctggccaacatggtgaagccccgtctctactaaaaatataaaaattagccgggtgtggtggtgcacacctgttatcccagctactcggcaggctgaggcaggagaatcacttgagccaaggaggcggaggttgtagtgagcagagatcgcgccattgcactccagtttgggcaacagagtgagactccatttcaaaaaaaaaaaaaaaaaaaaaaagtgtgtaactttaatgttgaattatatttattttcctattttgatttattgcaccaaaatacattaacaattatcttaattcatttatgtcctcactttcagttgtatccttcattattgcctcaaattacctatttttacagttttaacattagcaagagacagttctgagctctgcttttcctacatcagtcagagtttgttttcagaatagagaatagtttaaagaagaaaagtcaatgactcataatttcactatcctaaaatagcctctcttagcgtcttggggcatctctttgtatttgttttatcgtttggtgagatcctactgcagcttacatttttcactcaacatactgtgtttggtcatgtcattaaagttcctttttattttcctcccccaacccaacccgctttctcctccactcccattaagttctttatgcattgttttaaatagtggagtaatctgccattttcttttttttttttttgagatggagtcttgctctgtcacccaggctggagtgcagtggtgcaatctcggctcattgcaacctccgcctcccgggttcaagcgattcttgtgcctcagcctcccgagtagctgggattacaggcacatgcaccaccatgcctggctaatttttgcatctttagtagagatcgggtttcaccatgttggccaggctggtcttgaactcctgagctcaggttatccgcccacctcggcctctcaaagtgctgggattacaggcatgagccacactgcacctggccccactttctactcagttatttccatattgttgctcatttatttccttttccacattattagaattaagactgtaataaatgtcttcgggccataattctcaacctgcctttagtttatactgaattcctagaagtaggattatgggccaagagtaacctcttaatactaatgccaaatagctttcagaatggtttatcaatttgtatccccatcacagtgtattcttgctagcactaagtattagtattaacaacaacaataaaaaaaccagacactttaaatttcttaggcaaaggctaggtgtggtggcttacgcctatagtcccagcactttgggaggattgcttgaggctagtatgttcaagaccagcctgagcaacataaaaagaccccatttctaccaaagaaaaaaatttagaactacccaggcatgccagcacatgcctgtagtccagccacttgggaggctgaggtgggaggatccattgagcccaggagtttgaggctgtggtgagctatggttgcaccactgcactctagcctaggccacagactgaaaccttgtatcttaaaaaaaaaaaaaaaaaaaaaaagttgctagaaacaaaaaaaaaggaaggggttgcaaggagggtagaggcaggattattggtttgaacattttttatgtttatttactacttgtattttcctttggaaaattatagttttaagcttttacctttttctgttggaattttagtgtttttcttattgctgatttgtttgcactcaccattaaagatgtttattttatcactatttattcaacaaattgaatacttaacttttgccaaacccatgttgaatcttgaggatacagctatgagcaaggctgaaatgatccctacttttgtggaatgtaaggtctaatgcaaaagacacattaggtaattatatgcttaattatgatgctgatgaacgatacaaagaaatacaggatgcagtgagaatatataataggaagacctaggctggccagagtggagattggcaaaccccattgcaccacctgtttttgtaaagttttattggcacacggccatgctctttcttttacatattgtctatggctgctttcccgctacattggcagggctgagtagtttcaatgagactatgtgacccgtaaacataaaatatttactgtctagccctttacacaaaaatttgctgatttctggtctagccagtcagggcagggttctgttggacactgacatttaaaggtggatgtaaaggtgagtgtttggtaaactaaggggttcagggagggagccttctgggtaaaggccctggggtggaaagaagcatgtgaggtggaagcatggacagataccaccagtgcagctggggtgaggcgagcttcacaggctgaagcggggctgcagggttatatcagacagggccttagaggccatattgtagtttagtcttcatcctcagagtagtgggatgcaatcaaagggctttaggcagggcatagacaaccaggtgaccagatgtgcatttgaaaaccagtacagtcaagcaccatataatgatgtttccatcaatggtggactgcatacatgatggtggtcccaaaaaattataccatatttttactgtgccttttctatgtttagttacataaatacttaccagtgtgttacagtcgcctgcagtattcagtacagtagcatgctgcacaggtttctagcctaggagcaataggctacatcgtatagcttaggggtatagtaagcgacaccatctgggtttgtataagtacactctatgatgttcaaacaacaataaaatcacctaacaacgcatttttcagaatgtgtctgtcatgaagtggcgcatgaccgcccagagtgtatcacagagaatggatcagaagaggtgtgcatgggcattaggagacctgtcatgaggcttcacagcagcctgatgggccccgttggtgatatgatgagagtggcagcagtgggaatagagagacctggacaaactccagacgtgtttggaaagccagaatgtatagaatgaatgggtagggggtggctccaaacagcagggtgataataatgtcatttactgagagaaggatccctaatactgaaagcttttggagaaggtaagtttaattttgacatgttgaggatggggtatctttaaagacatctaagtggaaacatcaggtaggcagttggaagtctctgaattgggagtagttagcctgatgggaccaatgccagcattcaggtagaggaggagattcaggtagaggaggagcaactggcaggaagacaagaaagtggtgagaagtggatggcatgccatcctggaaggcaggggctgagggttcgaagaaatgatcatgtgtgttgagagctgctggaaggtcaggtaaggtgagggccgacagttatcctttggatttagtgagcatgtgactgactatgtaggttgaggactgaatatagatggtgaagaaggggagcaacttggggtagacactgttttgagaagagctgtgaaggagaagagagtgtgaaagctggaggaggatgtgaggtggaggaagggtttgcgatgggagagtctttagctgatgggaggaggaggtatagagccgtgattcaactttcactgcacctcagaatcaccccacccctcccagtgatccagctggtctgggatggactttccagggcttccccgatgattctgaggtgcagccaaggttgagaaccaatggtatagagcagtggttctcagctgtgattcccactccagcagctttcgtgtcacctgggaatgtgtctgaagtgcagtcctcaggcatcgccagctgatcctagtgcacgctgatgcttgcgctgctgctgtaaagaactgtccggacactgagaagtcagaaccacgtagaaccacctggcaaagtctccatttggacttcccgagtgtctttcactccgacttttccaggccttgtgtattttaaactgtatttaaactgtgtttaaaactgtattttaagttgtactcaatgctcaaaaagagttcataccaccacattccatctcagttaatattaaatttggatagttgaggaaaatgatgttgcccagagccacgtgatccaggtcctcactccaaactcaattcaaaagtatgttctggaaagctggtagggagctaaggtgggatctaacctgtctaacatcactgcctccaaaacactaaaactatattaatagcaaggagagtttagaagttatcagttactccaggatacgcccgggaaaaggaaacaagatcagccaaatactagaagctggaaaacagatggaagaatgggaactggcacagccagagaaagccaggatgtgagcggcactgggggaggctgtggctcttcaggtttgtgaggcagagagagtcctcagagacccaggaattggtgtccccagaactgaaggtgaaggggaccgtagggctgaaatcagtttgattgggtagaaaagcagagaagcagtgagacccctcgctctccttgtcttccacccagaggcctcaccctcctcagcagaggtctgggagttcattccctggagaggggaacagaaatctctggaggaaaagctgccaggcctggtgggggttatggctcccaccctataagtgactgtgcacactgcatgctgagggtataaaaacagaagtgaggggtgaaggacctcagatgtacacagaacacggtcctcaggtgtacacagaagtgagcacagatgccaggagaataggcacctgtggcccggtggaagggggtcattgaagcagagacccacgtggggatagagccattttggttctagggtgtgttgctgagagtgagtggtcccagtggagggaagatctttggagatgtggatgggggcccaggaattgagacagcacagtgttgatggaccacccacctggctctgcagatcaccccaacaactgcaggattgtgaagaggaagattgaggcaggtaccaaagtaaggagcctccctggagggcggtgctggcaatgccgtgaggggctttgattttgagtggtgctagccacagcagcgttagtccctcttgcgcctggaaggaaggcggatgtttgggctgacaggtcagctccagcctgacaaggtgttggcacatgggcaggtgttgttttctcctttagtcaccaggagttggcaggtgcagcaggcagctgtcagcaaggaagagcctgtgcttcagcccatgccatgctgcagggagcgaggcaagcccagtgggtctaaacgcagtggtctgaggtagatcgggtgggctttcacctccttctcagagctgatgtaactagtgcttatgcatcaactcgtgtgaccctcccacctgtgctccttttttttttttgagacggagtctcgctgtgtcgcccaggctggagtgcagtcgtgcagtcacggctcactgcaagctctgcctcccgggttcacgccattctcctgcctccggctcccaagtagctgggactacaggcgcccaccgccacgcccggctaattttcttttgtattttttagtagagacggggtttcaccggtagccagaatggtcttgatctcctaaccttgtgatccacccgcctcggcctcccaaagtgctgggattacaggcgtgagccactgtgcccagccccacctgtgctcttaaccaaatatttgttatttaccttttaaaacatttatgaaaaatttaaacctccaggtgtttagagtttctgttcactggttttaaaatgtcatttttagaacaggatggcctcattgccaagcactataggactccaaagcttccatttgaggctaaaggtagttctaggtgaatccacagtgtgtggatctgggttagacctgtgctccccatgctgcgctgtgtctgggactggtctgcatcgggaggctctggtggcaggccttgagtagtggaactctctagggtataaggtgctgggaaatcccaaagaggtgattagggcctccttgaggctttaacaagacaaacctcacagattgctctttttttcctcccttctctctcacttaaggagagatgatatttgcaagtctctttccagggacagaagttgaaatactgcagaattttgtaccttgtgttagtttcctgtcctaaaatcatgtctttgaaaaagtttgataactgcatctccagcttcacaggttggtggatcttctgctattggttttcatcgtggtttcctctttttcattccagctctattaccaggttttaaacttcgccatgatcgtgtcttctgcactcatgatatggaaaggcttgatcgtgctcacaggcagtgagagccccatcgtggtggtgctgaggtaggtcccccaggctggcctccagcctccaacctccatcacaaggctgccttgggcctgaggagcggggcagccttaagtgaaaacctgcgtgacagctaaaattcaagattttaattggataaattattagtctttattgatatctattttgaaaatgtttcgttttttttctggcttttgaaaaatctcatctttcttagtagacattttagagctttaaccatgttgatgctcgtgtacctaatccatttcaaatgacaatttaataatatgtggtattcctgcattatttctatacaaattgatttttaaacataactaaaaatgttacttcattttctttgtaccaaacaggcagagagagcctgtatccccagtgcgtagcattgtgtctagtatttttttcaagcttcttcagtaatactcgtgtattgatggctactatcttcttgagactatgatgcttataaaagtacagcatgtttattttagaaaagttaacattagagttaacttcacacagccataaagccatccaaggggaaaaacttaacatcaatttgaaatcaaatggccgtgtttgggaactgataggtgcttcaagacgctgtcggtccagtgtgtcttaggtcatcaaatctgttgttttcaaggtggcatggtaggctgtggcagtaactcgggcggagtcacagcctaccagtgcaggagttgaggctagaacacagggctcttagctcccaaaccagtgccctttccctccaccaggcgttgccaccacctcgtggggccatagccatgatccatgcctcaccaggccgccctcatgtggttggccaaggggcacacttctagagatcgcgttttcatgaatttagaagcctgaggacagcctagctcacagcagagctgtgggacctccgacccactcgtgttcacactgtgctttggggacgcccctggggttggggtgggtagattaggagtggggagaagggaagcacactcatggattcaggaagccttagccttgcttcacatgcaacagcaccaccttcatgtcttttatgtggttatacttcctggtaagatttcatgtgaaggaaggattttaaggcttttttttttttaaagaagaagaaatttaaaacctcaaatttagatggaccctctcccttaacagataagaaacctgaggcccaatgaggccaagcctcaagcatctcccagtaacttttggcagagccaacattagatctgagatttcctggccctcctcaaatctcacagacacacttgcacacagaaggtagtgtgaaattgctgcacttagggacttttttttttttaaagcatcctttgtaatgttaaagcaatttggtttgtcaacataaaccaatgacatccctaagggatgtgtggtttttgggggaatctggcccatgaggaaagcaagtagacattgatattagtgaaacattgaaaagaactcctctcctgataggacatgataatgacccttgatgtccaacttcaggacacctgtggcctctgcagtctgtgcagggatcttttcctagctgcagttcccttaaccgttacttttctatcaacatcttcccactgtatcttcaggaattttgttgaaggagtaaggatgaagccacagatgaaattatcttaagcattttagctttttttttttttttaacactgaaacaattatgttttatttcagagaagacaaaatagaatttcatattgtggggaggaaaaactcaattgttttgactgtgatgttttctcttaagtcagttgtatttctagcccttttcccccatcattcagattggctgattttgaatgcttcatccatgtccatacttagtggcactggtttcacttaaacgtaaacctatcagaaggtacttagtgacaggctgcatttctccctgccaccttctgcacctgctgagatgttcaaggtgggccaggctggaggggaaggagggccagcttcccgaactcctgttgggaggcatggttttctttgtttccactagagcaccacggagcttcagtggttcattctcctcaggttcttcctgctcagcagccattactcatccttggttgcacagcccccgtcaagctgtatttctaggtcttattttctcacgtattaaaacaaagcatgagcaaatacatataatgaatttttaaaatttcagcttccagcatatcgcaatttactttgaatccgccaaagattttggcacaggtttaaatcggtatcatgtggaattatttattgacttccacaataacccagtcaatgtttgttagaattgggcttttgtagaatatggtggaaaagatgctggtgcaggaggcaaaagacttgggttccggttttgtcccagccctcagtttggcatcagggcgggtcctgctccccaagtgcatccatgtgttcctcatttcttaagtaagtattgcagtatcctaagtgctggaggcctgctctaaagtgaagggattgccctagatgattaactagctgtcagcctgcagttctggaggaaaacactactatatttgtagatgcaggactttttttaaagctaaaaattggtagcttttacttcagagttgacaattatcctggtttcttttctacctgatacaaactgcagagggtcctgtcagtgctcatgacatgttaatctcagtagaagtcatttcctttcgcacatgttaccaccttgagcagttaagaaggaagccacattggctcgttttatagctcctgagacctacttgactattgagtttcacctctgacatgtctattctgatcgccttttggacacagggtaatgctgatactgactttgtgcttctttccagtggcagtatggagccggcctttcacagaggagacctcctgttcctcacaaatttccgggaagacccaatcagagctggtgaaatagttgtttttaaagttgaaggacgagacattccaatagttcacagagtaatcaaagttcatgaaaagtaaagaggctttatttccttttggttttgttatgtaaatttttggtagattcatggctaattagaaactagtaaaagcactggattatgttctgagttctgccattgactcactgggtgactttggaccaaatgcttaactctttctgtaggatgggagttgtagtagttaaacccatagtaactcacaaagtgattatgagaattaaatgaactaatgtttactaaagcaattcataaacttaaattgctgcacaaatataaggtatgatgtattatgacatgttagttatttgaaggagctcaaagaaaatcaagtcacattgcaacagaggatggttttgatatgaaaattattttctgaaatgcaaaaaaagctagctgtttttctatgttacttgggccaaagtggcattttcagcagtaatattagtcctggatggataaaaattcattttccaactcatctcatgatttggccgttgcatattctgcattacttttccaccgccccatcccctactccccaaacagccttgctgttaataccagctgtgacttacttatgaagacccttttctggaaccggaaacatttacttcttgctcaaatatataaagttgccatgagagagtacttcacatgattagtaaaaatgttacatttcatatacttggttattcatttacctttatgcagcttagtgtggatttttatctgtgtgagtcatagaattaaatttaggtatgcataggtatgtttttaaataatggagcatttctcactgtgtatgtgtgtgtgtgtgtttgagtttgagagagagcggtaactacttgtacatatctggtattagattcccattccattcactgcttctttttttgagatggagtctcacgctgtcacctacgctggagtgccatggtgcgatctctgctcactgcaacttccgcctcccgggttcaagcgattcttctgccccagcctctcgagtagctgggactacaagcatgcaccatcatgcctggctaatttttttttttttttttgaggctctgtctcctaggctggagtgcaatggcatgatctcagctcactgcagcctccacctcctgggttcaagcaattctcctccctcagcctctcaagtagctggaattacaggcatgtgccaccacacccggctaatttttgtatttttagtagagatggggtttcaccatgttggccaggctgatctcgaactcctgacctcaggtgatccatccgccttggcctcccaaagtgctaggattacaggtgtgagcaactgtgcccggcccatttactgcttcttcacaggtgtaccccacagatattgatacttattcacttcacattactctaaacatgagaacaatccagtttcaacctgtggtgatacactggtcctgtactaacggttacttgatgcctacctgttagattcctgaggaagaagcatcctcagtcatgatgtgacagtactcgcactgacttacaattaatttctaaagatgatcaattgttccaagttgaggaagtgttgattatttgctctaatttgcatgaattatgagagactgtcaggatttttatcccgatttcctttataaccgtggctgcaaatcagcttgctctttttgatatggtttcaaatctttgggggcttttggcattttatctcattataatagtgcattcttttttcatctgtcttactgaaagaagaccctctttacagctccataatactacaatattatgtttctagagtcaaggctatctgagtaccagtttagaatgcttaaaatgagtcccacatgtctctttaacacactggtgttatgccatttgtgattcttgtttccttgcaaatttgactttatactaccgtggtcagtggtgaaggaaataatgcagtaacaaattctgcatttggcaaggaaaaggaaatctgaggacagcctagagcacacttggatttaaattactttgtgctcaaatctgtgtgatctaggatcaagtttatgtctagagtgaagaggaatagcatccatgttaacaaattggtctatgaggctgggcgcggtggcttatgcctgtaatcccagcactttgggaggccaaggcgggtggatcacttgaggtcaggagttctagaccagcctggccaacgtggtgaaaccccatctctactaaaaatacaaaaattacctcggtgtggtggctgacacctgtaatcccagctactcagagacggaggcaggataatcgcttgaacctgggaggcagaggttgcagtgagctgagatcgcaccaaggcactccagcttgggtgacagagcaagactccatctcaaacaaacaaacaaataaataaacaaaaaaccaaattgttccatgaggcctaagaatgaaaacagttcaagtccaacacaggttgttaaaccagcttcatgacctgacttctgacctattctgacttgaggtgaatgaagtgagtctggaaaagctccttgtcagcagcgtttttgtgtgttatgaatctggacttgaaagaattgcacagaggtgattcacatgattttgcccactgatgaatgacactaatacacttgtttacaggttaaaaaatgtcaggtcctagtttattcgtcattcccagaagccatgtggtaagaaggaattcttcattgtgtgctgtgctggaagcaaattgttgcccttgtgcttggtcatgctttttgttgtcaaggatacttgagtgttttggaatttaagtctacaaaactgtcattagatttgtgcttcagttgaatggttgtcttaagcagtcatcttagactaaaggaaggtcaggttatctttgactgtttttctaaatgctcctgtctgacagtaaagtcttgagtaaactaatatttttgttaatgatgctgtgctgaaaataatttttgagaagacattattttgctttccagagataatggagacatcaaatttctgactaaaggagataataatgaagttgatgatagaggcttgtacaaagaaggccagaactggctggaaaagaaggacgtggtgggaagagcaagagggtgaggattcacctttaagttatatagaaggttatgaaaaacacttagaaatgaagaaattaaatcaataggctaatgagtcgttaattacaaatatgacatatcaggagagttttaagcagttctagtttatcctgtgaagactaaatacaacttagaaattcctaaagacctaaaatctaaaactgaacccaattatattatctatatgatgggttcaaatctgtttcaaaataaatccagccaggcgcagtggctcacacctgtaatcccagcacctttgggaggctgaggcaggaggatcacttgagcccaggagttccagaccagcctgagtaacatagggataccccatctctattaataaaaattttaaaaaatttgttctaaaaaaagaagaaatataaatcctcactgagagattagttatttgtggattttaaataaccattacaagaaagtctcccagagataaccactgtttaacatttcagggaatgctgtaggtactctctgggctggtacagatgtgtgttatgcatatatataattttacttagaatttgattatttttcacccaacaggaagttggaaatagcttttcgtgtcaaatctacatctgtatctttttaagtggctacaagctgttttattgcgaataattatttatttaaccaatccccttttggtggacacttagattatttcctgtttttcgcaactaaaaacatttctgtgatacatcttttagtattcatctttgtatagttgtccagcaatgagttctgcttctgattgacataacagagaatgtatcctcattaaaaaccaaacaagggaattcttcccctctcttggcaaccctttttatgtttaacagccattagaaatgtttttttatcttacctaaatctcactagctttttaaggctggagagactggctcccattttgtcaggtttagcgttattagtcagattgtggcttacagcttcttcctcctcctttaaccatttttctttgttgcattttcacttgaacatctccggggggaccaggagggcttccagttagtccatcctgtctttccagacactctggtgaaaggctttggataagagagaggatggaactactgatttataaaagactggagggtacctatgggtgtgttaccttgtttcccatgagcagagatgattgagacctgggtccatctgattacatattgctgttgattttgtgagcataatcgttggctggtttatgcactgaacctccttgctctgggatcataatcatatttgagtataagttatggtattcacatttgtatttgctacccaatacatttatttgttatatctgacaagcactgggaaatgaaaataattatttgcattacaaactcattattcatgtactttgaaagctttatctaacagcagtttttatatgggctatctgaatcttatcttctaaataaaaactagatttgtgaaagttgcctattctttttgtacaagcggcttaactattttaattgtagcaagtgaagacaaccagcatcactatctcaacccaagtgcctacttagaaaacttgtcctggctgccagtgctgatgctccttactaataaagctgtttgagacagggctgaatacatccttacagccctggtcagtggcattccctcgtacaattcatttcttaagactgatctatagtgttttcagatgttgccatcatcatgttataagcagcttttatatctcttgctttttatcccacaatttaggtttttaccatatgttggtatggtcaccataataatgaatgactatccaaaattcaaggtaggaatttatgtgtgtctatatttatttacttcgttaaatattggagcttttacttctgcaactgtaaacaggcagtcttcttaaaacatgttgccattaataggcctgcagaatatctgtagttaactacaaattaatgtagtcatttaaagcagcaacacttaaattatttaaaatagctactttccccttgtatgttcagtgttctaaaatggcatttatctaattgttgctttttattatggaaattttcatacacacacaaaagtagtaccataaaccagtaatgcttacctctcaacttcaacaaaaatggtatctctctctctctctaaatatatacacatatatgtatatatatacacacacatatatgtatacatatgtgtatatatatatattttttggacggaatctggctctgttgctcaggctggagtgcagtggcacaatttcggctcaccacaacctccgcctcccaggttcaggtgattctcctgcctcagcctccctagtggctgggattacaggtgcccgccaccacacccagctcatttctgtatttttagtagagacggggttttgccatgttgcacagcctggtctcgaactcctgacctcaggtgatctgcccgccttggcttcccaaagtgctgggattacaggcgtgtatccatattttttaaaaaaatcacttgacaaacaatgggaaacctgcgtaggagtaagcactgcatttgctgtgtttgttcattttctgatctttagtccatcagtatatttttgggtttttgaccataatgtagcattgaacagctcatttagagaacaagccatggggggaagaggtaatcttttgattctgtcctcagcgcagtatttaacggacttcatctgaatacatttacagaccaaatttctttgtagacctcacagtgattttccattgtgttttctttccagtatgctcttttggctgtaatgggtgcatatgtgttactaaaacgtgaatcctaaaatgagaagcagttcctgggaccagattgaaatgaattctgttgaaaaagagaaaaactaatatatttgagatgttccattttctgtataaaagggaacagtgtggagatgtttttgtcttgtccaaataaaagattcaccagtaaagatgg

SEQ ID NO: 221 - DNA, 10458 bp, Homo sapiens
  source 1..10458: mol_type = other DNA
gggggtttcccaggtgactttgcgaaggcatggcggggacactgtgaatgtcagcccagaaggtgatcagagcctgttaattaaaatggaaagaagacagaagggaaggtagacatcaggttctccctggagacttttcgttttcatttacgctgcggaaactgacgtttttgcctaacaccccatgtaatgtaaacgtataggcttgagtacgtgtccggccgcatgtgtagtgaaccctaaagctttcctaattgtagttagcatcgtccctaagcggaacgattttccgtgaacatgatttgtacttttctacgagccgtacagtatacggagaagctgcacaggtcctcggcaaagcgattgcttttgccatacatcgtgcttaacaaagcgtgcttgaagactgagcccagtttgagatgtgggcttcaatatcaaaagaaaacgctgcgacctagatgtattcttggagtcacccagaaaaccatctggacgcagggaccgagcccccgaaaagcaaaggaggatggcagcaaacaagtgtctgtgcacaggagtcagagagggggaaccgccgtcccaacatcacaaaaaggtaaaaaggagtactttaatgattgggctttcaacagacatgacaagagctgccaatgcccttttataccaagttcactgctaaaggtgaaaaagcaattcacatgaatttttaaaaaccgtttaaacataatttagaactagaacatatagatctacagttttcttcacagattggaactcagatgtgaaagttgatcttgaatttgatataactttttttcattatgtttgggaaatttttctcaagttatattggctctgttacatataataaagagtaattggataggataaaaagagagagagagagattattgactcataactggtagggaaaactttcacatgttacctgcagtaatagaaaaacataaaatagggaggatggaatgtaagttgtcagggaaagtcagagatgtattcacagatattttaagatttttttttaatgtcttcatttcgcatgtgatttgtaggaaaaaaaaagacaaagcaatttagaccgccatgattataccacacgaagatgactatttttaacattttgcactttcatacacataccttttaataatttttaacccaaaaaattggatcataccaattgttttagagtctgctgactatgccaaaaacctagcttttcattcatactagttcagcacgaaggaacaacctgtatgcagaggtgaaaggcatagaagtggcaaacagcatgtgcatcaggtcatctggctcaggcaacagtgctcatgcttgcactgcacaccaggcctgcttagggaccccttccctcatctgcaccccattcagacgtgacagtccttgtggctgagtgaattgatgggagcaacattcccaaatatggaatatgctgcgtccagaattcaaacaggcctatgaagcattgtggtaggaggtatagggtacaattgtcttttacttgggagggcatgtcttggcacgccccagtgtagccccacgaggtcggctcatgtgttgatgagcctctgcatctttgttggacccacctctcacacttgcagcttctctgaccaagccttctaacacacttgccacttgttacttatgggctctaacatgatggcataaatatagtagacaaatgtgatattctcctgaatgtccagaacagcattattcaaataaaactttctgcatagaaatgtcctatatctgtgctgtccatttgggtagttcctggccacttgtagctattttgagcacttgaaatgttgctaaaacttgtgactgaagaactgaattgatttaattttaattaatttaaaattgaactgaaatagccatgagtggcaagtggctactgtattagacagcccaggtccagaaggtttcagtcccttaagactgttatgatagagggtgagagaattagcaaatcctgggcaggatcataaacatacactgttattatctgtttcatgttactacagactactgctgctgcttctgaatagaaggcgttcttcaaagcaatggccaataccatgagattgtgttaatgcattcccctgtaaagttaccatttgtggtattacatgtgtaccccggctgccacttggttgagtttgcagttaaccactgtcattctccagcacctatttgtgttttgtaaaggaagactggtaaattacaagggaccgtgatggggatcgccatgcctgtatctaaggtctctaagaatactctgccattccccatagatgtgatatcatttttaatttcctatcttggtcaccgaaagggcagcttcaggggcttccatttgacttttcccactgcgatggctcttaacccacttccaaaggaactaaagtgggagttattgttgccagttactcagtacatccccttgatttatacatttggaaatcacagaaattattgccaggtaagtccctggacccacctgtgagcttcttacatccggtgatggagggcggtcagggggtcatcatgactctttgggtccttgggtatcactgtcagcacagactatgtccaagttgataactgtaggtccttttggtgaaggacggggggagtcagttacatacgctttccttcagtaaatgcgttccaggtctgaaaactggttcaggtccagaaactggggcaatgttcaggactttgcattagagcagctgccttcagcctcaggaatcatctgtagttaatttctcatgactgtgtaattcagaagtagccttgtccgctgcccttgtgtcttccctttggaaacactgtgttctagtcatcaactctgttgctttctgtaggtcagacactcccgactgccactccagccttgccattagttatgatggttgcacccaccttggcttctgtttaacaccccagcctggtctctgcttcataattctttcatctccatttctgtcagggcatcctgctctataaagatgtaactgtggcttccttgtggctttggtacacagtgtcctcctgtccctcctaagaacatagtcagctggtgggttttcgggctttatatcttatatctatggtagcatccccattcttggaggctgttgagcctttcgtccagtttgccatggctgttctgtcacttttacttaatgtggaccatcactgtctcgaagtttccaggagcagacctagccagctgcatatcagttcccagggtgcttgcctggttgctaaattcatcacaggagcgtgccccatgctgatcaactctcagctggttttgtgttctgtgcccttgacacaccacccttaagaagcagtggtgtctatgttccccccccccccggggggacctccagctccttccgagtattgttcttctcacccttctcatgcccagtcgtgttgtaacttggccaggaggggaggtggagagccctcctgagagcagcacgtatcttgctaggcagaaacccccacccacccctcgcccagtttccaaggtggaggaagtgccaacctttaccagacactgagctgctgcttcagggctagaggggtcaggagaattgggattcaagattttttacaacattgacctcaagggccccctacccagctttaggttgcctttcctcccaaatcaggaccctgaccttggtgtgggaggtctcatgggcttgaaatgccaaactccctgaatcccttccgccccagacctcacccacgcattttctatcctctgggtgcaatttgagtcttgttctgccggggaggaggctcctgcccttggcactcaccttcactggtgattagttacacacttcatctcaccatccctctccatggccccagccacagccgtctgatataagtccttaaaattgctgattcctcctaaactcccagaataacacatcagccagtacattcccttccgccagcattccatcccaggtccccattggtgagagctgcatcagctgcactacagctctatgacaggtgctgtcagtacccccctaccaccagggacagggtcctcattgccagccagtggccggcaagccagctccaaaatccaaattgagagctgcttaccactcctggtagcacccgttgtaggttggcttcccagggaagtgggatttgcgtaaggtttatcagggagtgctctcagaatacgtcttgagggatgagggaagcaggactgggcagagggagaggccgaagtgcatttgcagttggggcctcagctgctgctctggggacttctggagctgagctggccagtcactgtcctacctaatatgggggctgagtcttatgcttctgcatcaaccaggcattgaatatgggctggtccagggaagtgccgtgacctaagtgaggaagctctcttatgatggaatgcccagagaggagctcagctgacaactgtccgctaccagtgctccctgcagctgggagccccataccacagcacccactataggaggggtagagaattgtggaagcaaataaatggcatgagggttttttgcatacaagtattaggtctgatagggttcagaaagttagacagtgagcagcttccattggagacagctataaagtaacaaacagaaatttttcaagtgtgtagaatatggagaatatttagcacagggctttatatataacagatatacaggagctgttgtttatcaaataaatggaaaagacctgtcagataccctaagcaaggtaggaatgaattgttggaagggacagtcagaagtccagggtgttggggccaatgacccggtttgggtaacaaggacaaataaggatacttactagaactagttagttgttattgtattctcaacctgggagttgatacataactggcaggtaatatttattgaaatgtattttgtgacactgagagtggaatgagatgtcgtcattgtaggccccaactcctgaaccttggaagggaaattggatttgtgacaattgtttgagtcagtcccatgaattacacagattttggcagatgaggtctttttattatttgaataatgtcttctaagttgggaaccttgctgaaaacttgaaggattgtgatacgctaaagactacttttaaacaagcgttgtattagctaaatacttcttttaaacaatgttgtttataaacataatagaagctttttatacagaagagaaaataacagcaacatctattaaaattttcttccaaaagtttttttcttaaaaattttttaaagatttatatttcagaagtctgaatggctaatgtggtgaataaattagtctataaacataatgccaggaggtgactcactttctcagcatcagtgaaaagcatagtcgtaattgtaatgttaaggtagtgtaactgtaatgttatagctctttgcatatatatgaagatacacatggtagatatacagtagctgttggtaagtgaaaaaatagaaagactcacctgatacgctaagcaaggcaggaatgaaatgttgggagggacaatcgggaatctagggtgattggggtaatagggacaaataagcgtacttgtatatgtatttctgtataatacaaatacatttatttatagctatacatatgtatatattctgtcccctgacactgtctttttttttttggacggagtctcgctctttcgcccaggccgtagtgcagtggcgctatcttggctcactgcaagctccgcctcccgggttcacgccattctcctgcctcagcctctcgagtagctgggactacaggcgcccgccactgcgcccgggtaattttttgtattttttgtagagacggcgtttcaccgtgttagccaggatggtctcgatctcctgacctcgtgatccgcctgcctcggcctcccaaagtgctgggattacaggcatgagccaccgcgcctggccccctgacactgtcttgattgagtttctctagctctcagagtgtctgtttaacccatatgcacatattttattagtgtgggaaaacaaatgtctggtctgtgcattttcttcattttctaagtttaattcataaatctttctggccaaccatattcctactctgaacacagttctgtttttatgcaccagtcagtgtggggtgggactggcattcgagctagttactaactgttaagagttgacacccattttggtccattcagtcccttacccatttggttgacaaaagccagcactcttcctaatctgggagtgttgcctaacctacagcagttgtggactggatcacttgttaaaaggatttcttcatcctaaattaaaacatagattcccaagccctgctctgagaattctgctgaggcgctgacacacagggagttttcaaaacagctgcccctgaacacacacagaccccttgctttgatctggaggctgcttttctctcgcaagaagtgcaaaagcagcagacaagcttgcctgctcccagccggcacccgtaacccattggtgttttctcttcacagtgaaagaagccggaagagattttacctatttaatagtggtgctttttggaatcagcattacaggttgcaaaaaacagcaagtataagcccttgaatattttttaaactggactttttatgttgcccttgcttcgcttcatctttgttttctgtgatttcaggtggcttgttttacacgattttcaaagaacttttttcttcatccagtcctagcaagatatatgggagagccttagaaaaatgcagatcacatcctgaggttagttctcaagattgagttacatgaactctgatgagggggagaaaatgtctgggaggaggaagtgggcagaattcaagaaccagttctcacgctagtgaaattcacataataatacataatggtcgagtcatcattacattattaggtctttgctctttaagagaacccaaaagtcagtgtacagatgttttcatgctaattgtacaagacagtcattttgctggttgttcatagatactaaatttttagaatacaccaaaatattgaactcatggtaagtttctagtctttttaaagcctgatgcatgacctcatggtcataatgtcattgctgacacttaccgaaaatgtgtccgtgcaagcactctgcccagggtctcagtgcatcatctttattcagtctcacaaaaaccatttgtgttcggcactactttgtcttcagtttgcagaaggggagactgacacttaaagagattaagtaacttcaccaggatcactgagctagtaagtgggggaaccggaacccgaatccacacaaatccaaaatttgcttccaaatctaagctcttaagcacagtctgcctctacccttccctgggaggagtggacatggggaagctgccttggttctttgaaggaccctgtcaagaaggaaggctttagatgtgaccttccagtcacacgtagccggtgtggcctgggaagtgtcagatttcttactccctgctgcagaccttcagcactgaaaatattactcattgaaatacaacttcattcaccctgaaagataacagcaggtaatcgtctgccattatcatcataaatattagggctgttcttcacacagaccaaggagtaatgtcatagctcgcatttgcagcccctgaagaggagaaagatttcaatccacagcgtgctcagtatagagcccggtgctgatcttccctggggccccggctctgaatgttctaccagttttctaatcatgtcagggtggaaacctcagaagctaacgatctctggcatctttccttttaaatccactgatttctcttcattgagctctggacagccagtggtaaccatggagaaaggcagggaggataaagtatctcagaggtgaaaaccaggaaataaggaaggttcgttcccataatagttactgggaatccaaattttatctgacaagaaacattctttacagactccggaaatacctgtgggtggtaacctcattaaatgttaggacgcatctctggaaagagatgaagagttgctgttttattcgcaaactcagcctttcgtagatttttcagcattttgaacaaaaaactccacaagaatatacaaaagtgggatattattgaagtcgtaacttcatttgctgcctgaaaaaactctacaaataataattaaactttaacaattttgtcaacattttttaaggggtacccttctctttgctgggtactgtgtctgcttgaaaaacaaaatcttgatggatgttgatatttatatgtttaatagattaaagtaaattgttctatttgtttgtgctatacaattctgcaatatcatcttacatattacttctttttatcctggaaaatgtgatactgaagatactccacaaacagacaaaataagataaatttcgtagagttgagggtcaaacttttttagtttaatatcaaatttatattttttagagggttccacagtatttgcattttgaattcaataaaaactacatttctacttcatgtggattttctcattagaaatagtagattcacacctgtagctctgatttattttaaatgtcattatctgttttctttttcctcactgtgtttggtaactttaaaaattttttgatctcatagttttagtattagatgctattaattaattacatttcattaaaaatgttcatacattttatcttcaaaccataaggggttagtagagaaacatctgaactctgtgttgttatgtttgttttctgtaagaggagcaggaactgcgtcatgtcaacctacattgctttgaaactacaagtcacaccataaagctacctattttaatctttgtgcatgaaatatttgtttaaattatttatgggatgatttttgtataataacccttttttcagttttcttattggagtggtcatttttttatttgtttgtttgtttgtttgttttgagacggagtctcgctctgtcacccaggctggagttcagtggcacgatcttggctcactgcagcctctgcctactgggttcaagcgattctcctgcctcagcttcctgagtagctgggactacagatgcgcatcaccatgcccagctgatttttatattttttagtagagacggggtttcacctagttggccaggctagtcttgaactcctgaccttgtgatccacccatcttggcctcccagattgctgggattataggcgtgagccaggagtggtcatttttgaaaaggtcctaagcttactgatttttttttcctaaaatcatctggtttgttaaaaattatttctttagaagcttaaaaaaataacacaaaataaagcactgtccttgttctgcaggtgatcggtgtctttggtgagtctgttaaaggctatggggaggtgacaaggcggggtcgccggcagcatgtcaggtactgtggcttgaattcagaggaggctctggggagatttttaaatgaaaggaacttagactgatctttcgttttctcgacaggttcactgaatatgtaaaagatgggctgaaacacacgtgtgtgaaattctacattgagggctctgagccagggaagcaaggaacggtgtatgcgcaagtgaaagaggtgtgggaatcatgggatgtggggtcagaggttctgagcgcggtgttatttaagttctggaaaggaaaataatacctggaaacactacatttttttcagaacccaggaagtggtgaatatgattttcgatatatatttgtagaaattgaatcttatcctagaagaactattatcattgaagataatcgatcccaagatgattaaaatagggtttctgatggatgttgaatggcgtggactcgctactccgttcttcacagctgccttccagaatgtgttcaaaagaaagacaagaaggagtgtatggcttataaagtgaatctaatacagtatttgttgcatttaaacaaactagacattttcttacggaaaaattatgaaatacagcatattttatgttctcccattgactcaatcatgacaatatttctgctttaacaccatctttcatgattagaaatgtttgttattggaaatgttacaccatgtaaataaaggaaatagattttagtattgtattcattttatattatagaactgcataatgtctgcagaataaaattaaaactaacaaatatgtcattagcagctgccctccgcatactttggaatctgacttgagataagcatgtgaaaatggttgagggccatagggaaccagatggtaaatacattcttcaaaattgtgtgagt

SEQ ID NO: 222 - DNA, 2134 bp, Homo sapiens
  source 1..2134: mol_type = other DNA
cagatcgccgaagcgtcggactaccgttggtttccgcaacttcctggattatcctcgccaaggactttgcaatatatttttccgccttttctggaaggatttcgctgcttcccgaaggtcttggacgagcgctctagctctgtgggaaggttttgggctctctggctcggattttgcaatttctccctggggactgccgtggagccgcatccactgtggattataattgcaacatgacgctggaagagctcgtggcgtgcgacaacgcggcgcagaagtaagtagccggggctgccgccgcctgaggtcagccgggacgggatgggtcgggttgggccgggccgggagcggaacgtagcacccggtggtccgcccgtcactgatccctctttcctggtctcaggatgcagacggtgaccgccgcggtggaggagcttttggtggccgctcagcgccaggatcgcctcacagtgggggtgtacgagtcggccaagttgatgaatgtgtgagtcagacccccttcccgggctgggcgcgggtgggacgggacctcccctccgctctggacgctttccgcacgcttgtcttgcatggagctgggacttccccaagtgccccccgctgtggatgcagagcttctctgccgttttgtggatcgggggctgccgtatcctgatgtatcgtctgcaaacacccctcccgccgtgggcctgtctccccctaccccatactttgaaccgtgtgccctcccctccccccaccgtcaccagcttgcagaggcaatcccctgcacccttgcagtttctcttttgctcttgcacgctccttttttgcaaactccccctgcacggtggcccctcccctgtccccggctgacccatccctaccctttggccccctcagggacccagacagcgtggtcctctgcctcttggccattgacgaggaggaggaggatgacatcgccctgcaaatccacttcacgctcatccagtccttctgctgtgacaacgacatcaacatcgtgcgggtgtcgggcatgcagcgcctggcgcagctcctgggagagccggccgagacccagggcaccaccgaggcccgagacctgcattgtctcctggtcacggtgagtcgggcctctgccctgccccgccacgcccgggcacctgggccggtgtttgtcaacaaagtcgggctgactggtcctgcacagctcagcgctcagccacgtttggcatgtcccgtgggcagccgggctggggcctcctcacccaggaagctattttgagcctgactgttttccccacacaggggccccgggagagggaggctccactaaaccccttcttttccctcctacagaaccctcacacggacgcctggaagagccacggcttggtggaggtggccagctactgcgaagaaagccggggcaacaaccagtgggtcccctacatctctcttcaggaacgctgaggcccttcccagcagcagaatctgttgagttgctgccacaaacaaaaaatacaataaatatttgaaccccctcccccccagcacaacccccccaaaacaacccaacccacgaggaccatcgggggcagagtcgttggagactgaagaggaagaggaggaggagaaggggagtgagcggccgcccccagggcggagatccaggagctggcggccgccgatccgatggagaaggggggacccaggccagcaggagacaggacccccgaagctgaggccttgggatggagcagaagccggagtggcggggcacgctgccgccttccccatcacggagggtccagactgtccactcgggggtggagtgagactgactgcaagccccaccctccttgagactggagctggcgtctgcatacgagagacttggttgaacttggttggtccttgtctgcaccctcgacaagaccacactttgggacttgggagctggggctgaagttgctctgtacccatgaactcccagtttgcgaattatagagacaatctattttgttacttgcacttgttattcgaaccactgagagcgagatgggaagcatagatatctatatttttatttctactatgagggccttgtaataaatttctaaagcctctg

SEQ ID NO: 223 - DNA, 32746 bp, Homo sapiens
  source 1..32746: mol_type = other DNA
tggcccgcccctcaccctggtccgtctccctgtgtctgtggtcgtcagttccactggcaggggacctgcctccctgttgccaccacaagagaggaaaagttggtcaaacaggtggggaggccagagctacaagcctcgggttccctccccaccacccgtgccaggcaggcacccgggccctggcacctgctgcctgcccagaggccacccagcctcctagacaggtaagtcccccgccccactgtgcttttccacccagtgtgcattgtctgagctggccttccccagctgagggtccttagactcccccccaacctcccccaccacgagctgtctccccggctcctcggaaagcaggaaactgacactcctgcgtgggcatctgacatagtttcgtagggattatctgaccggcagttactgcacctggcggcctgcccaggacgctgagctggaaacttaaaagggtcattgttacctaggtggcgcagggaccggggaggcggcaaaggggcacaggttggtctctgatccccctaactgaggaggggaggggatatcagtccagacggagcctgggtttacctcctgcagcccgaggctaggaggtgacaggtgggaaaggctgcgacctcactcatctctgagcctcctggaacttcttaaaaggctcccaagttttgaaacaactgcgtctcccgccccccaacccctcaccctgttctcaccgctggaacctccaggagctttgcagggagggattggggtggcctttcttttgctaattttttttttgagacggagttttgctcttgttgcccaggctggagtgcagtggtgcgatcttggctcactgcaacctctgcctccacctctgcctcccgagtagctgggattacaagcgcccaccactatgcccagctaatttttgtatttttagtagagatggggtttcaccatgttggccaggctggtctcgaactcctgacctcaggtgatccaaccccctcggcctcccaaagtgctgggattacaggcgcaagccactgcgcccagacttctttttctaatctttactcctccgagcaaaatctctgtgggatggggcagaggggaaggaggaaggagcgctcagagccagagaggggaggggtcggcagcaaaagtgtttttctgggtcatttgctcccaaatgggaagaccaagggagcttcctcgtgagccaagtgtccgattgcatctcaagtctctctccagaaccaagagggtcccccggggccgaggaggcatggatgatcgcatagtgggggacagagcggcccggcatttggggtcaccttgtggctgtgtggctgcagagctcccagggagcaggcttgcttgagattcgggagtccgtgggggtgggcgacatggatcccaccttgcctgggttttgagagcaaacccgtggactcagttagatctggcttccacacctcccttctctccgggcctctgtttcctgctctgtaaaatggggatattgagggccgggcgcggtggctcacgcctgtaatcccagcactttgggaggtcgaggcgagtggatcacaaggtcaggagttcgagaccagcctggccaacatggtggaaccctgtctctactaaaaatacaaaaaatgagccgaatatggtggcaagcacttgtaatcccagctactccggaggctgaggcaggagaattgcttgaacccaggaggtggaggttgcagtgagccgagattgtgccactgcactccagcctggacaacagagtgagactctgtctcaaaaaaaaaaaaaaaaaaaggggtggggggatatggagtcaccaaggcacagggctgttgagtgccggatgtaataaagcgggtaacagattctcggtcattctggggtcaagacgagctatcccggtccgaatcggagtctggtctcatcagcttcctggtttgtagaggatgaaccctggctcagagaaggacagccgcttaccccgggccgcacagccaagtagaaatgtcaggcggccaagagtcaagacgcagaggacagggagctggtggcgggggtggtgctctggaggctggccctgcccccagctgatgcctcaggctcagcatctcgagaaagtcctgccccctggcttggtgcttcctcgtggccctgagtcccggggaaagtccagggcagggagtatgggtacttgttcttcctctttagggctggccaggggccaggggagctgtgtttgctcagggtggaacctgacaccctttggaatggattgaggttagcggaagcctaggctggggggaggggtcgcccagggagcgaacgggcatttattgtgcacttactgtatgcgcgagtgtggggtcaccaggccttggagattcagcagtgagcaaggcaggccaagcttcctgctctcgtggggcgcatattttggtggggaaagacagacatgaaacaagagcgcagtaatggagccaatggctgcacagagggtaacatgcgtgagaggcgctttgtaactttattttactttttatatttttttgaaacggagtctcgctctgtcgcccaggctggagtgcggtggcgcgatctcggctcactgcaagctccgcctcccgggttcacgccatactcctgcctcagcctcccgagtagctgggactacaggcgcccgccaccacacccggctaattttttgtatttttagtacagacggggtttcaccgtggtagccaagatggtctctcctgaccttgtgatccgcccacctcagcctcccaaagtgctgggattacaggcgtgagccaccatgcccggccttattttatttttttttgagatggagtctcgctctgttgcccaggctggagtgcagtggaacgatctccgctcgctgcaacctccacctcctgggttcaaagcgattctcctgtctcagcctcccaagtagctgggattacaggcgcccaccaccacgcccagctaatttttgtatttttagtagagacagggtttcaccgtattggtcaggctggtctcgaactcctgatctcaggtgattcgctcgcctcggcctcccaaagtgctgggattacaggcgtgagccaccgcgtccggccaaaatgaagggagagctttaaatgctggcctgaagacatttggctttatgatattaaaggatattttttcccaaaatagtaaaatcattactctcatacaaatacaaaatgaggccggatgcggtggctcacgcctgtaatcccagcactttgggaggccgagacgggtggatcacgaggtcaggagttcaagaccagcctggctaacatggtgaaaccctgtctctactaaaagtacaaaaaaaaaaaaaaaggtgctttatgtgtctgcttaattcattaattaatatgggaaccggtaagactttatagcctatacagaggggaattaatttgtttcctttctttcttttttttaaaaattgaaaatagaaatggggttttgctgtgttggccggcctggtctcgagcttctgggctcaagtgatctgccagcctcagccactcaaagtgctgggatttcaagcgagagccaccgacccggcctcagcattcttgattgcctgtgtgtgtgtgttctttcagttctcctctggaccagacacggtggctcacgcctgtaatcccagcattttgggaggccaaggcaggtgggtcacttgagcccaggagtttgagaccagcctggcaaacgtggtgaaactctgtctctactaaaaatacaaaaattagccaggtgtgttggcgtgtgcctataattccagctacttgggaggctgaggcaggagaattgcttgaacctgggaggcagaggttgcagtgagccgggatcgcaccactgcactccagccccagagacagagcaagactccatctcaaaaatgtcattccgtgcccagaatgacagcaccttagcgtagatggtttccatggggcagggggccccctctagccctgggacactgtaattcacctttggctttcccactgggggcccgagtggagttagaagcatggagaggcagcccaggggatccttagtggcagatgcttaaacctttgagccttccctgaaatactgctcagggtcaaaaccgggatccccgttttacagatgaggaagctgaggcaggggctggaattcacatgggctctgcttttctctctctgctgtggaacttccttctagagctcagccgtcctcccttttgggggaaatggcatctttggcatggcttggtggctcccgcctggaatcccaacattttgggaggccgaggtgggaggatcgcatgagcccagcagttcaagacaggtccgggcaacatagcgagataccgtctctacaaaatatacaaaaatctgctgggcagggtggcgtgcacctgtggccccagctacacaggaggctggggtgggaggatcgcttgagcccaggaaagtggaggctgcagtgagctatgattgcaccactgcactccagcctaggtgacagagcaagactctgtctcaaaaaaaaaaaaaagaaaagaaaagaaagtcccctgttgaacaccctgagctgcattccatactccaagcttctagcaggttccacactcctcctacttcaaagtgccccccatgagtcctacttcaaagtgccccccatgaggtcctccagcctccccaggacgccaaaccctgagacgttcttcagccctccagtgccttagggctgagccggccacacctagaatctgcccttcctcaaaggtcgtttggatcttggcaacccacagaccggggcgtctcctcccacctggctgccctccatctctgctctctgtctctgctcctgccccgtcctctccacacggcttccttaaaacctcccagggtcccccaaaacccatgacgccagtctagtcatgagggaaacagctggtccccaatgtccccacattgagagttattctgcaaaagacctgcccagcacagactaacaggtcacagaacaggaaagacagaatcggtcacagcccagcggtgtctaaggagacgtgacagccaactaccaggtgggatcctggatggggccctggggcggcaaagggcctgcggagagacgtgaataaagtgtggagttcagtgaacaaggttgtactgatgttgacttcttggttttgacatatgtacccgtgtaataatgttaatgttagtggaaatcagttgggtgtataaaggaattctctgtgtatttacttttctgtaactttaaaattattattattatttatttatttctttttttgagacagagtctcgctctgtcgcccaggctctggagtgcagtggcacgatctcggctcactgcaacctccgcctcccaggttgaagtgattctcctgcctcagcctcccgagtagctgggactacaggcgcccgccaacatgcccagctaattttttttttttttttgtatttttagtagagacggagtttcaccgtgttggccaggatggtctccatctcttgacctcgtgatccacctgtctcggcctcccaaagtgctgggattacaggggtgaaccaccacgcccggcctattattattactattatttaatttctttgttgttgttttgagacagagtctctctctgtcacccaggctggctggagtgcagtggcgcaatcttggctcactgcaacctctgcctcccggttcaagagattctcctgcctcagcctcctgagtagcagggattacagcagcccgccgccacacccggctaatttttgtatttttagtagagacagggtttcatcatcttggcctggttggtctcaaactcctgacctcatgatcctgcctcagccccctgagtagctgggattacaggcacgtgccactacgcttggctaattttagtatttttagtagagacagggtttcaccatcttggccaggctggtctcaaactcccgacctcgtgatccacccgcgttggcctcccaaagtgctgggattacagatgtgagccaccgcgcccagcccgttcttttagtatttattgagcacgtactgcatacacagtgatggggctgcagaagaactgattgacagacacagtggaagcccacagtctttaggggagacagacaataattgaataatcgcatatgtaactaaaaagtacaattaggccaggcgcagtggcacacacctgtaatcccagcactttgggaggccaaggcgggcggatcacgaggtcagagttcgagaccatcctggccctgatccactgggggacctcagcccagcccctgctatctctgggcctcagttttcccacaagcactcagaaggggttgagctggctcatcccagggaggcctccagaactccaccttccctgggtcctcctgtccctcaccctgctcagatcacactggccctgaacgctggttcccaatcacacgtcatatacttggcttgcaacagttttgttgactgagtgactgaatgcacagaagaattaaggcacaaatgaagtagattgctgaaaagcagattttctctttttttccttttctttttgctattattatttttacttcgtgaggcaacagtagaaaaccaggttttttgtttgtttgtttggttggttggttttttttttttttgagatggagtctcgctctgtcgcccaggctggagcgcagtggcgcaatctcggctcactgcaacctccgcctcccgggttcacgccattctcctgcctcagcctcccgagtagctgggactacaggcgcccgccaccacacccagctatatttttgtatttttagtagagatggggtttcaccgtgttatccaggatggtctcgatctcctgacctcgtgatccgcccgcctcggcctcccaaagtgctgggattacaggtgtgagccaccgcgcccggccaaaagcaggtttttaattcattaaggtgatccgaaggtcaggggtggtgggaataaggggcttaaggctatgcccatctccaaagccttggatttgaacccaggtttggaggatggtactagggagccatcgagtgttcttgagcagggcatggatatgagagcagacggtgggtggttggaggaagacaatgtgtcctggtgcagttatccagcttcctctcttagaggggttgacagtgggatttctctgcgttgcccattgacatttggggccagatccttctctgggatggggccattctgggcaatgcagggtgcttagcagtatccctggcctccactcactcatgccaggagaaccttccaggtttatttttttattgtttcattttattttatttttttgagttggagtctcgctcttgtcatccaggctggagtgcaatggcgcaatctcggctcactacagcctctgcctcctgggttcaagcaactctcctgcctcggcctcccgagtagctgggattacaggcacccaccaccacactcggctaatttttgtatttttagtagagatggggtttccccatgttggccaggctggtctcgaactcctgacctcacgtgatccacccacctcagcctcccgaagtgctgggattacaggcgtgagccaccacgcccgacttgttttatttttgagatggagtcttgctccattgcccaggctggagtgcagtggcgccatctcagatcactgcgacctctgcctcccgggttcaagtgattctcctgcctcagcctcccgagtagcagggattacaggtgcctgtcactacgcccagctaatttctgtattttgagtagagacggggtttcaccctgttggccaggctgctctcgaactattgacctcaagtgatccgcccatctcagcctctcaaagtgctggaattacaggtgtgagtcaccgcgctcggcctggtattgaacaccaaaatgtctcaagacgttgccaagggtccccctctggtgagaggcactggcttggagttcgaggtgcaggggcaaacagagctgcagccaaatccctcaggccagctcaccatctggcctcagttttctcagctgcaaagtgggcgcacgagtgttgtgtgtaactggggctgcagccaagcatatgccagtaaacatggcccgggagccccattcactgctaggactttaacccacttatttctttatttatttttgagacagcgtctagctctgtcacccaggctggagtgcaagggcaagatcatggatcactgcagcctcgacctcctgggctcaaatgatcctcccacttcagcgcctagaggtgcctgctaccacacccagctcatacatatatatatatatatatatattttttttttttttttgaaacagagtctcagtctgtcgcccaggttggagacagtggcacgatctcggctcactgcaccctctgcctcccaggttcaagtgattctcctgcctcagcctcccgagtacctgggattacaggcgggtgccaacacgcccaggtgacttttttttttttttttgagacggagtttcgctcttgttgcccaggctggagtgcaatggcccgatttcggctcactgcaacctccgcctcccgggctcaagcaattctcttgcctcagcctctctagtagctgggattacaggcatgtgccaccacacccagctaattttgtatttttagtagagacgaggtttctccatgttggtcaggctggtctcgaactcccaacctcaggtgatccgcccgcctcgacctcccaaagtgctgggattacaggcacgagccaccacgcctggcccatgactgttatatttttagtacagacagagtttcaccatgttggccaggctggtctcaaactcctgacctcaagtgattcggccgccttggccatccaaagtgggattacaggcgtgagccactgtgcccagccatagcttatatatatatatatatatatataattttatttttttttgaaacatagtgttgtgctgtctgccctgtcacccaggctggagtgcagtggcgtgatctcagctcactgcaaccgccgcctcccagggtcaagtgattctcttgcctcagcctcctgagtagctgggattacaggcgcctgccaccatccttggctaatttttcgtatttttgtagagatgggttttgccctgtgggccaggctggcctccaactcctgactcaagtgatcctcctgccttggcctcccagagtgctgggatgacaggcatgagccactgcaccctgcctaagatatttttaaaaatttttgtggatgtggagatgggggtctcactgtgttgcccaggaatgagagtacagtggtgtgaccatgacttactgcagcctccaccgcctgggctcaagcaatcctcccagctcagcttcccaagtagctgggagtacaggcaagtgccaccaagactggctaattaaaaaaaaaaaaaaaggccgggcacgatggctcacgcctataatcccagcacttagggaggccgaggggggcggatcacaaggtcaggagtttgagaccatcctggctaacacggtgaaaccccatctctactaaaagtacaaaaatcagccgggcatgtgcctgtagtcccagctactcgggaggctgaggcaggagaatggcgtgaacccgggaagcagagcttgcagtgagctgagattgcgcctgggcaacagggcgagactccaactcaaaaaaaaaaaaaaaaaaaaagtgtgtgtgtgtgtgtgtgtgtgtgtgtgtgtgtgtgtgtgtgtctgtgtgtgtgtagagatggaagtctcactctgttactcaggctggtctctcctggcctcaagagatcctcccgcctcggccttccaaagtgctgggactacaagcgtgagccactgttcctggccaagcctcttattttaaagacgctgaagtcagaaagcctgtaggacaggaatgcagcattttcttttcttgcggttttttttttttggggtggtggggggcggggtggacagggcctcactctgtggcccaggctggagtgcagtggcgcaatcttggctgactgcaacctctgcctcccaggtttaagtaattctcctgcctcagcctccctagtagctgggactacagacgtgcgccaccacgcccagctaatttttgtattttcagtagagacagggtttcacaatgttggccaggctggtctcgaactcctgacctcaggtgatctgcccgaatgcaggattttctaccagctccagtcccctgcagaacccctgtccgattttgccagacctaagcagagactgctttgagcaatggcagccacgaaccttgacgtgtgcgggccggtagggaatgatgtgtttttctcacgactcattaaaacaaatacacggctatttaaagatcgctggactggccgggcgtggtggctcacgcctgtaatcccaacactttcagaggccgaggtgggtggatcacctgaggtcaggagttcgagaccagcctggccaacatggtgaaaccccgtctctactaaaaatacaaaaattagccacgcgtggtggccggcgcctgtagtcccagctactcaggaggctgaggcatgagaatggtgtgaaccccgcaggcggagcttgcagtgagccgagactgcgcccggcactccaacctgggtgacagaatgagtgtccgtcttggggggtggtggacatcgctggaccttaatcatctaaaatgattttttgcgccacctgctggtggcggagtgtcacacagggaagggctgagttgcctgtaggtatacagtaggtgttcagtaagccttagttttggttaatggtgtttctacattggctcagcatggggtcttggaaagagtttggggctccaggaacccatgctgtgcaaccttcagtgagtctggggccctttctgaaccttcatctataaaatatgtgtgtgtgtgtggctgggagtagtggctcatgcccataatcctaacattttgggtggccgaggtgggctaatcacttgaggccaggagttcgagaccagcctggccaacatggggaaaccccatctctactaaaaatacaaaaattagccaggcgtggtggcgggtgcctgtagtcccagctactcgggaggctgaggcaggagaatgacgggaacccgggaggcggagcttgcagtgagccgagatcgtgcctgcagtccagctgggcgacagagcgagactccgtctcaaaaaaaaaaaaaaaaaaaaaagaagggaagacatataaccttcatgcgatgtgagaaggtgcgttgaaatgccttctacaattcttgcttcggtcggaagtcacaaagggattgaacttcattttggctgctcccacttctgtgatggccgcaaaagggaagagaactacatgctcctttttatttattttgtatggagattgggtctcgctatattgcccagcctggtctcaaactcctggcctcaagtgatcctcccacctgactcttcaaagttctggaattacaggagtgagccattgtgcctggcctctacgccccttttaatcctcctgacaaccctgtgatgtaggggctattattttccccaattacagatgtggaaactgaggaacagagaggggcagtaagttgtctgaggtcacacagcaaataggtgagagctggttttagaactctcctagctctgaagttccaagtgggtccccacaagaggctttggcaatgctttattcgggcccttggagacccttgaggggctgactgtagctgacttgggtctctggactagtgttttgggtacaattgcagtggaggaggtgagatgtcatcttcggggaccctctaagactttgatattgttggccttgtttactaagcaaactcttaaccaaccttcaaatccccagctacgatgccccctcctccaggcagcctttcttttaccgctagagttttctctatgctcttcacccctagccacaacctgggactcctgtccctgcccagccctgactggataaggctgggaaggggtgtttatgtgtagctttgcccttttacccttttaaccttggggtggggcccaggcacagctgggcgcaggtttttttttttatagtaaggaatgtgggggtgcagccacgaccagccccgcccacccaggtgacttgaaggtttcctaccctggtccagtccctcctaggtctaaccttaggaatcccggaatcccaggcccctgagcgggaggctgggctgggctgggtgagaagaaggaaacgacctttactccctcccagagcctgaagaatttcctcctgccttgcactctgcccctttcttttccttcgttccttccttccttcccttctttccttccttccttttctttttttttttttttttttgagacagggtctcactctactctgtcgcccagactggagtgcagtggcgtgatatcagctcaccgcaacctccgcctcccgggttcaaccgattctccttcctcagcctcccgagtagctgaagcatgcgccaccacgcccggctaatttttgtacttttagtagagacagacgtttcaccatgttggtcaggctggtctcgaactgctgacctcgtgatccgctcgcctcggcctcccaaaatttggggattacaggcatgagccaccgcgcccggccctgccctgccccctttcttttctggatgctgggtgtgaagacagagcccgcaggccaagaccgcaggaaaaaggcacgcagccgctgttgtatcttcagagtccacgcctctggcctctggggcctccggttcccctctgtggaatggggcaaaccttccagagataaggtgacccagggaccagcgctatgctaaggaggtctctggccttcgacaagcttctaatccaagaggcctcccagatgcacctcaaaatgtgcccatttcgcggacggaaacaccttccaaatagtaggctccgttccaagcgcgggggttattcctgccgggtcttgctggcagccttgtcgggccgggctctggccgcggccgccggccccctctcggctgcgtggataacccggcctggagtttccgcctcaggacctggctcctgtgatgggaggtggggagagaaacctccgccgcgtccagggggcgtgtctgggcaggggcggggctgacccgagacctggaggaggaagaggggcaggtgcagccgggagctgcggagctggagggaggaggacgagagcccggccctcagcccgctgtgactctcctcagccccctcccccagcccggggtgggggccgattgactgtttccaggaccccctcgggtaggggggctggagagcccccaggtggaccatggcggtgagattccaggcgagtaaccctccaagggtggcagggggaggggctcgggctgaggtggggtggggggaaagcagggtttgggagtcggacccaggaccccagaacgcctacctacataacaggcagggaaactgagtcccagagggatgaagtggctagctggaggttgcacttcgagatgcgtccgcgcgtccgcgcccccctccctgcctccaaagaccatctcttctggagcctcctctgccccaggaccggcctcctttaataccgcagggctgggttcaaatcccgaattttctgtccactatgctgtgtgtaacgtggggccagtgagtgaaccctctccttccctcatccgaaaaatgggtgatcggcattttaaacagagagaaaaatgtgttttaagagcttggcgcatcgtaggtgggcagaaaagatgttcatccccctttgctgggggcgtgcagccggctgagcttgggcgcccgcggtggcacggtgggcagtgacttcatttgggggctggggtggctttggtgaacattcacctcctacaaggctgcacgagggagcaccagcatttattgggtgcctactgtgtacaaagctattaacaggcattaccaggcagaggcaggggtggggtgagcaagccggctggggtgcgccgtggcgggggcggggcggggggcgatccttgtctccggagggatttcaccctccaggcatggagcctgggctggtttcttcagacccaccagccagggtagactgggactgcagcggtatgcggccagacccaggccactccgccccaagcttcaggacccggcacttctggttcccgctgacttcttccttgcctccaggcacagctctcagaatcccctccccaatcggtgtatttgttcgctgaaaccgccctctctgccattgttcctggagatggggtggcggggggggggggcacaggggacggcggcccgggagccccgtacccgggggcggtgtgacttggtaccggccccgtcccctctgggcgggcctcttgttcggtgtttgtgtccagccctgggcggggggcggggacaaagacccaagccccaccctctcagagttcacctggacaggggcagggctgggaactcaggacacacctgttgagcacctggccacagtgtgttttactcaaccattcactcattcctcaaactcttccctaagggggcctggtcctatggggtcccaggggcccatccctgcccatcgggagcgctcagactgagggggaaggtgtaaggtggacaaatccactctgacatcccacaccccaatcatcacatttgggccagagggaaggatgtatgatatgcgtacggaggaagaggctggggctgtgaaggatgaataggagtttgccagggagtccagtaccagcactcaaggcctggaaaggaggctgatggccaatcacctgggccttaagtagccagagagacagacatgtctcctttcacagcctaagaggaaagaccagaaacatactaaccgatggttaaagagaataaagatgatttttagatgccttgaataaaaaataataaaacaggctgggcgtggtggctcactcctgtaatcccagcactttgggaggctgagggaggtggatcacctgaggtcagcagtttgagcccagcctggccaacatggtgaacccccacctctactaaaaatacaaaaattagccgggcgtggtggttggacgcctgtaattctagctacttgggaggctgaggcacgagaattgctggaacccaggaggcggaggttgcagtgagctgagattgtgtcactacactccagcctgggtgacagagtgacactctgtctcaaaagaaaaaaaaaaaatatatatatatatatatataaaataataaaataggcaggagtgataggggatcagagaagactggttagctaggtggtcagggaggacttcctgaggaggtggcatttgagcctagacctcagtggcaggggccagccaggcaggaatcccgtgaaacatgtcccagattcaggggacagatggggtaaaggtttggaggtgaactaagatgaggtgggctgtgaggttaggcttaatccctcaggcactgtggagctctggagggtttagacaaagcttctggtttccatggagacgaacccgcacaagctgggacaagcctggaccacctggactccctcgcccctctcccactctgggttcgggggccctggttccctggggctgtctcttttttttttttgagacggagtttccctctgtcgcccaggctggagtgcagtggcacaatcttggctcactgcaagctccgcctcccaggttcacgccattctcctgcctcagcctcctgagtagctgggactacaggcgccggccaccacgccctgctaattttttgtatttttagtagagacggggtttcaccatgttagccaggatagtctcgatctcctgaccttgtggtctgcctgcctcagcctcccaaagtgctgggattacaggcatgagccactgtgcccgggcagggctgtctcttaaagtcaggaaatacaaattccttggggccatttaaaaattttttttgagacagggtcttgctctgtcgcccaggctggagtgcagaggcacgatcacaattcactgcagcctcgacctcctgggctcaggtgatccttctgcctcagcctctcgaggagctgggaccacaggtgcatgccaccatgcccggctaatttttgtatttttttgtagagatgagggtctcactatgttgctcaggttggtcttgaactcctgggctcaagcaatcctcttgcctcggtctcccaaagtgctgagattataggcagaatccaccgtgcccggccctggggccatttaatgacacaaagtataacatcaaagcaggttaaaaaaaaaaaagatgcagttttgaaaaataagctcagaagaaaaagagtaaataatcagaaagccactgtagcctggtggttaagagcaagagtgaggctgggtgcggtggctcacgcctgtaattccaacactttaggaggctgaggtgggaggatcgcttgggcccaggaatttgagaccagcttggtcaacatagcaaaaccccatctctacaaaaaaacaaaaaaatatgctgtgtgtggtggtgcatgcctgtggtcccagctacctgggaggctgaagcaggaggatcccttgggcctgggagttcaaggctgcagtgagctgtgattgagccactgcactccagcctgggcaacagagtgaaaccccgtctcaaaaaccaaacaaccaatcaaccaaccaaccaaccaaaaaagagccagagaacagggcaggctgccaagttcaccactgtgctgcgtgacctcaggcaagttactgaacctctctaggccccttttaatctcacctctaaagtaggaataataactgtgccacttcctaaggtcactctgaggatgaaatgaatgggtccacatcaagcgcctgcttgcagccaggttcaagacagcctgaccaacatggtgaaaccccgtctctactaaaaatacaaaaagtagctggctgtggttgtgggtgcctataatcccagctactcgggaggctgagtcaggagaataacttgaacccaggaggtggaggttgcagtgagccgagactacgccattgcactccagcctgggcaacaagagcaaaaaaccccatctcaaaaaaaaaaaaaaaaactacacaaggagaaagtcattatttggccaccacctccccaaggctccttctgctttttgcttttcaggcattgaatctgtacccttttcccaaaccacatccctgcaagacagggcagcagtgccatttcacagatggggagactgaggctgggagaggccccgccatagctagcacgggtgggcagacttgggatttgagtccagtcctgagcgctgccctggctccttcagaactgcagagccctgccctctgctctgtttctctcccctccacccgccttcccactcctggagatcaggaatgctggcctcgctagagacgctggagcttataagaaaaggcactggagcgcaccaatggggggtgcctgggcagagggaatcacacacccgctgtgccaagcctagaaaacccgccccggggaggaggaggagtcacttctacaaactccctccccactccctccacctgtcccctgcctggggagcagggcatggtgcgtgctggcaggagggaagggagggtggaggcgtggccaggtgaccttgcacctgagtctggtgttctcattcatgccatggacatgaaaataacagaatctgcctggtgtggaggctcacgcctgtaatcccagcactttgggaggccaaggcgggcggatcacttgaagtcaggagttcaagatcagcctggccaacatggtgagacccccgtctctattaaaaatacaaaaattagctgggcatggtggtagacacctgtgatcccagctacttgggaggctgaggcaggagaatcgcttgaaactaggaggcagaggttgcagtgagccaagttggcaccattgcactccagcctcagcaacagagttttttttgttttttttttttctaagtgggaaagcccaggtgggaggatcatttgagcccaggagttcaagaagagtctgggcaacacagcaagaccctcctgtctctataaaaatagaagttaaaaaattagctgggcatgatggtatgcacctatagtcccagttactcaggaggctggggcaggaggattgcttgaagccaggagttcgaggctgcagtgagccataatggctcacacttgtaatcccagcactttgggaggccaaggctggagaatcacttgagcctaggagtttgagaccagccttggcaacacagagagactccatctctacaaacaataaaaaaaattagccgggcatcgtgatgtgtgcctgtggtcccagttacttgggaggcagaggtgggaggatcacttgagcctgggagttcgaggctgcattgaaccgtgatcacaccactgcactccagcctgagtgacagagaccctgtctaaaaaaaaaaaagtgtgggaggggggacttcatggctctgtgcctcagtttcctcatctgtaacatggggataattgaatgcacctttgatgaatgtattaaatgagatagtacatgtaaggctgggcgcggtggctcatgcctgtaatcccagcactttggaaggccaagggggtggatcacaagatcaggagttcgagaccagcctggccaacatagtgaaaccccgtctctactaaaaattcaaaaaaattagctgggcatggtggcacatgcctgtagtcccagatacttgggatgctgaggcaggagaatcacttgaacctggaaggcggaggttgcagtgagccaagatcacgccattgcactccagcctgggcaacaagagcgaaactctgtctcaaaaaaaaaaaaaaaaaaagagatagtacatgtaaagcacctggcacaaaggaagtgtttcattcattcactcattaattcattcagcaaatccttcttgaatccctgctgcaactcaggcgctgttctaggcagggaactgagggctcagttttggacaaagacaaaaatctctgccctctgtgggtggatcagttgaggtcaggagtttgagaccagcctggccaacatggtgaaatcccgtctctactaaaaatagaaaaattagcctggcgtggtggtgggcacctgtaggtgcccagctactcaggagcccagctactcaggaggccagtaggcagccagctactcaggaggctgaggcaggagaatcacttgaacttgggaggcagagactgcagtgagcagagattgtgccactgcactccagcctgggcaacagaatgagactccgcctcaaaaaaaacaaaacaaggctgggcacagtgactcacccctgtaatcccagcactttgggaggccgaggtgggtggatcacttgaggccagaagttaaaggccagtctggccaatgtggtgaaaccctatctctattaaaaatataaagattagccaggtgtggtggtgcacccctgtaatcccagctacctgggaggctgaggcaggagaatcgcttgaacccgggaggtggaggttgcagtgagctgagatcgtgccactgcactccagcctgggcgacagagccagactctgtctcaaaaaatgaaacaaaacaaaaaaacaaacaaaaaaacctgaggccctgagagaggtagtaacttgtcacaggctccaaacacaggcctgtcagagctggactccccaccctgagctggggacccccaagtgctcagatgaacctgtgtggcctcatgcccatcttccccgctcccctcgaccaggtggctgacatggaggagctgaccatctgggaacagcacacggccacactgtccaaggtgaggcctccctctccctgtctgggtgccagagagtatggcggcttaggcccagctcaatagaggggagaccctttaccctgggggaaacagcagctcttccttcccctcatcctctctcaggacccccgccggggctttggcattgcgatctctggaggccgagaccggcccggtggatccatggttgtatctgacgtggtacctggagggccggcggagggcaggctacagtgagtatccaggcagctgggttctggcgggggagggcacgtggagaggagaaaccaggccaggcacagtgactcacacccgtcatcccagcactttgcgaggctgaagtgggcggatcacctgagttcaggagtttgagaccagcctggccaacatggtgaaaccccgtctctactaaaattacaaaaattagcgggatgtggtagcgtgttcctgtaatcccagctactcgggaggctgaggcaggagacttgcttgaacccgggaggcagaggttgcggtgagccaagattgcgccactgcactccagcctgggtgacagagtgagactctgtctcaaaaagaaagtaagtgaggtgaggagaaacctttgtgagcctggcactttccagctctgtcaacacagggctcggacttggcagtaggacagtgtcagagacttgggcctcacttccctaaggtacttcctggtccttcacaggaattcttggggtcatagtggccccagagcccttttggaacataaagtcctggaaaccatcgagtgtttgagggtttgatgcttcttggaattatgttgttaaaatggttctgggccccaagtggctgacaggtgatatggctcagcccagcccagaattagggaccaccaggttcagagagaaagagctagaaagaaaatatgaaatacagacaggaagagagggaaagaaaagcagaaagtggggatttgtggtgtggggagcgaggagtgagaagatgccaggtgtagctgtagcttcaaggccgggtgcagtggctcacacctgcaatcccagcactttgggaggccgaggtgggcggattacctgaggtcaggagttcaaaaccagcctggccaacatggtgaaaccccatctctactaacaaatacaaaaattagacgggtgtggtggcgggcacctgtagtcccagctactagggaggctgaggcagaaggatcgtttgaaacgaggaggtggaggttgcagtgagttgagatcatgctactgcaatccagcctgggcaacagagtgagactctgtctcaaaaaaaaaaaaaaaaatgtagcttccactctatgattatagtaggttctacaattggctccattttacaggtgagaaaacggaggcccagaaggataaatgtctttgtgaacctagggacaccaatgaattagaaccaggccttgtagatctggaggttccaggggcaccccctccccagggagggcttgttacgagggtctcccctgcaaagcctcctccgtaagacccgccctcctctctcaggacaggcgaccacatcgtcatggtgaacggggtttccatggagaatgccacctccgcgtttgccattcagatactcaagacctgcaccaagatggccaacatcgtgagtaggcagcccctggcatggccagcatctctgaccccagcctgggtcgtgccgctgtgggggttgtaagcttctgagagcaaggagtcatcttctcatcttacagtttggacattgaggcccagagagagactggtgtcccccagggccacccgggggctgagcagagcctcccccagcccttgcctgtagctgacccttcctgtcccctcctctaacagacagtgaaacgtccccggaggatccacctgcccgccaccaaagccagcccctccagcccagggcgccaggactcggatgaagacgatgggccccagcgggtggaggaggtggaccagggccggggctatgacggcgactcatccagtggctccggccgctcctgggacgagcgctcccgccggccgaggcctggtcgccggggccgggccggcagccatgggcgtaggagcccaggtggtggctctgaggccaacgggctggccctggtgtccggctttaagcggctgccacggcaggacgtgcagatgaagcctgtgaagtcagtgctggtgaagaggagagacagcgaaggtcagaagaggcgggaggtcggacacgatcagtactggacacagggcaccgtggtcggatgggcgacggtttcaagtgattctcctgcctcagcctccctggtggctgggactccaggcgcccgccaccatgcctggctaatttttgtacttttggtagagatggggcttcaccatgttggcaaggatggtttcgaattcttgacctcaggtgattcacccacctcggcctcccatagtgcttgctgggattgtgggcgtgagccaccgcgcccagcctggaagctacaactacacctggcatcttcttgctcctcgctccccccaccacaaatccccactttctgcttttctgtccctttctgcctgtctgtatttcatatattctctctagctctttctctctgaacctggtggtccctaattctgggctaggttgagccatatcacctgtcagccacttggggcccagaaccattttatcaacatgtccccgcgctgatccccgggacctctgtttaggccacctcacttagcaagagggactcagcagatgggatggagtgaaggaccctgagctcagaggtgatcctggatgatctggggggcccagtgtcaccacagggtccttataagaggaggcctggctgagtgtggtggctgatgcctgtaatcccagcactttgggaggccaaggcaggcagatcacttgaggccagtagttctagaccagcctgaccactatgatgaaaccccatctctactagaaatacaaaaattagccaggcgtggtggtgtgcacctgtaatcccagctacctgggaggctgaggcacgagaattgcttaaacccgggaggtagaggttgcagtgacctgagattttgccactgcactccagccccggcgataggagtgagactccttctcgaaaaaaattaaaaaataaaaaataaaaattgaaacaatgatgatgttatgagcaatagaatgcccttagcctgtgcatggcaacatcacgagtggcacggtgacctggtgtccccgccccgtggagatgtcattgacacaatcagatctcgggtcctacgggcgacatcactgttctccttatgatgccatcaaggtgttaggatgggagggcccgcacctggactgcttacagcaggagaatgctcccaggcacccgtctccagagtcctgcctcagtttccctcctccccccttacagagtttggcgtcaagctgggcagtcagatcttcatcaagcacattacagattcgggcctggctgcccggcaccgtgggctgcaggaaggagatctcattctacaggtgaggccgggcttcttgtcctgagagcagggagacaaggcagggttggggcgggcagtcccacggagtcatacagcaaggacagcagaactgggccccaaagcatttaccttcagtgttgttgcttgtatctcaaaggttgcagatggccaggcataaaaccccctttttccccagctactactaatccacagccaaatgtcggtttctagtatccccatggggttgtctgtttctaataccctctagctttgatgtgcatcagagactcatgtgggcagctgactcctggacctaccctaggtgactggatgctaatgacccagtcaccaggtttaggggagctgccctgccctaaaggatggtatctttctggattcttcccctgaaagtctgtttctagtgactcctagtgtttgatttccaaattgctttcagctgattatttccagtgtcttcaaaaagttatctgtttctttttttttttttcagacagagtctcgctctgtcacccaggctggagtgcagtggcgcaatctcggctcactgcaacctccgcctcccaggttcaggtgattctcctgccttagcctcccgagtagctgggattacaggtgcccgccaccacacccagctaatgtttgtatttttagaaaagacgggtttctccatgttggccaggctggtctcgaactcctgacctcaggtgatcccccccgctcggcctcccaacgtgctgggattacaggcgtgcaccaccacaccttgctaattttttgtatttttagtagagacggggtttctccatcttggtcaggctggtctcgaactcccgacctcaggtgatccatccgcctcggcctcccaaagtgctgggattacaggcatgagccaccacacccggccgacattaagttctttctaggaattgtgtgtttctaatctacctctagatgactgttttcttttctcttttcttttctcttctcttttttcttttcttttctttctttttgatatggagtgtcgctctgtcacccaggctggagtgcagtggcgggatcttggctcactgcaacctccacctcccgggttcaagtgattctcctgtctcagtctcctgagtagctgggaccacaggcgcccaccaccacgccctgctaatttttgtatttttagtagagacagggtttcaccatgatggccaggctggtcttgaactcctgacctcaactgatctgtctgcctctgcctcccaaagtgctggcattacaggcgtgagccaccgcgccccactctagatatctgtttctagttatctcccagaagattgtgtgtttctagtatcttttaagtatctgatactccctcttctccagttagagttgtttataatgtcaccctcacatctgttcctagtatcccctgagacatttccacttttggtaagaaaggagagtcaacctgtttctcattttccccagtgtctcccacccctcttagaacattttctgtttctagaattcggtgctcagttcttggtgtggtctccactcacagcaggaatccaattcaacactttccttagggagtggctgtttttagcaacctctgggggaattgtctgtttcaagttcccccacaccaggctgtttctactgtctcccatctctcattaactcacttccgctctttcattcctggtccctttcagatcaacggggtgtctagccagaacctgtcactgaacgacacccggcgactgattgagaagtcagaagggaagctaagcctgctggtgctgagagatcgtgggcagttcctggtgaacattccgcctgctgtcagtgacagcgacagctcgccattggagggtgaggacctagaggttaggacctgggagggggttgaatggatggcagggaaggtgggaagccccaggcagggccaaggaatcaatgagcctggtccctagaggctcagagagtgacaggaacttgctgaaggccacacagcaagtcaagagttcaggggggcgatctcggctcactgggttcaagcgattctctgcctcctgggttcgagcgattctcgtgccttggcctcctgagtagctgggattataggcgtgagccaccgtgcccagctccagagccgaatcttctaactgagcttctgactttggtctagggccctttgtttagaggggtgttgatatacccctctgtaaaatgggtccagtccagaaggcgtgaccatggctgatgagatgtcctctccccctgcagacatctcggacctcgcctcggagctatcgcaggcaccaccatcccacatcccaccaccaccccggcatgctcagcggagccccgaggccagccagaccgactctcccgtgtaagtatcacccatcggccagaatggtgatagggagggagagggaggtgggagggagaggggaacgcgggcgtagctttccaactgggggtaaccttgaggacgcagtcctgtatttctagcatgtgcctcaaaatacctccagcctctacccattacccagttccaaagccgtgtccgcatttgtaggtgttggttacagcagcaccccacttcttagtatcaaactctgccttaggccaggtgcggtggctcacgcctgtaatctcagcactttgggaggccgaggagggtggatcatctgaggttaggagttcgagaacagcctggccaacgtggtgaaaccctgtctctactaagataccaaaattagcccggcgtggtgccgggtgcctgtaagctcagctacttgggaggctgaggcaggagaatcacttgaacccaggaaatggaggttgcagtgagccgagatcgtgtcattacactgcagcctaggcaaccagagcaaaactctgtcttaaaaaaaaaaatttctttttcctctatttatttatttgttttgagactgagtcatgtgagactggctaattttcatatttttggtagagatggggtctgtattgcccagctatgttgcccaggctggtcttgaactcctgggctcaagcatttggcctgcctcagcctcccaaagtgctggtattacaggcgtgagccaccacgcccagcccagataaattaaaattatttttattttgtttatttatttatttatttttttggagacaaggtctcactctgtcgcccaggctggagtgcagtggcatgatcttggctcactgcaacctctgcctcccgggttcaagcaattctcctgccttagcctcctgagtagctgggattacaggcgcccaccatcatgcccggctaatttttgtatttttggagagacggggtttaacctcgttggccaggctggtcttgaaatcctgacctcaggtgatctgcccacctcgacctcccaaaatgctaggattacaggcatgaaccaccgtgcccggcctaaaattctttttaaaatggccccttgaaatccatccctgcctcactcccaatctgttccccaccagggagagtccccggcttcggcgggaaagttcagtagattccagaaccatctcggaaccagatgagcaacggtcaggtgggtggtgactctgagcacccctgtccctgacatttctgatccctgacagcaaggctgtgccaggcagagctgggggaggttggcctgagcctaagtggtgagacatggtttcctgagaaggactcgaggtgggtgacagtccttccaggatgaggacataaagcaaaggtttggaggctggactgagccagtgtgcttgggaaagagactggcttttccctttcagagttgcccagggaaagcagctatgacatctacagagtgcccagcagtcagagcatggaggatcgtgggtatgtaccccagaagaaagcaaacccgctcaaaactcctacatcccaggctgcctccctcatcagcgcaatcctgcctgcttgtatccattgtgttgagtgggaccattaagtgggggttttggggaaactgaggcctggagggggtgggggctttcccaaggacaatgctgagccctccctttgtccgcccactctgctctgaccccatctctgcctccccttgcaggtacagccccgacacgcgtgtggtccgcttcctcaagggcaagagcatcgggctgcggctggcagggggcaatgacgtgggcatcttcgtgtccggggtgcaggcgggcagcccggccgacgggcagggcatccaggagggagatcagattctgcaggtgctccgggggcggctggccagccccactgatcatgggcgtgcagtgtgctaggtcctgcccttgtctgttccagtcctccccttgggtccacctggggactgtcgagaccccagatgggtatttgaacatttcagtgtctccttggctgtgtcatgattttgctgatgtcacgaccttatcttccaggtcatgacctcatcgtccagttacaacctccttttctgtgccttgaccttatctgggttcattttttgttgttgttgtttttgagatggagttttggtcttgttgcccaggctggagtgcaatggtgtgatcttggctcaccgcaacctctgcctcccaggttcaagcaattcttctgcctcacctcctgagtagctgggattacagttgtccaccaccacgcccggctaatttttatatttttagtagagatgagggtttcgccatgttggccaggctggtctcaaactcctgacctcaggtgatccacctgcctcggcttcccaagtagctgagattacaggcatgagccactgcgcctggctaactttttttttttttttttttgagatagagtcttgctctgtcacccaggctggagtgcgggggtgtgatcttggctcactgcaacctccgcctcccgggttcaagggatcatcctgactcagcctcccaagtagctgggatcacaggtggccgccaccatgcccagctaatttttgtgtttttagtagagacagggtttcaccatgttggccaggctggtcttgaactcctggcctcaagtgatgcacccgcctcagcctcccaaagtgctgagattataagcttgagacactgtgctcaagattgggaacaacaatcttgttgttcatgtcatatgacattgttcatgtgacattcttgttatcaatgtcacaatctccttgttatcaatgtcaggactttgggtcacagcctcattgcctatgtcatgaccttgtctgggtcgcaatcctcttgttcctgacattggctgtgttgaccgtgtcatgaccgtcttgtatgtcctaatcgtgtggtcaggtcacagatcattctctcatgatctccatgtccacttatagtcattttctgtgccaccatcccctgtgtctgtgttgtgaccttgcctgtgtcctgccttcatgacagtgtcataactacctccaggatccacagcccctcatcatccccccatctctgtccttgcctcatctcatccccaggctgtctcccctgtcccttgcgcgagttcactcaccaagtctcacccccactttgctctcatgaccttgcttgtgtcttgaccttgcagtgtgagttgtgattcatgatggagtcacagctccccactttccatgtcataagcccactggctgggtgaaaacttgatgccaaattgcctgagggtcatggtattttttactgtatttctactcattttgcttgtgggattctaaccttgacatccacgtcatgaccccgagagtaggtgtctgtgcccacaagctgtgcaagtatattgctgtccctgttatgaccctgagagcaggtggctgtgtctgtatattgctgtccatgtcgtgaccctgagagcaggtggctgtatattgctgtccatgtcatgacccggagagcaggtggctgtatattgctgtccatgtcatgaccctgagagcaggtggctgtgtctgtatattgctgtccatgtcatgacccggagagcagatggctgtgtccatatattgttgtccctgtcatgaccctggtggtaggcatctgtgacccactgtgtgtccatatatcgttgtccctgtcacgaccctgtgactactgtgactacgtctgagttcttttgagcatttcacacagtttccatcgagctccatgccatgacctctgttcccatgttttgatattgacaacccaccatgatttggttatctgaggacaagtgcagtgcctgtgcccgtttctgtgtcaaaactcttgtatccttacaatgccaccagctgtctgtgtcacacatcacacagccatagggtgataccccagtcggaaagccctcggggaactgccgggtcccttggcagcagctctggaagcagctggggctgagttttgcccagaggaaggtccaggatctcatgcacgcccaagaggtaccagagctttttctatagctgcacttgctttctggcaggtgaatgacgtgccattccagaacctgacacgggaggaggcagtgcagttcctgctggggctgccaccaggcgaggagatggagctggtgacgcagaggaagcaggacagtgagtgcgcgtggatatgggtgtgcctgtgtgttgcggggggaggacctggctgtgtggcctggtggtgagtgcagggatgtggttgaatctgcatctctgcaccctccatccctctccctggcccctacagggagagtgccccaaatctccagccaggcccactctcgggtggggagggctcagatcaggcagcagcccaggcagctcatgtggcctcccgctctccccagttttctggaaaatggtgcagtcccgcgtgggtgactccttctacatccgcactcactttgagctggagcccagtccaccgtctggcctgggcttcacccgtggcgacgtcttccacgtgctggacacgctgcaccccggccccgggcagagccacgcacgaggaggccactggctggcggtgcgcatgggtcgtgacctgcgggagcaagagcggggcatcattcccaaccagagcaggtggggactgtgtgctcctgcagtggggcacttctgcttcagcctcagtctccccgttagaaatgggctcgattgggctggacgcggtggctcaggcctgtaatcctggcactttgggaggctgaagtgggcagatcatgaggtcaagagatcgagaccatcctgggcaacatggtgaaacctcgtctctactaaaaatacaaaaattagctgggcgtggtggcacatgcctataatcccagcttcttgggaggctgaggcaggagaatcgcttgaacctgggaggcagaggttacagtgagccgagatcacgccactgcactccagcctggcaacagagtgagactcttgtctcaataaataaataaataggcatgatatcactgcttagcagtgttggtggttcaatctgaggaggtccacaaaaggctctgggcgggccccatttggtgctggtatgagcttcctgttgttgctgtaacagatgcccagaaacttagtggctttaaacaacacacacatcctcttacagttctggagagcaaaagtactaaagtcaaggtatgggcaggcctgggccctcccagaggctccaggagaaaaccaattttccacctttcccagagtctagaggggccgcatccctcagctcggggccccttcctcccccttcatagccacagcacagcctcttctagtctctctctgactctcaccctcccgcctcttcttgtgaggaccctgtgaggacatcgggtcccctgggtcacccaggatcatcatccacctcaatagcatcagtttaatcccatctgcaggccaggcacggtggctcacgcctgtaatcccagcactttgggaggctgaggcgggcagatcacgaggtcaagagattgagactatcctggccaacatggtgaaaccccatccctactaaaaatacaaaaattagctgggcgtggtggtgcatacctgtaatcccagctacttgggaggctgaggcatgagaatcgcttgaacctgggaggcggaggttgcagtgagcagagattgcaccgctgcactccaacctggcgacggagcgagactctatctcaaaaaagtaaataaataaataataaagattagctgggcgtggtggcgggcacctgtaatcccagctatttgggaaagtgaggcaggagaatcgcctgaacccaggaggcagaggttgtaacgagtccagcctgagtgacagagcaagactttgtctcaaaaaacccaaaataataataatagtaataataatcccatctgcagagtcccttttgccatacaaagtggcctgtccacaggctccgaggggtaggacgaggacgtctttggggccaccatgctgctgaccccagtgctcagtactgtcccctcttctccccagggcggagcagctggccagcctggaagctgcccagagggccgtgggagtcgggcccggctcctccgcgggctccaatgctcgggccgagttctggcggctgcggggtcttcgtcgaggagccaagaagaccactcagcggagccgtgaggacctctcagctctgacccgacagggccgctacccgccctacgaacgagtggtgttgcgagaaggtggggcccggagctggaggggccctggggaggcctcacacacagctcctggtgcacctgttcactaacattcagcctctaaaaggcacagtcttggcccggcgtggtggctcacgcctataatcccaacactttgggaggccgaggtaggaggatcgctgaggccaggagttccagatcaacctgggcggtaaagcaagactacatctctacctcaaatttatttatttatttatttttgtttttatttttatttttagacagagtcttgctctgtcttaggctggagtgcaatagcgtgatctgagctcactgcaacc

SEQ ID NO: 224 - DNA, 2809 bp, Homo sapiens
  source 1..2809: mol_type = other DNA
gcagagctaccatgtcctcttggagcagacagcgaccaaaaaggtaggtccccacactacctgtcctaggcaggtttgaacgccagaccatgcggagatacaggacattccagctaacccatagaagtcacagggagcagatacaggcctggtggctggcacagatcaaccttatctgtgacagaaagactggcgcgtgcacacacacacacacccctacagaagcccaggtgggcatgggcagcagggagccgggggaggcttcttgttagaggcctggggccacagtgaccaaggctgtcgagatcatgtctgatggctgccgggccagggaagccctggaggaggaggggaagccccaggcttccaagggttgtggtgctaagtgtaaaccaccgcttcccaaggccaaatgcccaccctcagacctggccaaagcaggacacacttttcatgttcagaggctgcagtgagctgtgatcatgccagttccctccagcctgggcaactgagcaagactctgtctcaaaaacatgaacctgaacgtctgtcttcctccaagcacccaattggtcaagagtggacaaaaagaccaggatcccagagcagagaagtcttcatggaaaagagggcattggagctggggctttgaaggatgaataggagttcacatcaaaacacagagccagggagacaaggactgacccagaaaataagccagatcagaagaaactagcaagttggactgtgaataattaacagctcatgggggctaggctggtgatggggaagtgtattcatattatgcgggagttacactcagaaactcaactttcctagaattataattctccctggaacaggggccacttctggcagctgtcgggggtgagggtagaagctggaagaggaggaggaagcaactgccctagtacaggtgagagatgaggtagcatagtccaggctggtagccgcagagatgggaagaagtgggcggatttgctggtgtattttcacctagctgagtgtattttcactgtggtttagtaagcatcttctgttactgcctgcagcccagggggcattcaaccccatgtttctagaactctgttcctgctgctgctgttggcagcctcagcctggggggtcaccctgagccccaaagactgccaggtgttccgctcagaccatggcagctccatctcctgtcaaccacctgccgaaatccccggctacctgccagccgacaccgtgcacctggccgtggaattcttcaacctgacccacctgccagccaacctcctccagggcgcctctaagctccaagaattgcacctctccagcaatgggctggaaagcctctcgcccgaattcctgcggccagtgccgcagctgagggtgctggatctaacccgaaacgccctgaccgggctgcccccgggcctcttccaggcctcagccaccctggacaccctggtattgaaagaaaaccagctggaggtcctggaggtctcgtggctacacggcctgaaagctctggggcatctggacctgtctgggaaccgcctccggaaactgccccccgggctgctggccaacttcaccctcctgcgcacccttgaccttggggagaaccagttggagaccttgccacctgacctcctgaggggtccgctgcaattagaacggctacatctagaaggcaacaaattgcaagtactgggaaaagatctcctcttgccgcagccggacctgcgctacctcttcctgaacggcaacaagctggccagggtggcagccggtgccttccagggcctgcggcagctggacatgctggacctctccaataactcactggccagcgtgcccgaggggctctgggcatccctagggcagccaaactgggacatgcgggatggcttcgacatctccggcaacccctggatctgtgaccagaacctgagcgacctctatcgttggcttcaggcccaaaaagacaagatgttttcccagaatgacacgcgctgtgctgggcctgaagccgtgaagggccagacgctcctggcagtggccaagtcccagtgagaccaggggcttgggttgagggtggggggtctggtagaacactgcaacccgcttaacaaataatcctgcctttggccgggtgcgggggctcacgcctgtaatcccagcactttgggaggcccaggtgggcggatcacgaggtcaggagatcgagaccatcttggctaacatggtgaaaccctgtctctactaaaaatataaaaaattagccaggcgtggtggtgggcacctgtagtcccagcaactcgggaggctgaggcaggagaatggcgtgaacttgggaggcggagcttgcggtgagccaagatcgtgccactgcactctagcctgggcgacagagcaagactgtctcaaaaaaattaaaattaaaattaaaaacaaataatcctgccttttacaggtgaaactcggggctgtccatagcggctgggaccccgtttcatccatccatgcttcctagaacacacgatgggctttccttacccatgcccaaggtgtgccctccgtctggaatgccgttccctgtttcccagatctcttgaactctgggttctcccagccccttgtccttccttccagctgagccctggccacactggggctgcctttctctgactctgtcttccccaagtcagggggctctctgagtgcagggtctgatgctgagtcccacttagcttggggtcagaaccaaggggtttaataaataacccttgaaaactgg

SEQ ID NO: 225 - DNA, 32746 bp, Homo sapiens
  source 1..32746: mol_type = other DNA
caggggtgccatcttggctcactgcaacctccgcctcatgggttcaagcaattctcctgcctcagcctcctgagtagctgggaccacgggtgcatgccagcatgcccagctaattttttggtagagacagagtttcactgtgttggccaggatggtctcgatctcctgacctcgtgatccacccacctcagcctcccaaagtgctgggattgcaggcgtgagccactgcacctgggctttttctttttttgagacaaagtctcattctgtcacccaggctggagtgtagtggcgcgatctcggctcactgccacatctgcctcccgggttcaagcaattctcctgcttcagcctcctgagtagctggaattacaggcatgcaccatcaccatgctttgctaatttttttttggtatttttatttattttatttttattttttgtgatggtctcactctgtcagccagactggagtgcaatggtgtgatctcggctcactgcaacctctgcctcctgggttccagcgattctcccacctcagccccccaagtacctgagattacaggcaagtgccactgcaactagctaatttttgtatttttagtagagacggggtttcaccatgttggccaggctggtctcgaacttgtggcctcacatgattcgcctgccttggcctcccaaagtgctgggattacagttgtgagccactgtgcccaggtgcatacacactcattttcatcttaaagactctacatttatattggtctatattggaaaaaacatagagatatggccaggacctgaaatctggtgcgcactgaagttgatcagggcagtgtgtgcttaatctgaacatcgacaccatcaggaagcagcaactccctgcatgattgacatttctctttttttttgaggtggaatctcactctgttgcccaggctggagtgcagtggcgtgatctcggctcactgcaacctctgccccctgggttcaagcgattctcctgcctcagcctcccaagtagctgggattacgggcatgggggttacaggcacctgcccccgtgcccggctaatttttgttctttttgtttttgtttttgttttttttttgagattggagtctcactttgtcacccaggctggagtgcagtggtgcgatctcggctcactgcaagctccgcctcccgtgttcatgccattctcctgcctcagcttcccgagtagctgggactacaggcgtccgccacaaatgcctggctaattttttgtatttttagtagagacggggtttcatcatgttagccaggatggtctcaatctcctgacctcgtgatccgcccaccttggcctcccaaagtgctgggattacaggcgtgagccaccgcacccagccaatttttgttatttttagtagagacagggtttcaccatcttggccaggctgatcttgaactcctgacctcatgatccacccgcctcacttggcctcccaaagtgctgggattacaggcatgagctaccacgcctggctgacatttctctttatgcctgcatctcccccattggatgggaagtccctccagggtgagaccttgtctaagtgaactttgtgcccatcaatgtctgcgtgacccaggcaggatctggctcagccaggagtgggtgtggggggtggaatcaataaaagtttgttgaatgacttaatgacctctgagaatgtatcattttgcaaaagggaaactgaagccctttgcactctaacaattattcctggcacctgatttgcacatggtctggtgcctgagagggagggacattgaatcataggaggggctaggaagtacccattctctagcctggcaggccttatttcttgtcttggctgtatcttgcattattttatgtgatagcttttgtgggcattggcctcttatttccctaagtcaagctcatccaacccctgacccacgggccacatttggcccaggatggaatatggctcaacacaaattcgtaaactttcttttttttttttttttttttttttttgagacagagtcttgctcagtcgcccaggctggagtgcagtggtgtgatctcggctcactgcaagctctgcctcccaggttcacgccattctcctgcctcagcctcccgagtagctgggactacaggcatgtgccaccatgcccggctaatttttttttgtatttttagtagagatggggtttcaccatgttagccaggatggtctccatctcctgacctcgtgatccacctgcctcagcctcccaaagtgctgggattacaggtgtgagccaccacacccggccacaaatttgtagtttcttaaaacattatgagatttttttgcaattttttttttagctcatcaggtattgttagtgttagtgtattttattatttatttatttatttatttatttttgagatggagttttgctcttgttgcccaggctggagttcagtggtgcaatctcggctcactgtaacctccgcctcctgggttcaagcaattcttctgcctctgcctcccgagtagctgggattataggcacgtgccaccacatctggctaatttttgtatttttagtagagacggggtttcaccgtgttagccaggctagtcttgatctcctgacctcagtgatccgcctgccttggcctcccaaagttctgggattacaggcgtgagccactgtgcccggccagtgttagtgtattttatgtgtggcccaagacaattcttcttccaatgtggcccagggaagccaaaagattggacacccctgctctaagtgacttgtgagctttttttctgagacgcctggaatagtttgttactcatgtttttaaatgattaacttgagcaattattactattttttgagacagagtctccttctgtcacccaggctagagtgcagtggcgcaagcatggctcactgttgccttgatcttctgggctcaagaggtcctcctgcatcagtgtcctgagtagctgggactacaggtgcacaccaccatgcctggctaatttatttttattttttgtagagaagggttctcactacgttgcccaagctggtctcaaactcccgggcgcaagagatcagccttcctcggcctctcaaagtgctgggattgcaggtgtgagccactgcacccagctggacaattaacctgagctaatttgaaaaattttgatgttctcaagatgactagggaactggagccctcaatcaacagtcctcagtatcttttctgcagggagggctagatacctcctctgtgacacttaacttccattatccaaggtgcttaggctgtgcccctcaccacgtgtacatgaagaatgcatgcccagccaatcacagtggctcatgcctgtaatcccagcactttgggaagtccaggcgggcagatcacctaaggtcaggagtttgagaccagcctggccaatgtggtgaaaccccatctctactaaaaataaaaaattagccggacatggtggtgcggacctctagttcctgctactggggaggctgaggcagaagaattgcttgaacccaggaggtggaggttgcggagagccaagatcataccactgcactgcaggctgggcaccaaagcaagactccatctcaaaaagaaaaagaaaaaaagaaaaagaaaaatgtattccctctttcagccacgttgagttttcgcaacagcgctacaaacagatgatgtgttctgatagaaataggctaggttcctgcagcaggtgctgtcattttggaagagctcaagccgtctcacaccctcaggtgggcctgctcatacctgtggtgtgggttctacctggctgatggctgagggtctagaattgtgtgcagtagcgttgatcgtgtactgaggttgcaaacagtgaacagcaccatctggacatcgtggattagaatgcaggagcttcccaaggctgctatgacaaaggaccacaaactcagtggctgcaaaacacacatttatttatttgttgatagagccttgctctgtcacccaggtgggagtacactggctcgatcttggctcactgcaacctccgtctcctgggttcaagtgattctcctgcctcaatctcctgagtagctgggattataggcacacaccaccctgcccagctaatttttttttttgagacacagtctcgctctgttgtccaggctgaagtgcagtggcacgatctctgctcactggaacctccgcttcccaggttcaagcaattctctgcctcagcttcccgagtagctgggattacaggcgccggccaccacacctggctaatttttgtatttttagtagagatggggtttcaccatgttgaccaggctagtctggcgactcctgacctccagttatctgcctgcctcggcctcccaaagtactgggattacacgtgtgagccaccacgcccggcccacacatttatcatcttacagtttgggaggtcagaagtctgaaataaattttaggggcagggcgggttctaggagtctttcttgctttttctagccaccagaggctgcccatcttccttgcctcttggcctgatctttttttttttttttttttttttttgagactgagttttgcttttgttgcccaggctggagtgcaatggcgcgatcttggctcaccacaacctctgcctcctgggttcaagcgattctcctgcctcagcctcccgagtagctgggattacagacatgtgccaccacgccaggctaattttgtgtttttagtagaaacggggtttctccatgttagtcaggctggtctcgaactcctgacctcaggtgatctgcctgcctcggcctcccaaagtgctgggattacaggtgtgagccaacgcgcccggcccttggcctgatcattgtaaagcctgcttccactttcccatctcctttgactttgaccttttgtatccctttttcacttattaggaccttttaaggacattgtgcccacctggatcacccaggagacgctccccaactcaaaatcattaactgaatcacacctgcaaagttgcaaagtccttttagctgtgtaaggcactgtattcacagatcctgggggcgaggacgtgggggtctagagacgcatatcttcgggggccatgatctgtctcctatattagggacatagcagaagtcccactgaccagatagaggagacttaatagagtgacgaagaaactgtaaaaagctaagtgggaactcaacatttttctgctcacagctctcaagggaaagaccaaagtcctccccggtggccttcaaggtattatatatcacccctctgacctcaactccccctcccctttgctcagtgggccccaaccacaccagccccttcctgctccctggacacctctaagccttttccggcctctgggtttgactttccctcctagacccatctgtccttggagtctcatctccgattccagctcaaatgtcatcttctctgagaggcccaccgcagtggccccagtgagagagtatcctctctccccgcctcccaccacatggctgctggtcactctcctataaggaatcatctgaaattatctgctttagttattcatttcttgcctgtctcccccagataggaattttccctccctgagaccaccaactgggtctgccatgtacaccgctgggttctgcagctctgagcaacctgtccggctgctttgtaggtgcccagcacaggtcactcctgtgcccgccaggactggtcagagtggaacagacagggcggagggggcagggcagccctgcccgcctggacagcctggagaaggcgggaaaacgaggcgggaaaagacagcaaacaagccctgcgggtgggtagagtggggagccctggcaggccctgacgccaggcagtggggcttggggcgatcgggcgagccatcagggtgcaggtggtctcctaggggccccccacattccctcgcagtatttacacattgattccggccttcttagacctactggtcaatgcgtgcgagtggggggctgcgaacggacttggacttaagagttcagggggtctgtaccctgggggtccccaaggctcctggggtgtccacgtgcggggggtgaccaggccctgccacgcagcccctttgcacgctgggcgcgcccagcagagcgcgcagggctgggcggagccgtggcccactaggcggaggcgccgtggacagaggcgggggcgccccccaccctctttctcgcttcccgccactgcgtcggccaatcaggaggcaggcgcccgcccccggcacggcctcctgcggccccgcaactcccaaatgccgagttttcgcgggaaaaaaatcagagcagctggcagcgcggcgggcagcgtttgccgagcgggcgctccgggtcgcacgcaagtccgcgcggggtccgggccacgcacgcggtttcatcgccatccccagccgggccacgcgcgcaggcagacaagctgttcgcggcgaccggagaggtgagcgggcgggccgggtcggggtgccagcccgggccgggcgcacggggctcgggaactttgcaaaactttcccgcgcggccagcccgggcgcacgcatgtcccgcactctgtcccgggatccagggcctccccttccacctaaccctcgggaatcgttccccggcacacatccggctggagccgggaccagcgctgcgtccccggagcccggcggggggtcgagcgcgccgggtgggggagggcctggcgagccgccggggaggatgtcaggctccgcgcctgcgcgcggggcgccccgcgattcaattgtcgcgcccgagcccgatttcgcgcgccctgagttccccgggagcatctgggccaatggggagcgagcggggcggggcggccgggtgctgcggagccaataagaggcggctcaagtgaaggggggcgggacttgacgagcgggggccccctctgtagtcccggcggcgggggtgggcgtgggctcgctggcgcgacccgcgcgggccagtgggagtgcgggagggacgccgagggtccagggtttggaggggcgcgagctgccgggggttggaggtcgaggtgagtcgcggggcgcgcgcgctcgcgggtggccgggacggggcggccggttaccatggccaccgcggggcgggcccggtcgcgcacgcgcgcggggggggccggcaaggagggggggcgtgggcaccgaggggtcccggggtccgcggatctcgggtggggtttttccctctcagtggcacttggttgagttcccccgggacttctgaagttccggcccgcgctggacttctgggattccctcttccgtaaataggaatccgaggaatgaatgaatcaatgaatgaatgaataaacgaaccaactcggccacttggcccgggcctcctttctcctctggtcgtggggaaggagggatgggttggaccttctgcttttctttcaattccctcttttcattctccttcctcctcaatcttcaacacttggctagtcgttaatgccttaagtgcttaatttgttgtgtctggtcctggccagggtctggctgtacaggaggactggaagggcatcctgggagtttcctggtgtccacaggccggacaaaagcaaccccgactccttagagcatggcatggctcagaggtgctggtaaaactgatgggggtttttgctgtccctcccctcagcgccgacaccatgtggatccaggttcggaccatggacgggaggcagacccacacggtggactcgctgtccaggctgaccaaggtggaggagctgaggcggaagatccaggagctgttccacgtggagccaggcctgcagaggctgttctacaggggcaaacaggtacacccgccgccagcacctttgttctatgcctggtccaggcctcgcgcctctgcagccaccagccgatactttctccctcccacctccccccccaacaacctcgtccggtcccacttcatctctcccggaaggagaagtccacagaaacctcaaatgcctgcgagaggaaggaacaaagggaggactcacagattgacacgctgggctggcggctggccctcgaatctatagggtctgggcttttaaacttcttttttcaaagctccgcctcaaaataatggctagagaaagaagttttggaggtggccgatggaaggctgaggaattttcgagaaagggcccaggaccatctggtagctaggacggaggggaccaggttttcttttttaaacatccaccaccaattgctctcagcctgtaccggttaagcatcagaccctgcgagtgtttgtttctaaaaatttggattagcttattcagagtctggagatggcgcttgctaatcaggaatttccgccaccctgagcctgctgtgctgcggctgctgctgacctggggcgtgtggtccccgaggggtccaccgaccctcgtctctttctctgttctgtctccagcccctcgttgcatttaaaatgtccccctttgatttcatagctgccacgtttggggcgctccctccattggcacctgggggtggaggtgctactttggttggtgtttttgtgggggactgtgggacctactgggagtggggtttcccggcaggatgagacagtgtgatcgaaggtgtaggtcccatctgctggagttggttggaccgtggggacgggcgtagactactggaactggattaaaagtcgtcagttgagctgcgtgtaccccactgtgttgttgttggattttgaaccgggtactgctgccatctggtgtctaggttggaaaataaacactgcgcccggccaggggtttttgggggctgggaggatcatgcctgctcactccagatgagacctgatgattaatttctctggcttgcatgccataggagaccttcattagccctcttcccgtaagagacgtgatgacttgagtcttaagaatctgagttaacccgccctgccccgggaggaggcgatctggagaacttggggagttgacggtgcaagccgcgtgtgtgcagagaagaggcagggccgggctcgacagaggagctccgcctggcgctctcttcctccctcctcctatgatgcgtgctccctttgtggcatccaaactgattttgatttgccactcagcctattgggtcagcacagaaggcttcatttcacaaagagtttctgaagcctgcaaggaccttctaagttcacagcgtaggtcagtggcgggttggactctcatgctcccaagttcaggagaggagataatgctgagtatccactctatgccagccaccgagctagcattttaacttttgcatttcaaccatgcaggaatgggaaaacacctagacacacctgccatgtagatttcaccatcggtattctgacttattaggtttatcttgaagcgctctgtctttctctctgcccgccaatccatctttttgggatgcatttcaaagtaagttgcagacaccagtccacctttcccttattactgcagcacaccgtcagtacctagagctcagtatttgtttttggttctgttttcattgattttttttgttgttgttcctatttgagacaggatctcactctgcccaggctgtgttgcagtggcacgatcacagctcactatagcctcagcttcctgggctcaagcaatcctccagcctcagcctcccaagtagctaggactataggcatgcaccaccatgcctggctagtttttgtatcttttgtagagatggggtcttattatattgcccagggtggtctcctgggctcaagtgaccctcctgccttggcctctcaaagttttggggttacaggcgtgagctacagtgccggacctaaaagctttgtctatagtgaaacagatgttagacagactgaataattttgacaaatgtctacatccatgcaacccaaaacccctatctcccctcatttgtaacataatacttgagtcatacaatagtgtctgtcacatttctaagtttagtgtgacaatgacaggaacacgtatgttaattagacatgtacattgtgcttttttttttttttttttgagatggagtttcattcttgttgcccaggctggagtgcagtggctcgatctgggctcactgcaaccttcatctcccaagttcaagcgatcctcctgccttagcctcccaagtagctgggattacagtcacccaccaccacgcctgattaattttttgtatttttagtagagacggagtttcaccatgttggccaggctggtcttgaactcctgacctcaggtgatccacctacctccgtctcccaaagtgctgggattacaggtgtgaaccactgcacccagccacgtacattgtgcttttaattgtcaggatgtccgcagtgatgacacctggccctagccttgccggaactcacccggactgaacagggagctgggattggaacctgggattttggtttctgagactgggctctcaacactgaatttcgtctcccaggtcagctctggtagttatgaaaagattcagtgttcctgtgtaaccttcataaccgcctcttagttcccttaccctgtggctgtttcccatgcagtagcttttttttttttttttttttttggagacagtttcgctcttattgcccaaggtggagtgcaattgcgtgatctcggcttacctcaacctccacctcctgggttccagcgattcttctgcctcagcctcccgagtagctgggattacaggtgtgcgccaccatgcgcagctaattttttttgtatttttagtagagatggggtttctccatgttggtcaggctggtctcgaactcccgacctcaggtgattcacacccccctcccccaccttggcctcccaaagtgctgggattagaggtgtgaaccgtcgcatccggcccccatgcagtagcttttaagagatcgtgtcgttgcttctgtcttccgggccacagagaggtgatgcagtttccccacttgcatggctgggaaagtgagctggcagcagggaggtttggacagtggcgggaaggcgggacagaggcacacagcagcacctcccagagcgtgaagtctgcaggcacccaggctaacgtgatagaaagcaacacagttcccggtgggcacaaatgggcagttgtccttatagaatgttctagagtgttcacagtctttttttttccctgtttaaagaaacctggcctagcagcccaaggtctgcagtgaagttgatggagaccccagagcagaacagagttgggtctgtctcggaatatggaggatctcgtggtggtctcacttgggctgaatagggtgacagtgatgtcacttgatgggcgggaacgcagggagctgatcgagggcagtgactttgggcagacggcccagcctaggcaacgggagaggcatctgcggcccccacccctcaatcttttttttttttttggctgcacatcaaaataacaatagctgtcttttgcggcacctttaacctgctcgggtacaacgctctgcactgtacataatcttttcagcatccctggcccgcgactcgccagctcccacatcatcttattttagatagggctaatacccaccacgctgcagcgcagtgcgaattcaatgaggttgtggatttgaagggcggagtgagccctgtgccaggctcacaatgaaagcgaaatcaatctcttagcacagggcctgtcccgctctgcactgtggatgtttggggccaggtcatcctctggctgggaccgtcctgggcactgcagggtgcggagcagcgtccctggcctccacccactccatgccagagcatcctgccctaccagtcatgacaaccacaaatattcccagagacttccatgcctcaaaggcaggattaaggtcagtctgatgcctcagttgaaatggtggcccaggaatggccttgcaagagtcacttgtcacagtgatgcctcaggtgtccccactggacggcccccttgcagagacctgcccttctgtctgcgggagggagggtccccaccaccagctcccacccactgcggcatccctcccccaggatggctccctggtagagggcgcggcctctgttagggtgactcaccactgctgttgtggccccgaagcagctgtagacaatctgtaaaccggtgggcgtggctttgttccaataaaacttgatttataaaaacaggtatggcggggcccagtggctcatgattgtaatcccggtgctttgggaggccaaggcaggcggatcacctgaggtcaggagttctagaacagcgtgccaacatggtgaaaccccgtctctactaaaaatacaaaaattagccagacgtggtggcgcatgtctgtagttccacttaggaggctgaggcaggagaatcgcttgaacctgggaggtgggaggttgcagtgagctgagatcccaccactgcactccagcctgggcgacagagcaagactccgtctcaaaaaaaaagcaaaacaaaaaacaaaaccaaaacaaaagaggtgcaggccagaattgtccccgtggacatagttggtcaattagattgcatactttaatccagcctcagttggtgtgtctgggttttctggctaggaagaatgctgctgtggaatgtgctggaacagatccttacgtgcgctgtgttggagtctttccaggtcaggggttctcaaacggatttcaggaccctttacatcatccagaatgatccaatagccccaggagcctgtgtctgtgtggattatgtctgccggctgttagtgtgttagaagttgaggccaggcatggtagctcacacctgtaatcccagcactttgggaggctgaggcgaggatcgcttgaggttgggagtttgagaccagcctgggccatgtagcaagaccccgtctctacaaaaaatgaaaattagccgggcatggtggcgcatgcctgtagtcctagctactcgggaggccaaggtgggaagatcacttgagcctgaaaggttgaggctgcagtgaaccaagattgtaccactgcattccagcctgggagacagagcgagactttgtctcaaaaaaaaaaaaaaccaaataaattgaaagctgagaaattcagagcacaagaagacaagcgcgccccctcttttagctgtcaacatggcggagccgtccctggtgacgcagcctccaaaggcctccctgtgccctcctgagaccgcaagagggaaagtggcagcgacagtgatcgtggtgtctttgtggcggttgtgttgacctcactgacccccgaagtgccgctctagggtctgtcctcagcggtgacccggccgggtcgaagggcagagttccgctgtcactagccctccacccgtcctgtgtgctgggatgccctcgcggcgccgtccacgccaccgccgccccctcttgtgggttctgtctcctccgtgtctaggatcctcctgcatccgtttttccttcctcccttctctccctccgtctgtcttgcccgcacctgaggttgtcgcagaggcgctgagacgggccagcaggagctgtggctgcccctcaggaaggcagagcagtttctcacttccttccccccaggtcccgtcaggcccctgcaggcactctctcttccggctggaggtccctcctgatcgaggcttacacggtctttgctgagctcctaaacttctggtttctatccctaaagttggagaaccactgctccccaaacccggtggcattatctgccctgctgtgccgctaggcagtgttcggcaccctgaaagagagcccctgaatgtggcacgaggggtaggaagtgggcagctcggtggggggggggggtgcagtgagcttttagtcttaagttttcgtttttttttttttttttttcttttttatagagatgggatctcgcttttttcaccaggctggtcttgaacccctggcctcaagtgatcctcccatcttgacttcccaaagtactgggtttacaggcatgagccaccacactcggccctttgtctaagttttcaaaaggaatcagcaaacttagttatcaagttgtatttgtatttatctggacacttttttttcttttcttttttttgcctttaagggagacagggtccacaaggccgggcgtggtggcttacgcctgtaatcccagcactttgggaggctgaggcaggcggatcacgaggtcaagagatcgagaccatgctggccaacatggtgaaaccccatctttactaaagatacaaaaattagctggggatggtggtgcacgtctgtagtcccagctacttgggaggctgacgcaggagaattgctggaacccaggaggtggaggttgcagtgagccgagatcacgccactgcactccagcttggcaacagagcgagactccgtctcaaaaaaaaaaaaaaaaaaaaaaaaagagacaaggtcttgctgtcgtccaggctggagtgcagcggcgtgatcatggcttactgcaacctctgttttccaggctcaagcaatcctcctacttcagcctcctgagtagctgggactacaggtgcctgccaccacacccaatatttaaatttttattaattgaaaaaacttttttgcagagacagggtcttgcctggtatcaaactcctgggctcaagtgatcctcctgcctcggccttctgagtagttgggactacaagcatgagctattgggcctggcctagcttttatacaatgcccatgttacaaaattccaaatgtccaaaaagcaaggagaatatcttccactctgccttgaccttcagtttcccccctgtagtaacctgtctgcttccagaagtgcttgaacatgtgtgcgtttgctatgggtttttttttgtttgttttgttttgtttttgagatggagtctcactctgttgcccaagctggagtgcagtggcgtgatcttggctcactgcaacctccacctcccaggttcaagtgattctcctgcctcagcctcccaagtagctggggttacaggtgcacaccaccacgtccggctaatttttttgtatttttagtagagacggggtttcaccacgttggccaggttggtctcaaactcctgacctcaggtgatccacccaccttggcctcccaaaatgctgggattacaagtatgagtcactgtgcctggcctgtttttttttttttgagacagagtcttgctctgtcgccaggctggagtgcgttggcttgatgtcagctcaccgcaacctccacctcccgggttcaagcaattctgcgtcagcctcccgagtagctgggactacaggcatgcaccaccatgcccggctaattttgtatttttagtagagacgaggtttctccatattggtcaggctggtctctaactcctgacctccagttatctgccggcctcagcctcccaaagtgctgggattacaggcgtgagctactgtgcccagctggttttttttttttttttttttttttagacaggctcttgctctgttgcccaggctggagtacagtggcacgatcttagctcactgcagcctcgaattcctgagctcaagtgatcctcctgcctcagcctcgcaagtagcagggactataggctgtatactactatacctggctgattttaaacatttttatagagatgggttcctgccatgttacccaggctggtcttgaactcctagcctcaaatgatccttctgcctcagcttcccaaggtgctgggattatagacctgagccactgctcctgacctcattttttttttttttttttttgagacagtgtatcagtgtctcccaggctggagtgcagcggcgcgatctcgactcactgcaacccctgcctcttgggctcaagcaatcctcccaccacagccttccaggtagttgggactagaggtaaattttatagtgatgggttttgccatgttgcccaggtgatcttcaactcctggactcaagtgatcctcccgtcttggcctcccaaatcatacctgagattacaggcatgagccactgcacacagccccattttaacttttttttttttctgaggcagagtctcgctctgtcacccaggctagagtgcagtggcgtggtcttggctcactgcaagctccacctcctgggttcatgccattctcctgcctcagcctcccgagtagctgggactacaggtgcccgccacctcgcccagctaattttttgtatttttagtagagatggagtttcactgtgttagccaggatggtttcgatctcctgacctcatgatccacccgcctccgcctcccaaagtgctgggattacaggtgtgagccaccgcgcctagcccattttatcttttctgataatgattttccttttgccaaaaacggcaagtgggttttagattaagtcactccttttaccaggcacagtaggagaccttgagttagggctgaggtggtgtcatttaatagggacattcaacttcactaggttcaatgataggagactttacaaatttccataatggtaaatcttctttcatttaaattattattattgttaatatttttttttttgagacagagttttgctcttgttgcccaagctggagtgcagtggcgtgatctcaactcactgcaccctccgcctcccgggttcaagcgattctcctgcctcagcctcccgagtagctgggattacaggcacccaccaccacgcctggctaattttgtatttttagtagagacggagtttctccatgttggtcaggctggtctcgaactcctgacctcagctgatccgtccgccttggcctcccaaggtgctgggattacgggcatgagccatcgcacccggccaatcatttaaattattaatgaagaataaaaagaggctgggcgcagcggctcatgcttgtaatttcagcacttcgggaggctgaggcaggcagatcacctgaggtcgggagttagagatcagcctggccaacatggtgaaacctcgtctctaccaaagatacaaagattagctgggtatgctggcatgtgcctgtactctcagccattcgggaggctgaggcaggagaatcgcttgaacccgggagacggaggttgcagtgagctgagattgcgccactgcagttcagcctgggtgacagtgagactccgtctcaaaaaaaagaaaaaaaaaagtaagtcccacgtagccatcaccctctgcagtagtcatctgctgtgtctgatcttgttcattttgctcatttctaccctacccacttacctctacctgactggattgtttaagagatgggatcttgctgtgttgatcagggtggagcacagtggctattcacagatgtgatcattttgcatgagaaccccaaactcctgggctcccctgaccctccagcctcagtctgccaagcagctgggactacagatgtgagccactgtactggctcctactggatcattttgaagtgagttacagatgccataactataacacagacatcataggtacaggaatttcagtgcatcttccccagtggctcatggatcacacagatagaaaatcggtcaggagggccacgcgcggtggctcacacctgtaatcccagcactttgggaggccaaggcgggtggatcacgaggtcaagagatcgaaaccatcctggccaacatggtgaaaccctgtctctactaaaaatacaaacattagctgggcgtggtggcatgcacctgcagtcccagctactcgggaggctgaggcaggagaatcgcttgaacccaggaggcggaggtcacagtgagtcaagatcgtgccactgcactccagcctggtgacagagggagactccgtctcaaaaaagaaaaaaaaagaaagaaaatcggccaggatgccgggcacggtggctcagccctataattccagcacttcgggaggccaaggcgggtggatcaactgaggtggggatttcgagaccagcctgaccaacatggagaaaccccatctctactaaaaatacaaaattagccaggtatggtggcgcatgtctgtcatcgcagctactcgggaggctgaggcaggagaattgcttgaacctgggaggcggaggttgcagtgagccgagattacaccactgcactccagcctgggcaacaagagtgaaactccgtttcaaaaaacaaacgaaaaaggaaagttggtcaggatgctgggcacagtggctgggtcctgtaatcccagcactttgggaggctgagtcagaaggatcagttgagcccaggaatttgagaccagcatgggcaacatggagaaaccctgtctgtacaaaaaatacaaaaaactttctggacgtgatggcccatgcctgtagtcccagttacttggaggggccgaggcgggagggttgcttgagcccaggaggtcgaggttgcagtgagccatggtcgtgccactgccctccagcctgggcaacagggagggagaccctgttttaagaagaaaaagaaaattgataaagatgtagatgatttgaacaacacaagtaacagggttaccgtaatgacatggatggaatctgaacccagcaagagagaaaacacattcttctcaggccacgaggagtgcttagggaaactgaccacatacaaggcaagtcttaaaaactcgatttttatttttatttgtatttacttattttgtttatttatttgagacagtctcgctctgtcgcctaggctggagtgcaatggtgagatttcggctcactgcctcccaggttcaagctattctcctgccttagcctcctgagtagctggaattacaggcgtgcgccaccacacccagctaatttttgtatttttagtagagatggagtctcaccatgttggccaggctggtctcgaactcctgatctcaagtgatctgcctgcctcggcctcccaaagtgctgggattacaggtgtgagccaccggacctgggcttttgttttttatgttttcatttatttatttgtttttgagatggagtcttgctctgttgcccggactggagtgcagtggtgtgatctcggctcactgcaaactctgcctcctgggttcaagcaattcttgtgccacagcctccccagtagctgggactacaggcgcccaccaccacgcccgggtaattttttgtgttttcagtagagatggggttttgccatgttggccaggctggtctcgaactcctgacctcaggtgatccatccgccctcggcctccccaagtgctgggattacaggcgtgcaccaccgtgcctgaccctttacaaatttagaacaattactgccttactgaccatgttttctctcacctgtggggtcagaacttaacaataactaagcttcctccttcgcgcttcgggttgtgcaagcttcctcctgcctgctttggggcctttctgcaatgttccagaagcggcatcaggaggctgcccagccagctcgtgagttgtgttctggagtcagagttttgtgccagcctgggccaggccccatccccacttcccgccccatttgcccctgtctacatcattgtactgggagacacttcctgtccctcctacgtagcccacgctaagcagggtgcttctatccacctcacctttccgatgtgggaagggccgaagtcatggaggggcgacccgtcaggcccagcaagggtggcacagatgttgtccctagtaacagatgagaggggatgggctgggactgcaggcctggctccccaagctgctcctgcgggtcaggggctgcccattagcctggccagggcccctcattggatccctcctggccgcccagaccacagcccttgcccccctgcctacccgccaccagttctcattggccctgcctccctgcttaactctgccgccttggcttcccctcctcggtctgtctcctccccgacttgtcctctgtctgagtctggcaggacagagtccgaccgtctggccccctcctggctccgtctgctcctcctgccgcctcctgctgtcgaggtcacttggttcttggcctgtctggcccccagccaccctgctggctgcctgctctccaggcagcccctcgcccagggctgcacctccgacctgtcctccgtcttgggtggggctgggactgtattttccatcctctgcagtggtctggtttccctcgtgcgctgaggcccctctgcttggctgcccctggctgccccatgcagctgagccatgagcgcggcctgtgtgcccctctcccgctggctggagctcaggatgctcacgccgctctggcagatatcgctgctgcaaacataggaggagcagctgcccctctgcgcacgtggccttcggacacatgtgagggccgctctagcttgggtgctcactgcgggtgattccaccctccaggggacactgggggatgtctggggacattcatgactcgggcgctcctggcgtggagtaggtggaggcctggagtgctgattagcaccctgcagggcccaggaaggccccaccccagagagtgatcagaccccaaatgtcagctttggcaagagcagtgtgcctggccacagaggtgctggcccggatgcagatgagtgccccatccatccctctgagcgccgtgtggcttgtcccatgctgcttttcctgacccagtgatattgggggcacttgacttctctctttttaagacggagtctcattctgtcacccacgctggagtgcagtggcgagatcctggctcactgcaacctccacctcccaggttcaaatgattctgttgccttagcctcttgagtatttgggattacaggcactaaccaccatgcctggctaattttttaattaatttttaatttttttatttttttgagacggagtctcgctctgtcgcccaggctgcagtgcagtggcgtgatctcggctcacggcaagctccgccccccgggttcatgccattctcctgcctcagcctcccgagtagctgggactacaggtgcccgccaccacgcctggctaattttttgtatttttagtagagatggggtttcgccgtgttagccaggatggtcttgatctcctgacttcatgatccacccgcctcggcctcccaaagtgctgggattataggcgtgagccaccgcacccggccaatttttgtatttttagtggagacggggtttggcaatgttgcccaggctggtctcgaactcctggcctcaagtgatctgcccacctcggcctcccaaaatgctgggattacagagtaagccactgtgcccagccccttttttagaaaaaattaataaactttattttctagagcagttctaggttcacagcaaaattgagcagaaggtacggagttcctatagaccccctgccccaacaggcatagccgcccccactgtcagcctcccccacagagcggtgcatcggttacagttgatggcccgatggccctctgtggagtcatcttcatctctgagtccacagtctacatacaccaaggcttgcccttggtgttaagtttttttttttttttttttgagacagtgtctcacttgtcgcccaggctggaatgtagtggcgtgatctcggctcactgtaacctctgcctcccaggttcaagcgattctcctgcttcagcctcctgagtagctgggactacaggcgcgtgccaccacgcctggctaatttttgtatttttagtagagacgaggtttcaccatgttggccaggctggtctcgaactcctgacttcaagtgatccacctgccttggcctcccagagtgttgagatgacgggcgtgagccactgtgcctggcctgcttcatgttttaaataacggctttattatatccctgcagttcacccagttaaagtacacagttgaggtatattcatagttgtgtaatcatcactgcagtctattttagaacattttgtcaccttgaaaggaaaccctgaaccctgtcccagctactgcttcctttttctgcatctcctcccgcagcccctggcaccctcaaatccccttcctgcctctgtggcttggcctgtcctggaaatttcatagaaatgggatcatgcactgcgtggccttttgtgtctggtgtttctcactgagtgtgatgtcctcaaggtgcatccacactgtggcctgggtcacagccttgctccttttcatggctgagtcgtattttattttgccttatattttatttattttattttatttcttaagacagtcttgctctgttgcccaggctggagtgcaatggcacaatctctgcttactgcaacctccgtctcccaggttcaagcaattctcctgcctcagcctctggagtagctaggattacaggcacccgccaccacgcccagttaagttttgtatctttagtagagacggggtttcaccatgttgaccagggtggtctcaaactcctgacttcaggtgatctgccctcgttggcctcccaaagtgctgggatgacaggcgtgagccaccgcacgcggcctgagtcatattttgacacatggatggatggccacattgtgttgatcctctcacctgttttttcttttctttctttctttttttctttctttttgagacggagttttgctctttttgcccaggctggagtgcagtggtgcaatctcggctcactgcaacttctacctcccaggttcaagcaattgtccttcctcagcctcccgagtagctgggattacaggcacctgccactatgcccggctaattttgtatttttagtagagacaggtttcaccatgttggccaggctggtcttgaactcctgacctcgtgatctgcctgcctcggcctcccaaagtgctgggattacaggcgtgagccaccgcacccagcctcaatcccctcacctgttgatggacacctgggttgcttccactctcaggctgttgcgagtgatgccgtgtgaacctgcgtgtacaggttgacgtgcctcttcctctccatccgtgccacctctccccaaagccagctgctctgtgctggagagctggccctgagcctcctcctggctcccaggcagcgcctagcatgtcagaggcactcacttctagctgggagaacagaggggctgaagcggatattggtgggccctcgatgtccacggtgggtttcagagcagcccttgaaacccttgtagctgtaggtgggtgtgtacatattcaaacgggtttttctgatgctggtggatcgcttgcttgagccccggagttcaaaaccagcttgggcaaagcagcaagacctcatctctaaaaaaaattagctgggcatgggtgatgtgtgcctgtggtcccagccactcaggagcctgaggcaggaggattacttgagcccaaggttcgatgctgcagtgagctacgattgcaccactgccctccatccttggcaacagagtgagatcctttctaaaggaaaaaaaaaaaaaagtccgggtgcagtggctcacgcctgtaatcccggcactttggaaggttgaggtgggcggatcacgaggtcaggagatcgagaccattctggctaacatggtgaaaccccacctctactaaaaatacaaaaattagccgggcttggtggcgggtgcctgtaatccccgctacttgggaggctgaggcaggagaatggcgaacctgggaggcggagcttgcagtgagccaagatcgtgccactgcactccagcctgggcgacagagcaagattccgcctcaaaacaaaaaacaaaacaaaacaaaacaaaaaaaaacaggccgggtactgtggttcatgctgtaatcccagctctttgggaggccgaggtgggtggatcccttcagcgtaggagttcaaaaccagcctggccaacatggcgagaccctgtctctactaaaaatacaaaaattagctgggtgtgatggctcatgcctatagtcccaagctactcaggaggctgaggcacaagaatcgcttgaacctgggaggtggagattgcagtgagctgagatcacacccctacactccaccctgggcgacagagtgagactccatctcaaaaaaaaaaaaaaaaaaaaaaatttttttctggaaaagatgagtcagcctttatcaggttcttaggtttatggtgaacaaagaaagaaagcctgcagagaagggccttggccttcactgtgacccccatgctgtttgcatttgaacagccgtcaggccttggatccccaaggggcgaaaggaggaagagctgacattctatgtatgtctctctcctcccttttcctaaggtctctctcctcccttttcctaaggatgctcctgaaccagggcatttctgcctctaggggacacatggtgatgtctgggggacatcggttgttgtcatgactggtggaggccagggccgctgcagtgcctctgcagtgcccagcacggccccacggtccagtgcccagagggggagacccagcccatcccagagtggtcagccctaatgtcagccatgcttaggtcgagaaacctgtattaattacatggaaaccaaccgagtccaatcctgctcgcaccaggcacgggataaactcctgacggggcagacgtggaaaccagggggacccccagctcctgggattcacctcctctctcccttcccactcagtgtgtggattttaatgcgtgcagcctcctgggacctcagtagggcacagcatcatgggataaggagtttcttgggggcctgtggaatccttcaccagggggtctcacccagggtgacttcacacccccccaccccataccgtatgatgtctggggacatttgtggtcgtcacaactacggggtgctcctggcatggagtaggtggaggccagggacgctgctcagcaccctgcagtgcccaggatggctccgccccagagaatggtccaggacctggccccaatgtctgcagtgccgggggagaggaacttgttgccttgggggcatctagatggcaaatcatcaggaggggggggtcctagatggcaaaccaccgggagagggtccttgttgggtgttggtggagtgtgaaggggcagcttctgacaaaatgcctcggcttctccagcccccagatacagctcaggtgatgagctcctccttgcatacctgctgagtcaggtgacccgaggggcaggctgtggagccaggccccaggggttgagcgcatcaggataaaagcgcacaaagggcgggtggagctgagggtcagaggaggtgccctggcaggcgagattggcgctggagccttacccaggaagctcataggaagctcatggatgctggcatgtgcctcttgctgttcaggtgggacagggtctctctgtctcgacactggacagtgggaccgtcctgggcactgcagggtgccgagcagcgttcctggcctccacccactccatgctaggagcttctcccagtggcgacaaccacaaatgtcccagacgtggcccagcgtcccccggggtctgaatcatgtttggttgagaagcagtgacagaggtgacacatgttcactgtcacaaaagctgccgtaagcacgaagtattaggaaaaactcccaagacccccatgtgtgcgtggtgccccgtgatgatgttttgtgcttctgggtgcttcctgcatgcagtgccaaaagccctcgctagaggggcctgagaccctgagggaagggactggggtgccgcttgtgagcgggacagccccctggcatggcccaggtatcatggctctttactctgatgcagattgccccccccccacaagggctgggacacagtgtttggttcatcactggtgcccacagatgcccacttggcatttggtggctaaacagcgtctgcctctggtgtccctgcagatggaggacggccataccctcttcgactacgaggtccgcctgaatgacaccatccagctcctggtccgccagagcctcgtgctcccccacagcaccaaggagcgggactccgagctctccgacaccgactccggctgctgcctgggccagagtgagtcagacaagtcctccacccacggtgaggcggccgccgagactgacagcaggccagccgatgaggacatgtgggatgagacggaattggggctgtacaaggtgagcctcccctccgcagctgctctggggttggacgttctccctgccattctggtctttgcatacccagggctcacaggaggggcttcccacgcgcctctctagctctggctgggcagaaatggccaaggggtggtttcctgcacgttccttgaggggaacatggtaccctgggattcctttgtggacctctagagcagagtcctgttcggggcctgcaggtgtcttctccgtgaagcttgcagtggctgtgacgtttctgaacttgctgctaccatgtaagatcaggaaatgtcacagaaagatctgggtttccagcttttttatttttttattttttttttggcagggtctcactttgttgcccagcctggggtgcagccgtgtgatcacagctcactgtagcctcgaactcctgggctcaagtgatcctcccacctcagcctcctgagtagctgatgttataggcatgtgccaccacgcccagctaattttattttattttattacttttttaatacatggtctcattctgtcgcccaggctggagtacagtggtgccatctcggctcattgcaacctccaactcctgggttcaagcaattctcgtgcctcagcctcctgagtagctgggattacaggcatgtgccaccacacctggctaatttttgtattttttgtagagacgggatttcgccatgttggccaggctagtcttgaactcctggcctcaagtgatcttcccgccgcagcctcccaaagtgctggaattataggtgtgagccactgcacccagtctgttttattttttagtagacacagcgtcttaccatgttgcccaggctagtcttgaattccggggctcaagcgatccacctgcctcggcctcccaaagtgctggtattccaggcgtgagccacgacgccctgcctggatttccagcttctcttgacaaatgggcagctctggtctctcagggcctcccagcagctgtggctgaagcagagccgcaggggcctttgttaagacagtccatgccccctggccccgcatccccgtcacccctgccggggctggtttctcatggtcagcggttcccagccagggaggagaaacctcgctgtgggcattcgagtttgcgccctggttccagagcatcccagtgtccgagaaccaaggtggtctcccgtcagttttcctcaccccgttgggatgccagacttccctcattcctcacaggtcaatgagtacgtcgatgctcgggacacgaacatgggggcgtggtttgaggcgcaggtggtcagggtgacgcggaaggccccctcccgggacgagccctgcagctccacgtccaggccggcgctggaggaggacgtcatttaccacgtgaaatacgacgagtgagtcatggcaggtgggcgggcctgggtattcaggctctgtgacgcgcatccttggctgcgggtgttcaggccagagcttggcactgtctcgagatggtgatcaggatctggggccccatcctcgaattcctaacagcatacgaggctgcccacttggggactagcctggggacccgaagccggctgccccctcctgtgtctccgcggagggttctgctcgatcagtggctgaaactgccaccccatcagtttttctgttttattccatcttccgggtttgtcatctctccctcatccccacccctaacgtcagtctccagtctttgcacaagtgtttactgggcacttcctacctgccaagttcggggtccacacaccagtggacacagatggtggctgcgtctgtccgtgctgccatcgtgagatttcacagacggtgtggcttaaacacggacattggttgacttgctcactgcaacctctgcctcctggattcaagcgattctcctgcctcagcctcctgagtagctgggactacaggtgcccgccaccacacccagctaatgtttgtatttttattttattttatttttattttattttttcgagacagagtcttactctgtcactcaggctagagtgcaatggcgtggtctcagctcactgcaacctccgcctcccaggttcaagcgattctcctgcctcagcctcccaagtagctgggattacaggtgtgtggccaccacgcctggctaatttttgtattttcagaagagatggggtttcactatgtaggtgaggctggtctcaaacttctgacctcgtgttccgcccgcctcagcctcccagagtgttgggattacaggtgtgagccactgtgcccagcttattttatttttttgagacagtttcactctgtcccccaggctggagtgcaatggtgtgatcttggctcattgcaccctccatctcccgggttcaaacgattctcctgcctcagcctcccaagtggctgggactacaggcgtgcaccactgcgcccagctaatttttgtttttgttttgtttttgagacagagtttcactcttgttgcccaggctggcgtcaatggcgcgatctcggctcaccgcaacctctgcctcccgggttcaagcaattctgcctcagcctcccgagtagctgggattacaggcatgcgccaccacgcctggctaattttgtatttttagtagagatggggtttctccatgttggctggtctccaacttccgacctcagatgatctgcctgcctcagcctcccaaagtgctgggattacaggcatgagccaccgtgcccggccatgcctggctaatttttgtatttttagtagaggcagggtttcaccgtgttggtcaggctggtcttgaactcctgacctcaggtgatcttcccgcttcggcctcccaaagtgctgggattacaggcgtgggccaccttgcccggcctctcctcttgttctaaagacaccagtcctgttggattggggcccaccctactgcagtgtgatctcatcttaatatgatttcatctgcaaaggttctatctacaaagaccctgtttccaaaaacaatcctattcgtgggtactggggatcagcctttgaacatctctttttgcaggggacacgggcaacccataacaattttgtacctggaatgtgccttaatatacctgtgtgttctcaacaccagcatataagcctgttgggaggggcctctgcacactgtcgggaggggccgtcccacctcggctcgtttcccattgagggaaggaggcttggtcttagcacggggtctaaggcccgggctttcctcccagctacccggagaacggcgtggtccagatgaactccagggacgtccgagcgcgcgcccgcaccatcatcaagtggcaggacctggaggtgggccaggtggtcatgctcaactacaaccccgacaaccccaaggagcggggcttctggtacgacgcggagatctccaggaagcgcgagaccaggacggcgcgggaactctacgccaacgtggtgctggggtgagcctcgcgtcctggggcgagcccttcctctctcctttcctcccctcccggggcccccggactggctttgaagccgtccagccagcgctgtgtgtgcgaggcccttagcctccggcctggccttcctgcctcccctctggggtctgttcctgctcactgctgagcatctttctaagaccgaccaccttgtgcccctgagtgcctctgcccagggaactgtctctgacccccaggccctgacaggcagagttgtcaaacttcctttttctcatggtgttttttttatcgctctgttgcccaggctggagtgcagtggttcgatctcggttcactgcaagctctgcctcctgggttcatgccattctcctgcctcagcctcccgagtagctgggactacaggcgtctaccaccacacctggctaatttttttgtatttttagtagagacggggtttcaccgttaaccaggatggtctcgatctcctgacctcgtgatctgcctgcctcggcctcccaaagtgctgggattgcaggcagtgagccaccgtgcctggcctcaagctttctttttctctcttgtttgtttcaaatttggtgaataggtcccattcacagggtcaaaatagaaagcacccaagaccacacatgaaggttctccctcctctgcctggtcacccagttcccctttttggcgacatcactgttaccaactttccagggacattctgttcataaacatacacgccaaaccacaccgcttaggagttggcaaactgcagtccacaggcctgctgtggtccgctgccggctttgactaatagttttattgggacgtggtcacacccatttttatcttattacctgtggttgcttttgtgttataagagcagagttgtgtagttgcaacagagactatgcggcctacaaagctgaaaatccttcctatttggccatttgcagaatcattttgcaaagcctgttctttctcccttgcctctttgtgtgtgtgtgtgcgtgtgtgtgtgtgtgtgtgtgtgtgataaaatgtatgtaacagaaaatttaccttttttttttttttaaaagacagagtctccctctgtcgcccaggctggggtatagtggcatgatcttggctcactgcagcctccgccttccaggttcaggtgattctcctgcctcagcctcccaagtagttgggattacaggcgcccgccaccacgtctggctaatttttgtatatatatatatatttagtagagtctgggtttcaccatgttggccaggctggtctcgaactcctgacctcaagtgattcgcccgcctcagcctcccacagtgctgggattacaggcatgagccactgcgcccggccaaaaatttaccattggaaccatgtttaagcgcacagttcggtggcattaaacgcatttacgttgttacgcaaccatctccagcactttgtcctcttcccaaactgaaactctgactccatgaaacactcactccctagcccctgacacctctgcatcctactttccatctctgtgaatctgacaactcgggggacctcctaggaatgggatcacacaggatttgtcctttgcatctgttcactgacgtcactgagtgtgatgtccttgaggtgcatcaggctgtagcctggtcggaatttccctcctttttgtggccgagtgatagtacgtgacgtgttgtctataaacacgagcatcttggcaacggcgttccaagtacaggtacagcaagcacgcagaggtcctgggctgggacatttatggtgcatctgtggcccggtagggaggtcagtgagctgcgggtgatggaggggagtggctggggctgtgggagcctcctcactgagtctgggccttaagcgcgtggctcgggtgtggtgtggaattggtctttattctctgctaggcgcatttctgaatctgagattttctgagaaactatctggattgttatatggaatctgatttttaaatgctggtgactaactttttttttttgagacagagtcttgctctgtcacccaggctggaatgcagtggcaggatctctgcttactgcaacctccacctcccgggttcaagggatcctcctgcctcaccctcctgagtagctgggactataggtgcccaccaccagctaatttttgtatttttagtggagacagagtttcaccatgctgcccaggctggtcttgaactcctgacctcaggcgatccacccacctcagcccctcaaagtgctgggattacaggcgtgagccaccgcacccagcctatctggttttataaagggcagttcccctgcacacactcccttgcctgccgctgtgtaagatgtgcctgtgctcgttcaccttccaccatgattgtgaggcctccccagccatgcggaactgtgagtccattaaacctctttcctttctaaattacccagtctttattatttagtatgtctttattagcaacatgagaacagactcatacaaccccttccaagctcttgtggtggctgatataatccactactttgcggttgaaggatgggggcttcatttttttttttttaacttggttcttggaggccgcctgcagttcccagggcccacctgcagttccttgccccatgggcttctctgatgtggctactgatgtcaagctagcaagggaggtcttcagctagtcggctagtaagatatagagcatcgtgtgatgtgtcatcgtcccaggagtgacagtccgtcagctctgctgtattttatgggttaggtttaagtgacagccctgtccatacttttatggggagaaacgcctacaaatgcgtggttgccaggag

SEQ ID NO: 226 - DNA, 17119 bp, Homo sapiens
  source 1..17119: mol_type = other DNA
ggaggccggctatttgaaggcggcgcgcggactaggtgcgcacttcagttctcggagagaagaggcgggagtggacctggtcagccctaccccactgaccccaccggacccaggcgcggcctccgccacagccacagcccctgcccctgctgcggcgcggcgaggcgaggcgatggccaaggtgtcggtgctgaacgtggcggtcctggagaacccgagccctttccacagccccttccggttcgagatcagcttcgagtgcagtgaagccctggcggacggtgaggctgggcctgtgcggggacccccacccccgggccgaccccggcctcccctcagagaaccgctcccatggccaacttgatctcccccatgaaacccctcgtcccccttccgccaaccccgatctcccccagcccgccagtcaaccggatctcccggtggagaccccccgccaccagccaacacggacctccccgtgacctcctcccccactgcccgccttgacctcccgggtggagaccccccgccagctaactcggacctcccagtggcctcttcccccactgcccgccccgacctccccatagagattaaccccctccaagccccatttcccgcgtggggaacctcatccatcttttttctctggagctcttcctaggtacccgttttcatggggagaccttctcggcctccatttcttaacccacggagatcttcagccaccgtggtttccctgtggcaagacccccgcttcaaccacccacccatttttgcccacttattccctctttcctgtagtgagatactcacacctcccattttccctctggagacccccaatatccagccccttcccattttccccgggggaaatcccagccatctcctattttccctatggagacctctcacccaagctcctctctccttgccgtgaagaccctcccctccagtaacctttttttcctgtgaaaacccctcaaccccttttcaggacctctctcaaccccatcttcccatttgtgtcccaccagtcccctccccaacctgccaatatttcaataaccccacgcccaccagttgctgccgcttttctgccccaatgcacataccctggaacctggtttctctccttcgttggggcccaacccccctatgcttgagctctccctgggaaaggatgctaccgtctttgaggggaactttgtctccccagctccccttccccacctttctctgtgggcttggataaacacactgagatccgaggggtggcatagccaggcaggcattagctagttctccaggtttgcccacccgtttccagctgagttactgcagcaatttttctgtcactttttctttcttcttcttcctcttcttttttttttttttttttttgagacagtctcactctgttgcccaggctggagtgcaatggcacgatctcggctcactgcaacctccacctcccgagttcaagcgattcttctgcctcagcctcccgagtagctgggactacaggcgcctgtcaccacgcccagctaattttagtatttttagtggaggcagcgtttcaccatgttagccaggttggtctcgaactcctgacctcaagtgatccacccgccttggcctcccaaagtgctgggattacaggcgtgagccaccgtgccccgtcttcttcttttttttttttaatatagctggataatcagtgccaagctcccgttgcttttgatggtctgacctagtctggggggtgggtggattgggctgagctgtgacgggctccagcttcaaacagtcggctggagcttggaggtcacagcctcctgtacatcttttccaaggtgcttccgtagatgtacttattaatctgtgtgacttaaaggtgggcatggctctcatctcacagatgagaagacaggagccacaaaacgcaaaagacctttcaagtcaaggcctgtacaaatccaaaatctaaggtcacctagggagccttggcaccactaacaggcaagtcctgctttcaggaagaagtactccattaggccatttttctacttggtggttgaaagagaaaaggcagcagccgaggaggtggtgatctgggggcctgtgaagccaggatatgctaactagtgcctctcgggggcaggtaggtgttttgccctcaaagctggtcgcctggactagcttggagctgatagagtgagatgtggatgtgctttgggtaggccagtgggtctgtctctccccggtctctctcgctcctttttaaattaaggagtctacttgtggctaactatagaatatgccgagttaaatcctttctggaacaaggcagcgggtaaataaataaataaagtgtagaatgacgctgtggaataagatttaatttaaaagccaggaggagatggaaggaagtaataggttgagggattcccagctccccgacggcaggagatcaggtttcaatcagcctgtttgtgttccttgcatttaaaaatggttgtggccgagcgcggtggctcacgcctgtaatcccagcactttgggaggccgaggcgggcggatcacgaggtcaggagatcgagaccatcctggctaacacggtgaaaccccgtctctactaaaaaacacaaaaaattagccgggcgtggtggcgggcgcctgtagtcccagctacgcgggaggctgaggcaggagaatggcgtgaacccgggaggcggagcttgcagtgagccgagatcgcgccactgcactccagcctgggcgacagagcgagactccgtctcaaaaaaaaaaaaaaaaaaaaaaaatggttgtgcggtcattatctggtacttctactcctaggaagcccctgccctgtgactttactaacttatttatagaattagagccggaagggctaaattcaacctgctggtcctttttttgtttttttggagatgaagtcttgctcttgtcccccaggctggagtgcaatggcgcgatcttggctcactgcaacctccacctcccagattcaagcgattctcctgcctcagcctcccgagcagctgggattacaggtgcctgctatgacgcctggctaatttttgtatttttagtagagacggggtttcaccatcttggccaggctggtcttgaactcctgacctcaggtgatccgcccgcctcagcctcccaaagtgctgggattacaggcgtgagccactgcgtccagcctctgctgatcattttttaatagaaatggagtgacttcaccagagtcacacagccagtttgtagaagtattggcactgaagttttgaatctaaattctttatctttgctccaatccagggaaagaaaggaaggattccctgtttcaggggtggagcatagataggaatgaccacagaatttattgcctaatcaggacactcaaaatgcagtgaagggaagtgctattattattatttatttatttatttatttatttatttatttttgagatggagtctcgctgtgtcacccaggctggagtgcagtggcgtgatcatggctcattgcaagctccgcctcccgggttcacgccattctcctgcctcaatctcccaagtagctgggactacaggcgcccgaaaccatgcccagctaactttttggatttttagtagagacggggtttcactgtgttacccaggatggtctcgatttcctgaccttgtgatccgcccgcctcggcctgggattacaggcgtgagccaccgtgcccgtcgtatgattatgatgatgatgatgattattattagaaatggaatctcactatgtcacccaggctacagtgcagtggtgcaatctcagctcactgcaatctccacctctcgagttcaagcgattctccggcctcagtatcccaagtagttgggattacaagcttgagccaccatgcccggctaatttttgtgtctttagtagagacgaggtttcaccatgttggccaggctggtctcaaacctgatcgcaagtgatatgcccacttcagcctcccaaagtgctgggattacactttgaatcctaagcgcctggccagagaatgctattgttaattgtacctggatgataaagcttttcctttgagtaactcaagtgagaaatcctggctcttccagtcctagggctctctgtgactgatctgccagcttgctttctgcctccttctggactcctctccatgaaaaagggagaatctgcctcactctcagcagcgtcaactgaaaatctgacaaaacccccaacccagctgtgtgaggtggctcatgcctgtaattccagcactttgggaggctaaggaaggaggatctcttgagcccaggaatttgggccagcctgggtaacatagcaaaaccttgtctctacagaaacatcaaaaaattaacgggacttggtggcacgtgtctgtggtcccagctactcaggaggctgaagtgggaggattgcatgagcccaggaggtcagggctgcagtgagccatgattgcaccactgcactccaacctgggtgagagagcaagacccccatctcaaaaaaaaaaaaaaaaaaaaccaccctaacccctaagccccagttgggtgacccctatttctcaggggccccaagccccctttgcacttttatcttccacatctggaaatagattcttccacatttagctgagaaattcaacagacactggttgaataagtcatagaagccagatgttctgacccagaaataacgaagttgttatggcagcagagctcatctttgattatgaacaaaggcaaaaagcaaacaaacaaaggaggcctggcatggtggctcacgcctgtaatcccagcactttgggagaccaaggcgggcagattacctgaggtcagaagttcgagaccagcctggccaacatggtgaaaccccgtctctactaaaaatacaaaaaattagccgggtgtggtggcgggcgcctgtagtcccagctactcgggaggctgaggcaggagaatggcgtgaacccaggaggcagagcttgcagcgagccgagattgcaccactgcaccccaacctgggcaacaaagcaagactccatctcaaaaaaaaaaaaaaagaaaaagccaggtgtggtggctcacacctgtaatcccagcactttgggaggccgaggcggatggatcacaaggtcaggagttcgagaccagcctaaccgacgtggtgaaaccccggctctactaaatacaaaaattagccaggcatggtggcacgcagctataatcccagctactcaggaggctgaggcagaagaatcgctagaacccgggaggcagaggttgcagtgagctgagattgtgccactgcactccaacctgggtgacagagcgagactctgtttcaaaaaaaaaaaaagaaaaaaaaaatggccaggcacagtggcttacccctgtaatcccagcattttgggagaccaaggcaggtggatcatctgaggtcaggagtttgagaccagcctggccaatgtggtgaaaccctgtctctactaaaaatacaaaagttagccaggcttggtggcaggtgcctgtagtcccagctatttgggaggctgaggcaggagaagcgcttgaacccgggagatggaaattgcagtgagcccagattgcgccattgcactccagcctgggcgacagagcaagactgtctcaaaaaaacaacaacaaaaaagcaggaagcagactttttagctagttcagctatactaattgtgtacatgtctttagtcttatcatttatatatatatatatatatatatacacacaaacacacagtggaggtatgtcttgcacagggactagcttgtgaagttagcgcagagagataacatgggacacagttgagttgccttgacattgctcagaaggttaggtacacacgtcatgtgtacagctgtgtcctgtactcatagctatgagttcctgctgtattggtgatttgtgtcccatgtataattctaaagaaagattatatttagagatgaaatcatacacgtatgtctctacttataacactgcagccagatttttttttttttttttaaagagatagggtgtcactatgttgcccagactggacttgaactcctgggcttaagcagtcctcccacctcagcttcctaagtagctggaaccacaggtgcacatcaccatgcctgggcacttcagcaaatttaagatgattctcgactgggcatagtggctcatgcctgtaatcccagcactttgggaggccaaggcaggcggatcacaaggtcaggagatcgagaccatcttggctaacacagtgaaaccccgtctctactaaaaatagaaaaaaaaattagccgggcgtggtggggggtgcctgtagtcccagctgattaggaggctgaggcacaagaatggcatgaacccgggaggcggagcttgcagtgagccgagatcgtgccactgcactctagtctgggcaacagagtgagactccatgtcaaaataaaataaaataaattagaattacaggtgcacaccaccacgcccagctaattttttatatttttagtagagatggagtctcactctgtcacccaggctggagtgcagaggcacgatctcagttcactgcaacctcagcctcccgagtagctgagactacaggggcatgccaccacgcctggctaattttttgtattttttgtatcaccatgttgcccaggctgatctcgaacttctgagctcaagcaatccacccgcctcagcctcccaaagtgctaggattacagccatgatccaatgatccacctcacctggccctatacctataactctttttttcttcctttctttccttctttcttcttttttttttttttttttttttttttttttttgacggaggctggctctgttgcccaggctggagtgcagtggcaaaatctcggctcactgcaatctctgctgcctcccaggttcaagcagttcttatgcctcagactcctgagtagctggaattacaggtgcacaccatcatgcccagctaaatttttatatttttagtagagatggggtttcaccatgttgcccaggttggtctcgaactcgtgagctcaggcaatctgcctgcctcggcctcccaaagtgctaggattacaggtgtgagctgccgtgcccaaccagcttctgtaactcttgagtcagtatttctctacagccgttagttaattctccagtttctttccagccctggttgaaagagccatttcagcccctgtgcctgacagtcaacacagtacattttttctttttcttttttttcctttgagatagggtctctgtcgtccaggctggaatgcagtggctcgatcatggctcactgcagccctgaactcctaggctcaagcgatcctccaaccttagcctcccgcatagctgggaccaccggcacgcgccaccacacccaattaattttgttgatttttaatagagtcgagtctgcctatgttgcaggggcccatttatttcggtgagtttccacatgctctttgtttaggttttgccgattagtattgacctcagctggacaacatcaggtgctcgtgggtacactttagtcttttttgtctaccttcccaggacatgaattaaatgcacccgtacaggattctaccggctatgagaggaaagggctcaaggatatacaccaaaatgatacaactgctttagaaaggagagagcagggctggctggcttttctgtcttcccccaaaacttgattccagttgtgtcactacttgtaacaaaaataaatcaacaggctggacatgatggctcagacaaattccagcactttgggaggccaaggcgggaggattgcttgagaccaggctgggcaaccaagcaagacctcatctctaaaaacaatttaaaaattccctgggcgtgtggcacaagcctgtggtcccagctacttgggaggctaaggcaagagaatcacttgagcgcaggaatttgtggctgtagtgagctatgattatgccactgcactgcagcctgggtgacggaccgagaccccatctccagtgaaaaaagtcaacttcctccctgcaaatagtaagaggctagttcgaccaaacacctgtgagttcaatggtcacccgtatcctacagacctgctatagggttcctgagtgaaaccacaaagggacaggcagccagtgcatcaaagaagggcatggggctcaggtgacaagcctctgtagtcatgacctggcagcagcatgcttccaaagttggatgctcttgtgggacactggaccaaggaacagggcagcttctgagagagtttgcttcctgtgaaaatcacagcttgtgaaacttcccccagctgctagagctgaagggttgtgtaatttctaaagagccaaaaataagtttcaagcctcttgccaagcctccctgtaccagcatgaccttgcccctgatacacttggacctcctgcaagaggccatgttgaccggaatttcctgtgattgacagccagaggttccataagcactttcctttcatctcaatggagcatattcaggggagggggccctcctgctggatggggtgcaagagttagggtttgaggctgggcacggtggctcacacctgtaatcccagcactttgggaggcggaggcggatggatgacctgaggtcaggagttcgagaccaacctggccaacatggtgaaaccccatctctactaaaaatacaaaacattagccggctgtggtggcgggcgcctataatcccagctactcaggaggctgaggcaggagaatcacttgaacccgggaggcagaggttgcagtgagccgagatctcaccattgcactctagcctggacaacaagagtgaaactgtcaaaaaaaaaaagtgtttggaggatcaccccgggatgccacatttgttgactgagttgcccaaatgtctctaagtaggcatgacttggtgccagatctggaagaccagggtggctggctccctgagcaacctcaccttccccctcctgcaggctggctctcctgccggattggaatctgccaccctgccccagttgtcgagggatccacttcgttgagtggcaccggtccctgtgtgtgaaagaggatgctgcttcctatcccagcacccagtgggcagggccctgaaatgacccaactccctgccgttcccttctcagcacgtctgtgtcacgtggctcttaattcagcctctgccatacagttcacgctcaggccttgagaggcccaggtttccccagaggtatagtcaaggtcacctgtcatagctaggcttacaagacagaattccctaatggaggtagagctttgtgcccacctcagcattcaagactgcagtgcctggcactaagtgtctgacagatggaataatagtcttttaacatattaaggatctgtctaaaattaccacaaggctgggcacagcagcccacacctgtgatcccaacatggtgggagtccgaggcaggaggatcgcttgagcccaggaggttgaggctacagtgagccatgaacatcccgctgcacaccagcctaggcaacagagggagactgtctcaaaaaataagtaaataaaaataaaatagaagatgtggccgggcgcagtggctcacacctgtaatcccaccagtttggaaggctgaggcgggcagatcacttgaagtcaggagttggataccagcttggccaacatggtgaaaccccatctctactaaaaatacaaaaacaggccaggtacagtggctcacacctgtcatcccagcactttgggaggccaaggcgggtggatcacctgaggtcaggagttctaaaccagcctgatcaacatggtgaaaccctgtctctactaaaaataaaaaaattagccagccatgatggcaggtgcctgtaattccagctactcagtaggctgagacaggagaatcgcttgaacctgggaggcagagattgcagtgagccaagatcacaccattgtactccaacctgggtgacaagagtgaaactccatctcaaaaaagaaaaaaaaaattagctaggcgtggcagcgggcacctataatcccagccactcgggaggctgaggtatgagaatcactggaacctgggaggcggaagttgcagtgagctgagatcgcatcactgtattctaacctgtgtgacagaacgagactccatctcaaaaaaaaaaaaaaatacaagagcctatccctgccttcttgctgttgagctatttcaattagttaaccctcctatatctttgcagacctggagtggaagatcatttatgttggctcggctgagagtgaggaatttgatcagatcctagactcggtgctggtgggccctgtgccagcagggagacacatgtttgtctttcaggtaagaaagatgaggccttaggccttagcccttgattcctagaaacatcctcttttacctgaaatcccacagagtgcttcaggaatcaaaagttcaagttcagctgggcacgggctcacgcctatagacccagctactccagggactgaggtgagaggattgcttgagcccgggagtctgaggctgcagtgagccactgcactccagcctaggcaacacagtgagaccctgtctctaaaaaagaaaaaaacaagtattaaaaacatagaggccgggcacagttgctcacacctgtaatcccagcactttgggaggccgaggtgggaggattgcttgaggccaggagtttgagaccagctggggcaatatagtgagaccgcatctctacaaaaaatgtaaaaatcagcagagcatggtggtgtgcgcctgtagtctcagatacttgggaggctgaaatgggaggatcacttgagcctgggagatggaagctacaatgagccaagaccacaccactgcactccagcctgggcaacagtaagacccagtctcaatcaatcaattaaaacaatttaaaagttcaggttcaaatcctagttctactgtcaggaactatctgacctctcagaggccgtcaggccctcccttcccccacctctgtgtcaaagctgccactgatttacaggcaattcccattatttacaagagttacgttctataaagttgccgcgaacactgaattagtgaatactgaaccattgccccaggggaaatacagggttagattcttggaagtcacattttcgtcagctggttaatacgtaaacttgtatgtgtgtttatgttgaaaagacaccaggacggctatgatggctcaaacctgtaatcccagcactttgggaggctgaggtgggtggatcgcctgaggtcaggagttcaagaccagcctggccaatgtgatgaaaccccgtctctactaaaaatacaaaaatcagccaggtgtggtggcgcatgcctgtaatcccagctactcgggaggctgcggcgggagaatcgcttgaacctgggagatggagattgcagtgagctgagatcgcaccagtgcactctagcctgggtgatacagcgatactctgtctcagaaaaaaaggaaagataccttatttaatatatacagtggttcatttatgttgaattcacagccaacagcactataactctcctgaatgaaacttctctaatacgcatattttccataaagcctttcttgtatcctacactgcacttcagcactaccgttgggtgccatcatagacagcaaactcaccaacaaaaagcacaaaacatggaaaaaagcactaagtaggctgaggaaaggacgctcattcacagtgagagctgagaccagaagacagagtgttgccttgtttgacctcaggtgggaacaggcgtggtaggtaactctaggtgggaacaggcatggtaggtaactccagtttttccctgctctgtgcatgtctgcaagtgactgtgaaagcaagcaggtgttcatcttggggttacaaataaacttagcaggtaggtgaacttgcacatatggaacccatgaataatgaggatggactgtaactcctaaatggctctcatgcagcaccccacctgggttgtcaaatgtagattctggccgggtgtggtggcttccagcactttgggaggcagaggcgggaggactgcttaaggccaggagttccagactagcctgggccacatagcgagacccccatctctacaaaaaatagaaaaattagccgggtgtggtggcttgcacctgtcgtcccagctacttgggaggctgaagcaggaggcttgcttgagcctgagagtttgaggctacagcgagctatgattgcacctctgcactgcattctgggtgacagcgagacctgtctctacaaaaaaaacattaaccaggcatagtgatgcaggcctgtagtgccagctactagggaggctgaagcagaagactcacttgaggccaggtgccatggctcacacctgtaatctcaacactttgggaggctggggcaggcagatcacttggggtcaggagttaaagactagcctggccaacatggtgaaaccctgtctctactaaaaaatacaaaaattagctggatgtggtggtgcacatttgttatcctagctactcgggaggctgaggcacgagaattatttgaatccagggggcggaagttacagtgagctgagattgcgccactgcactcgagcctgggcaacagagtgagaccctgtctctaaaaaaaaaaaaaaaaaaaaataggctcgcttgagcccaggagttccaggagtttacagtgatctgtgattgcaccactgcactccagtctggatgacagagggaaaagctatctctttaaaaaaagaaggccggtgcagtggctcacgcctgtaatcccagcactttggaaggccaaggtgggcggatcacaaggtcaggagattgagaccatcttggctaacatggtgaagccccatctctactaaaaaatacaagaaattagccaggcctggtggcgggcacctgtagtctcagctactcaggaggctgaggcaggagaatggcgtgaacctgggaggcggagcttgcagtgagccgagatcacgccactgcactccagcctgggtgacagtgagactccatctcaaaaaaaaaaaaaaaaaaaaagaagaaagaaaaaacaaatggagattctgagttctccaggtgatttttcaggatcctctgctcggatacactcccttacctccatcactgctgttaccgccctaatccaagctaccacatcctatctaaccccttcagccaccactactaaatccactgacaggccctatctactcaacagtcaggactggcctcctgggtgtgcaacccaggcagctgcacaggaccccacacttggtgcgatactctgctgtcaccgtctgaaacctaatagcttttctggaggggcgtggtgttttcattttgcattggttttattttgcaccaattacgtggctggtcttgtttgcagtagtacaccctgaatctgttctttactgcctggtctaagccaagtccactgcctctccaggatgactggtgtaagccttctgctccactacagtctcctgtcacggctccacactttgccagaggcttcttttcagatcacaagagtgatgtggcacttaacctcctgcttactctcttgccctttcccaatcccttagctggcccccgggtggcctgataccacctgcctcacctgttcagcttcatgccactgtcccccggctcaccacactcctccagagtaccacgcacctctccctgccacagtcaacgttttgtagtcatttgtgggattgattctgtgtttccatcagttgacaactcctggctgggcacagtgactcacacctgtaatcccagccctttgggaggctgaggtgagaggatcgcttgagcccaggagtttgagaccagcctgggcaacatggagaaaccctgtctctacaaaaaataattggctagacatgttggcacacaccgttgtcccagctatttgggaggctgaagcaggaggattgcttgagcccaggagttcaaggatgcagtgagccatgatggcgccattgcactccagcctgggtaacagagggaggccagaccctgtgtaaaaaaaaaaaaagtccaggcgcaatggctcacacctgtaatcccaacactttgggaggccgaggtgggcagatcacctgaagtcaggagtttaagaccagcctggccaacatggtgaaatcccgtctgtactaaaaatacaaaaaaaaggctgggcgcagtggctcacacctgtaatcccaacactttaggagtccaagacgggtggatcacctgaggtcaggagttcgagaccagcctggccaacatggcgaaaccccatctctactaaaaatacaaaaattagccgggcatggtggtgggcacctgtaatcccagctactcgggaggctgaggcaggagaatcgcttgaacccgtgaggcggaggttgcagtgagccgagatcgcaccattgcacttcagcctgggcaacagagcaaaactccattaaaaaaaaataccaaaaaaaaaaaaaagttagccgggtgtggtggtgtgtgcctgtagtcccagctgcctgggatgctgaggcagaattgtttgaacccgagaggcagaagtaaaaaaaagaaaactgagggcagagagcatactttttgctcagtaaatacatgatgcttgggaatctttgtactaatgacatcgaggcatggctgtggcactgctaaggcctaggatgtgtctcccctaggccgacgcccccaacccatccctcatcccagagactgatgccgtgggtgtgactgtggtcctcatcacctgcacctaccatggacaggagttcatccgagtgggctactacgtcaacaacgagtacctcaaccctgagctgcgtgagaacccgcccatgaagccagatttctcccaggtggggcctgtttccacttcctgcttcccacaaggccgttctttatacttggggggagttcagccattcaaattgagagtcaaggtcacttcttaaggttttcaagtaatattcagttcttacagtactgtgttagaagaggagaaaaagacctttgtctctcaaaggcatgtcttagagaattaagattaggccagcctgggcaacatagtgagaccctgtccctaacccccgcaaaaaaaaaaaaaaaaaaaaatgagccagacatgggtggtgtgctctactctggaggctgaggtgggaggatcgcttgagcccaggagtttgaggctgcagtgagctcagatcgtgccactgcattccagcctgaccaacagagtgagactgtcccttaaaaaaaaaaagtcctgggccaggcacagtggctcacgcgttgtaatcccagcactttgggaggccgaggctgtaggatcacctgaggtcaggagtttgagaccagcctggccaacatggtgaaagcccgtctctactaaaaatacgaaaatgagccaggtatggtgccttgcacctgtagtcccagctacacaggaggctgaggcaagagaatcgcttgaacccggaaggcagaggttgcagtgagacgagatcacagcattgcactccagcctgggcaacaaaagcaaaactccgtctcaaaaaataaataaataaataaataaataaggtcctggccacaggtgttttctggagttccatatgtaggttgctcttgctgggcttgagatgggtgattgggggtgtcctggctctatgggaccaaggagagggcgtacctacaagggttgacgttcctcttcctgccccagctccagcggaacatcttggcctcgaacccccgggtgacccgcttccatatcaactgggacaacaacatggacaggctggaggccatagagacccaggacccctccctgggctgcggcctcccactcaactgcactcctatcaagggcttggggctccctggctgcatccctggcctcctccctgagaactccatggactgcatctaactgcaggaacccagagtgtcccagcacgccgggaggggcaaccaggcctcccagcgagtcctgcagggcccatctagaggactttgggggccatcagctgcaatccaggtctgtcaaactcagcccctaggaaagaacaggccttgggtctcccctagtcctggccagaaggatgatctcgcttttcctctacaggcctataagaagcaggtacttcagttctaaattctgacttgtgttcttttcgtcttcataaattctaactaaggccactgtgccactgtgcacccttgagtaccattgatccaaagctttcccacagacctccctggcccacctagaggctttcttggtcagtgcctgtcaaggctccagtcctgctgagccaaaggctttgtcattcctttctcttcctgtacatctgagcagacccactccagctttctggtgtcacaggcgggaatgttagttagtaggtagacttagatcccatttctgtcctgctcccaggaagattcttaggtcctcttcaatccagcagcccctcccagaggtgtgatcagcaggatgctgaggaaccatgttgcctttcctgtcaatcacagccaccttcctgttatctcctaaatggatctggcttttcctggaggctgccatggttggaagatggtatcagagggcctgcctgggcagtctgtctccgggccagggtcagggaccctctgcctctggcagccttaacctgtcctctgctaggaccagggtgatttcaagccagggaagcaactgggaccctgaaaactgtccctccccagcccgctccccctctctgtgccctggtccccttgctgccatgtggatgctgttgtgattgctgtttgtatattatcaaaatgtttttatattaaaaatgtttggtctgaaaattaaaagcacttcatttagaatg

SEQ ID NO: 227 - DNA, 10858 bp, Homo sapiens
  source 1..10858: mol_type = other DNA
gtcattcgccgctggactttgacagtggtcaaaggctctgctcagttctctgtgcctgtctccctccagcactgccgaggttctctgccgaggccaaccagaaataccccttggaagctggaatcctgcaacaatggcccagggtgtcctctggatcctactcggattgctactgtggtcagacccagggacaggtgagtcagggggcagagtcctgggaccaaacctcttggctctgcagaaggcgtactgctgtcccatctatgtcttgccctgcatggagtgaggctggagactcaagctctcaaagaagctccagcatggggacatagatattcccagctccacagagtcaaggcaaggataagggaaggaatctggggcctggagagcaaaagtagggaaggcttcttggaggaggagacataagagctaggctaggaagaaagagaaatgatttgggggagaagccagaaagggcattttttgcagagaagagcaaagctacacaggttaggtggtggactggagaagaacctagattctagaccaggagagtgtgtcgagtaagacttcctggattcaaattctactactggccaggcctgtaatcccagcactttgggagatcaaggcgggcagatcacttgagatcaggagatcgagaccagcctggccaacatggtgaaaccccatctctactaaaaataccaaaaattagccaggcgtggtggcaggcacctgtaatcccagctacccaggaggctgaggccagaaaattgcttgaactcaggaggttgcagtgagctgagcactactgcactccagcctggatgatagagcaagactccgtctcaaaaaaaaaaaaaaaaaacaaaggcaaatcctgcctctgccacttccttcctgtgtgaccttaggcaggtaacttaacctctctgtgcttcagatgcctcatctgtaaagggacaccatcttagtccctttgtgcttctatataggccagggtacctgaaactgagtaaatttgtaaagaagagaaatttactttcttgcagttctgcaggctaggaagtcccaaatgccagtgctttgatcttggacttcccagcctctagaactatgagaaataaatgtctgttctttttttttgttttttagacagagtctgactctgtcgcccaggctggagtgcagcagcatgatctcagctcactgcaacctccacctcccgggttcaacagatcctcctgcctcagccccccaagtagctgggattacaggtgcccgccaccgcacccggctaacttttgtatttttagtagaaacggggtttcaccatgttggccaggctggtctcaaactcctgacctcaagtgatccgcctgcctcggcctcccaaagtgctgggattacaggcatgtgccagcacacctggccaaatttctgtttttcataaattacccaacctcagagatctgttatagcagcaccaatgtactaagacaggggctaaaaggacctacctcacaagagttgtgaagactaactgcgttaaattattaatatataagtcacctagactagtagctagcacatagtaaatgtttactgaaagttagctattatttgataacccatctctgaaccagctctgagcctaacttagcatttctaggtttgcagttcagccactgacatttccccaacatggcacaagcccatcctgctcttccccctgcctcccaggctattttattttattttattttattttaatttaattttattttatttattttattttatgatggagtctcactctgtcacccaggctggaatgcagtggggggttcttggctcactgcaacctccacctcctgggttcaagcagttctcctgcctcagcctcctgagtagctggggttacaggtgtgtgccaccatgcccagctaatttttgtatttttagtagtgacggagtctcgccatgttgatccggctggtcctgagctcccgacctcaggtgatccacccgcctctgcctcctaaagtgctgggattacaggcgtgagccactgcgtctggcatttttttttttttttttttttttgagacaaagtctcactctgtcacccaggctggagtgcagtggcgcaatctcggctcactgcaacctccacctcccatgttcaagtgattctcccgtctcagcctcccaagtagctgggattacaggcacacaccaccatgcctggctaatttttgtatttttattagagatggggtttcacggtgttggccaggctggccttgaactcctgatctcaggtgatccactcacctcggcctccgaaagtgctgggattacaggcctaagccaccacagccagtcccaggcatctttcaaaatacctttccctctaacatccccaatttttaacttcaattcatcacaaaagaccatccatctctccctctcacgatctggggactcttccacttttgtccactgcaatgtcactacctaccttctgccaccttcatctctcacctccacactgtctccccttttctatcctggcaccccaaaaatccatttccttatggcagccaaacaaatctaagcctaagaaaggagtcttagaatgccaggttcgtcacacctctgtcctgctcataaatctgccatggctccccagtactcacagacagtctgagctccttaaccaacaggcaatagtctgtgtacctcactttcctcatctacacaaggatagtgttgggggtcatggggttatcagatggagggctgggagcattgggtagatgtggaatcaatacaaggaggctcaggaatgggtggggctgggctaacacattctttcctcctgcagcctccctgcccctgctcatggactctgtcatccaggccctggctgagctggagcagaaagtgccagctgccaagaccagacacacagcttctgcgtggctgatgtcagctccaaactctggcccccacaatcgcctctaccacttcctgctgggggcatggagcctcaatgctacagagttggatccctgcccactaagcccagagctgttaggcctgaccaaggaggtggcccgacatgacgtacgagaagggaaggaatatggggtggtgctggcacctgatggctcgaccgtggctgtggagcctctgctggcggggctggaggcagggctgcaagggcgcagggtcataaatttgcccttggacagcatggctgccccttgggagactggagatacctttccagatgttgtggccattgctccagatgtaagagccacctcctccccaggactcagggatggctctccagatgtcaccactgcagatattggagccaacactccagatgctacaaaaggctgtccagatgtccaagcttccttgccagatgccaaagccaagtccccaccgaccatggtggacagcctcctggcagtcaccctggctggaaacctgggcctgaccttcctccgaggttcccagacccagagccatccagacctgggaactgagggctgctgggaccagctctctgcccctcggacctttacgcttttggaccccaaggcatctctgttaaccatggccttcctcaatggcgccctggatggggtcatccttggagactacctgagccggactcctgagccccggccatccctcagccacttgctgagccagtactatggggctggggtggccagagacccagggttccgcagcaacttccgacggcagaacggtgctgctctgacttcagcctccatcctggcccagcaggtgtggggaacccttgtccttctacagaggctggagccagtacacctccagcttcagtgcatgagccaagaacagctggcccaggtggctgccaatgctaccaaggaattcactgaggccttcctgggtgaggaagttccccacaccctgtgatccttcccattacagacacagacgcccccaccccgtatattcagggaagttgaggactaggagagtccagagggggcaataagggatctggtcgggggtgggtgggacagctgcacaggtgaggaaatgccagagttgggccttgaaggatgaataggagttcatctcattttgttttgcttcattatatttatttgcattaatttatggggtacaagtgtaaccttgtttctcgcatagattgcatagtggtcaagtctgggcttttaggtacccatcactccaataacatacatccacccattaagcaatctgtcatcatcctccctcctctctctccctcacccttctgaatctccactatctatctttccacacgctacatccatgcatacacattatttagctcccatttataagtgagaacttacggtatttgtctttctgtgtttgacttgtttcacttgagataatggcctccagttccatccatgttgctgcaaaagacattctttctttttttttttttttgagtctctctctgtcgcccaggctggagtgcagtggcacgatctcagctcactgcaacctccgcctcctgggttcaagcaattctcctgtctcagcctcctgagtagctgggactacaggcatgtgccaccatgtctgggtaattttttgtatttttagtagagacggagtttcatcattttatcagggtggtctcgatctcctgacctcgtgatccacccaccttggcctcccaaagtgctaggattacgggcgtgagccaccatgcccagccaacattatgtcattttttacagctgagtagtattccatttcctgccgaccactgtagacaacctcctggcaatcaccctagctggaaacctgggcctgaccttcgtccagggctctcagacccagagccatccaggcctgtaatatatatcatattttctttatccaattctcttttgatggacagttaagttaatttcttacctttgctattgtgaatagtgccctgatcaacatgtgaatgcaggtatctttttaatataatgatttattttcctttgggtagatatccagtagtgggattgctggattgaatgatagttccaatttattattattttttttgttttgttttgttttgttttgtttttagacagagtttcactcttgtctcccaggctggagtgcaatggcacaatctcggctcactgcaacctccacttcctgggttcaagcgtttctcctgcctcagcctcctaagtagctgggattacaggtgcctgccaccatgctcggctaatttttgtatttttagtagagacagagtttcaccatgttggcccaggctggtctcaaactcctaacctcaggtgatccacccacctcagcctcccaaagtgctggggttacagtcgtgagccatcacccggcttttctgtctttttaataatagctattctgattagagtaagatgatatctcattgtggttttaatttgcatttctctgatgattggtgatgttgagcatgttttcctttgcctattggccatgtgtatatcttcttttgaaaaatgtctattaatgtcttttgcccgctttttagtgggtttctttctttctttctttttctttctttctttctttttctttctttctttctttcttttctttcttgaattgtttgagttccttgtaaattctgggtattagtcccataccagtgcatagtttgcaaatattttctcccattctgaaggttgtctgttcgttctgttgattatatctttggtgtgcagaagctttttggtttaattaagtcccatttgtctactttgtttcttttgctctgtgcttttgaggtcttagtcatgaattctttgcctagcccaatgttcagaagcgttttccttaggttttcttctggtattttagagtttcaggtcttacatgtaagtctttaatctatcttgagcaatttttttttttttttttttttttttttttttttttttttgagacagagtttttgctctgttgcccaggctggagtgcaaagatgtgatctcagctcactgcaacctctgcctcctgggttcaagcgattctcctgcctcagcctcccacatagctgggattacaggtacctaccaccatgcccggctaatttttgtatttttagtagagacggggtttcaccatgttggccaggctggtctcaaactcttgatctcaggtgatccacccacctcagcctccaaaattgctgggattacaggcgtgagctagcgcatctgtccttgagttaatttttgtatatggtaagagttaggggtccagtttcattcttctgcatatggttggccagttgtcccagcaccattagcaccatttactgaataggcagtccttttcccattgcttatttttgtcgacttagttgaaaattattgtttgtaggtgtgcagctttacttctgggttctctatttcattccattggtctatgtgtctatttttgtaacagtaccatgctgttttggttactatagtattgtagtataatttgaagtcaggtaatgtgataccaggctcgttttgcttagaattgcttttgctatttgggctcatttttggttccttgcgaatttcaggatagttttgtctaattctgtgaaaaatgactttgatattttgatagagattgcattgaatctgtagattgctttgggaaatctgatttctctttttctagaaaatgaggtctcactatgttgcccaggctggtcttgaactcctgggctcaagcaatccacccacctcgcctcccaaagtgtgggattgattacaggagtgagccaccatgcctgcccccacctccaatttttttttgggggggacagagtcttgctctgtcacccaggctggtgtgcaatagcacaatctcggctcactgcaacctccacctcccaggctcaagcaagttgtctcatgcctcagcttcccaagtagctgggattacaggcatgtgccaccatgcctggttgatttttgtatttttagtagagaccgggtttcaccatgttggccaggctggtctcaaactcctgacctcaagtgatccacccacctcgtcctcccaaactgctgggactacaggtgagacccactacgtccggcccacccccaattttttttaataaaaataaaatagatttagttgagtatagttagttggtccccagggaggaccaatgtggggtgagactggaccctttccaaatctgagaggaggctgagggatggtctgtatgtgcgctttaatgcgggtggaggaacaggcagagaaacagttcctgaccccagccttcaacccccttgcctgtaggatgcccggccatccacccccgctgccgctggggagcggcgccttatcggggccgcccgaagctgctgcagctgccgctgggattcttgtacgtgcatcacacctacgtgcctgcaccaccctgcacggacttcacgcgctgcgcagccaacatgcgctccatgcagcgctaccaccaggacacgcaaggctggggagacatcggctacaggtaggaggggcccgaccggggagggggcggggcccacgttcggggatggggtctgagtgggcggagcctgatgcaggggaccgggcttgaacccgaggaaagctggcaagaccaaggaggagtcctgataggtagagcaaagttggagaggtggcgtggcttaggctaggggcggggccttaatagggaccgggaatagctaaatcatgggactccagtcagggtagagaactagtacaggaggcgggatctgggagaggagcgggacctgtggcagagtctgggtctggggccaggcagagatggcctaaaacagacaaggaggcctggtgcggtggctcccgcctgtaatctcaccactttgggaggctgagaagagaggatcgctggagcccaggagttcgagaccagcctgagcaatataggaagacacccccccacaccacccatctctacaaacaaaaaaaacttaaaaaggccaggcgcagtggctcacgcctgtaatcccagcactttgggaggccgaggcgggaggatcacgaggtcagaagattgagaccatcctggctaacacggtgaaaccccgtctctactaaaaaatacaaaaaaattagccaggcgtgatggcgggtgcctgtagtcccagctacttgggaggctgaggcaggagaatggcgtgaacccggaaggcggagcctgcagtgagccgagatcgcgccattgcactccagcctgggcgacagagcgagactccgtctcaaaaaaaaaaaaaaaaaaaaaaaaaaagctgggcatggtgttgcgcgcctgtagtcccagctactcggcaggctaaggtgggaggatcgctggagcccaggagttcgaggcttgagtgagttatgatcgcatctctgcactctagcctgagtgacagagcgagaacccgtctcgaaaagaagaaggaggccgggagcggtggctaacgcctgtaatcccagcactttgggaggctgaggcgggtggatcacctgaggtcgggagttccagaccagcctggccaacatggagaaaccccgtctctactaaaaatacaaaattagccgggcgtggtggtgcatgcctgtaatcccagctagtcgggaggctgagacgggagaatcacttgaacctgggaagcggaggttgcagtgagccgagatcgcgtcgttgcactccagcctgggctacaagagcgaaactccgtctccaaaagggaagggaagggaagggaagaagggaggggtggcgaggggaggggagaaggctgggcacagtggctcacgcctgtaatcccagcactttgggaggccgaggagggcagataacctgaggtcaggagttcgagaccagcctggccaacatggcgaaacaccgtctctactaaaaataaaaattaaaaaaaaaattagatgggcgtggtggcgggtgcctgtaatcccagctactccggaggctgaggcaggagaatcgcttgaacccgggaggtggaggtggcagtgagccgagatcgcgcccttgcacttcagcctcagcgacaagagtgaaactccatcaaaaaaagaaagaaagaaagaaggaaggaaggaaggaaggaaggaaggaaggaaggaaggaaggaaggaaggaaagaaaaaaaacccaaaaacagaaaagctctctgaattgggcaagaactgggcttgagaaaaggcagaggtggggaggagaagggcagaaaggggcgtgccagtactgaagggcggatccagagaaaccgaacggtcctggagtggcagctggtgtgagagtggaacagagctggatgggacacaggcagcgcgaccgcgcgggtcttggggtcggtggcccttggcacaccaacagaatcggggaggggagcggataagggcccgggtccccctcacgccgcatggtgcttgcttctccctcccctctgcagtttcgtggtgggctcggacggctacgtgtacgagggacgcggctggcactgggtgggcgcccacacgctcggccacaactcccggggcttcggcgtggccatagtgggcaactacaccgcggcgctgcccaccgaggccgctctgcgcacggtgcgcgacacgctcccgagttgtgcggtgcgcgccggcctcctgcggccagactacgcgctgctgggccaccgccagctggtgcgcaccgactgccccggcgacgcgctcttcgacctgctgcgcacctggccgcacttcaccgcggtgagtcttcgcagcctgcactacacggcccgccgcccctccgtctacacaagctccacgaggcccctgccccctgcctgtaacagctgtgcccgcacagcctcagccaggcccccaacttcccggcggcacgtctattcaggaaacctaggcccagcctttgcgggtcactctgcgggcaacatccctgatcctgtgacttctgcctatgcagcctcagctcagccccagacccagccagcctgtcctttccccagctcctaatacctctacctttccagccaaggcatggaccctgacacctgccaacagcccctctgccctcacaacctcagcctggccttcatgacttctctacccaagtcacaacctgtcaggctgcaccacctcatcctggcccgccgaaccttgacctcacccctgcccctacccgaaggccctctgtccacacaacatgaacctaggctgtgaccttttgccttcacaacctctgtccagtccttaatcctgtgttgcaattctctgtccagacaatctcaactctgaggttgcttgtttcgtccctgactccttaacccctgatgacaactcttatgccagcacaactttgacctgatgacctcatcccagcccttgatcgccatcactaaaacaattttagaatcacacctggacaatctcgtgctacctacatactgccactccatttcattaagctattgactagcacatccatctcggcctatagttggctttgtcctcactctctcactttgggccactgtcccctccctgatccagggttccaccaccaggagggcagacccagccacataccacaaccacccccaagcctcacactcccttgtctttttccagactgttaagccaagacctgccaggagtgtctctaagagatccaggagggagccacccccaaggaccctgccagccacagacctccaataaagacagcatggaaaca

SEQ ID NO: 228 - DNA, 6264 bp, Homo sapiens
  source 1..6264: mol_type = other DNA
cagtggtcaaggccgcgctcgcgccgaggggctgcgagagtgaccgcggctgctccagcgctgacgccgagccatggcggacgaggagcttgaggcgctgaggagacagaggctggccgagctgcaggccaaacacggggtgagcgcatcagcccccgccaggcttggccctcgcggggcgccgccctcgcccggagtgtagggcgcgcctccggggcggaggctctgggcgcctccccggggccccggtcccctgcgctgccctggcggcctcgtggccggctcagaggtggcctcgtcgctttcctcgtcgcgaggggcccaggaggctggcggcgggggccgccacgtgcgggacctgccctggcgttggggtgtggggtcccctagcctggagcgggctcgtcctggcgggcctggatccaagcacaatctcagcttttggagccagcagccggaccgaattcagtttttccggagttcagttgttatgacccaagtttagccgacaggtattgagggtccgctgtgttcccggtgctgagagcgcggcagggtcggaggaacgcttgccccgccgggatgacagggaggggccgcctgggaagcttggatggatcacacgcccggagaggcgtttctgataagggaccgggaccttagggacggagggcgcagtctttgagttatcgttgtccctaataccgaggcccgttttattttccagaaattattcctacatgtgaaacacggtttcgtaatacagggattcccctccccagggtgctctgtattccaaagccttctgaggttgtggttttagacgttcatcaaaacgttgtaagtgggaactagttcattgatttctgtgaggcccagtttcttatttggggagttgtttctaccaccgcaagagactgttatgtataggaaacaacagaaccgttcctttttcccgccgcctcccgtgaaatttctctattaaatttaagttttttttttccaggatcctggtgatgcggcccaacaggaagcaaagcacaggtatgggctggaaacgtgaactttttgaagggtggtttcaccaaatggatttcttttgctgtagttattttaagcaggtgtgtgactcagatttttttgttttgctggaatggtgatttggccaaaatcatccgcagggtatcttcattattgttaaataaacacgtgtgcagctccacatcagaccttgtattgcaattactggttgatgtttctctgctacaatgtgagtaccttaaaaatgagcctgataataggcagctgtggcagtttcctcggctgtgggggtgacgtgagtccggtgcctcacttagtaagtgctcaataagtgttaactggtaagctattctgattgttttatcccaacacagcgcacagcacctgagacagatgcaggtaattgattcggtggcaggtttattgaatgagtatgtgattaccctatcatgctatcattttttaaaaattgtggttaaataaaatttcaccatcacaaccatttttaagtgtgctcttcagtagtgttcacactctagaatgttttcatcttgcaagactgaaacctttagctactggacaattctctatttccccttcctcaccttcttactcctcctctccagcaaatatttatagagcacctgctctgggtcaggcactgtgctgggtctacagaaataggaagggagggttcgggagaagacagacggtgagaagtatctggagtagtgataggaagtaaaacgacgcaaatttcattgatttctgccgtgtacatcttttcattgtcacatatctgaaatcaggatgccttttaaaacagattgctcttgccccagattcttccagaggggatttacttttgactctgctatcacttgagtacatttctgagaccattgaaagttaaattctctgcttgaggttttcccctgcctcctgcctagtagtgtgaattcagacagcaaccctgtaagactgaacttttttcttctttacgtcagggccaggtgcatgcaagcttttgtactgccccttactgcatggcatatttatttattctttactttgtactgagaatgttgctctttgataccccagtggtgggatcagaactcactgcagcctcaaactcctgctgggctcaagtgatcctcccacctcagcctcctgaggagctgagatgacaggcgtgcaccaccatgcctggctaatttttttaaactttttttttttttaatagcctcgctatatcacccaggctggtctcaaactcctggcttcaagtgatcctcccaccttggcctcccgagaaaccccagttttgaatggagatctctattagacctctcattttagggtttttcatttttagagatacgtaaaactatggtgtatcttagaattgatggcatcttagggttctgtgatataatagtttgtggcaggccaggtgtggtgactgaagcctgtagacccagctactcaggaggccgagggggaagaatcacttgagcacaggagcttgagctgatcatagctgcagtgagctgtgattgcaccactgtactccagcatgaacagcagagtgagaccccatctttttttattgttgttgagatgaagtctcactccatcacccaggctggagtgcagtggcacaatcttggctcaccgtaacctctgcctctgagcttcaagcgattctcctgcctctgcctcccaagtagctgggattacaggcacccgccaccatgcccggctaatttttgtatttttagtagagatggggtttcaccatgttggccaggctggtctcaaactcctgacctcaagtgatccacccacctcagcctcccaaagtgctgagattacaggcatgagccaccatgcctggcctagaccccatctcttaaagtttgtggcagggctgcagtactcaaaccataaagaagtggcctatggaaatgagctttaagccacattccatgaaccgaagggcctctgagctgggagtggatagtgggcacagccagccccagctctccctctcagttgagccaaagcatctgtgctcatttgtttttagatttcttaaaggatttcatttgaaagaaaaaagaaacaagtccatgagaccactgtcctgtgaacgtgaactactttctatttgggtaggtaggaagaagtgaggatagttgcaaagttataatttcattccccttccccacccagaaaaatagaactgagagtcttaaaacatggaatctggctgtagcttggccacagttacctatgtctctttagcatagcctcctggatctcagctttatctctaagaaaatgatatagattagtcacatggtccttctaattgcctgaaatcccactataaatttctagcacctgtcacgcaataggtacttaagaaatgttggtgatggtgtttgaactgaggctccactctgatgaaactgtaaagctcaccttccagcctggtaggttgtcacctgtgtaatataaagctggttctttgagggcaaaaggggattctacttgaatgtagctgcagccttatgtacagcaactaccataatgcagtttgtataccgcaggccccatgtggagacacatactggatgggttctttctcgtatgttacatgggaatgccgacagctgtgttttaattgtgtttgacctatgttttcgttgtagggaagcagaaatgagaaacagtatcttagcccaagttctggatcagtcggcccgggccaggtgtaagcatctttgatttcatttccataaagttagcttgagttagttgaatggggtgattagataccattattgctatcactagatgaaatatttgcttaggctgaaaacacttgagatgtgtaagaagtgtgaagtttataaacctagagaactgtactttaatccctagtaaaagtaccaggtcacttctcttaccaagatgttctccaggtgtgtattaggtaagatttataggaaacaactcatagggccaatcacaaaatgttgctggtagttgacattttgtgtcaactggtgatggggactggggatgggggacttaggggctttttatatgtattgtcagttttagtgtatgttcagagttgttcatcataaaaaccaaaacctgtagaaagaaaaaatgagacagtcagaatgaactggtattttctgtattttaactggaagcccagtttgagtgtagaaaaggcggccacaggtggatcaccaccattatgtgtaatagataaaccgctttccagagggcagtcatatattttaagaaacaggaagcatggtgcttagaatctgagaacccaactttaatcttggctgggccactacccccatgtgcccatgtggagattggcatgggtgaacttcagttttctcatttttaagaggagtaacaatactgtcttgccctacactgagggacaagcttgtgaagtgctttggaaaggtcaatgcatagttttaaggtataacataagtgcatttgattttaatggattttttgcatatgtattttttctttttagtaagtaacttagcacttgtaaagcctgaaaaaactaaagcagtagagaattaccttatacagatggcaagatatggacaactaagtgagaaggtaagcttagacagccttgaggaactttactgttacctgctttatcaaaacatggcttcaaaaggtcagctgcatcttcactggattacagaattcttgctgactctcagaagaaattgttggagagaatagtcatacctactttaaaagagaataaattgcctttcctaaattcctctgcttcgctcctttcctggcgttgctctggaaccttgttggtgtctgtgacccaatgactgttagggtcagctagcttcaattgcccctgcactggaagcaaggtttgtcagtaacaccaattaaaatactaccagtgtaagtagaaggtgtgttttgcagatgagaaggtgctaagatgccttgcttatgttctctgtgttgctgtaataccatgaggggtatgttgtggcaaacctggcctttgagatcaagacgaaccccacctgccctgagaagccgtctgctaccaccacagcctacccgaattggtcctgtcccctaaacccctcacactgagaactgcttgtgtgggagagagctggttgggttgatcttttccgagtgtgacttacctccttcaaggggatgtttaagcttctcgggcagaagtggtgtgtctattcctgacaccaaacaccgtggtatatgtggttgtcacactcagctagtgatgataaaggtgttcttaaatatgttagctttcagttttcctgaggaagcaattttatggatacttccccctccttctcaagtgaggaatagcagagcaaattttatttggaacttaaaccaatagttataaccaatagtttcaacctcctgcctcaccactgcttccttcctgagctctttccccacacctcaaaaagagtacaaagtgattccatctgcagaggtaaattctttgtttaaaaaagtactgtttttcttatcttttctggttctcctaggtatcagaacaaggtttaatagaaatccttaaaaaagtaagccaacaaacagaaaagacaacaacagtgaaagtaagtgtccccagatgcttgtggcaaatgaaaagatggatactttaaagattaatgttgagtatacatctaccacacatatttttcagcccagagacattttccttttgtcaaacacgtgaaagtttggggagaaaggctgaatctgttgggggagggttctaatttttataggctcttgactccattcccacccttttagttcacgctaagttgctttaaagacacaaatgtcttgctaaaattggtagaaatcttttctcggaaaatctgagttatgctttattagaaatgttctgacactcatttaattttcctcccagttcaacagaagaaaagtaatggactctgatgaagatgacgattattgaactacaagtgctcacagactagaacttaacggaacaagtctaggacagaagttaagatctgattatttactttgtttattgtctatatgccttttaaaaaaataaacttgttatgcaaaataaaacatttgggtaagttgttttagtatcat

SEQ ID NO: 229 - DNA, 32744 bp, Homo sapiens
  source 1..32744: mol_type = other DNA
aggcatcggtgtcgcctcgcagggaacagttgggtggcttccagcttatgccaggagtctcctcctcacccgcacatcgcggggctaggatgggatgtcgtggctgccaaatcctccgaggcaactcctgcctgggacggcctaccacaggatgggcctgagaatccggagcgcaggctcgggccgctaggacaccttcccccgcccgcggacccagccttccagcatcaccggggttcgcggaggagaaagaggaaaggcgtttggcctgccaaggccgccgtagcgagggggcggggcccggaagagcaggatggcggcgcgggacagtgacagcgaagaagatctggtcagctatgggaccgggctggagcctctggaagaaggtgcgggccgcgtgggccggcggagcctgtggaaaacaggccaagggcccaggattcgggccacaaaagcacaagtcggtgctggaccattgttagatcgttcccagcgctgggaacacggcgacgagggaggcgttagccgcgctctcggggtgctcaccttctgcagcgacagagagaggtttacagggacgggagacacaagcgtggccgaacaagggggcggcgagatagaaacaagaaaatgacggaatagctagtgtgagagcggggggtgctcaggcagtgtcttccccgagagaggacgtttgagctcagacttgaaaccgaggaagaaaacaaccatgagcaaatctggagggaaagcatttcaggcagaaggaacataaagtggcaaaggccctgaagtgggagccagtttaggaaattgaggggcaggcaggacgggtatggttgcagcagatgacagcgggggagacaggtagaaaagaatgtcagaggggctgacaggggctggatcttacttggtagggtaaagagtttggatcttgtactaagtgcaggattagggttagggttagggtcatgggaaattacacagggagggatatatatatgatttttagagacagggttttgctctgtttcccaggctggtcttgaactcctgacttcaagtgatcctctcgcttctgcctcccaaagtgcagggattacaggcttgagccactgtgctcggccaatttttaatgttattctatctttgatgttgagaatacactggttggggatgggtaagagtgaagcagggagattagcaaaaagaggtcaggagatgatggtggcatggatgggacagcagtggtggtggtgtgtagtggtctgggtggagatatattttgaaagcagagctgaccatacttgctggtggaatgtgggggtgaggggcaagatgaatcaaggttctctcctgtgtttctggtctgttccacttaacgacttgacttgttcagcaagttatgtattgagtgtccagtaagggctgttggctgtgctagccctgtagggaaggcagaggaagaatggtggaatcattgggccacaatttatttgcagacctcctgttggtgggggtcccctcccttttttcaccctgaccacatcctgccaggttgattgtacttctgggatatctccacttatgccccctttatttcctacaaacagttctggtggaaacttctgctggatactggcccttcttctaccctcggcttacaaaaggttgagaaaggggccaggcacagtggttcacacctgtaatcccagcactctgggaggctgaggtgggaggattgcttgaggtcaggagtttgagaccagcctgggcattgtagtgagactctgtctgtaacaaacaaacaaacaaacgaaacaaaaggctgagaaaggctagtcttccgaatgctttttatgtgtttgaagtcagctgttgcattttcttaagacatctctgttctacactcactatcccaagttctttttttatagagacagggtcttgctgtgttgaccatgctggtttcaaactcctgacctcaagcgatgctctcaccttggcttcccaaagtgctggattgcatgcatgagccacagtgcccaacattttttattttaaaaatagagatgaggccgggcgtggtggctcacgcctgtaatcccagcactttgggaggccgaggcgggcagatcgcgaattcagaagatcctaaccatcctggctaacacggtgaaaccccgtctctactaaaaatacaaaaaaaaattagctgggcgtggtgggggggggctcatgtagtcccagctactcgggaggctgaggcgggagaatggcgtgagactgggaggcagagcttgcagtgagccaagatggcgccactgcactccagcctgggcgacagagcgagactctgtctcaaaaaaaaaaaaaaaaaaaatagagatgggatccttctatgttgctcaggctggtcttgaactcctggcctcaagtagtcttcccagctcagcttcttaaagtgttggaattataggcgtgactctctacgcctggccccaaccatgtttttgttttttttttttttctgtgacagagtcacgctctgttgtccaggctggagtgcagtggcgcgatctcggctcactgcaacctccgccttccaggttcaagcgattctcctgcctcagcctctcaagtagctgggattataggtacattccactacgcctggctaatttttgtatttttagtagagacagggtttcgccatattggccaggctggtcttgaagtccttaggtcaagcaatccatctgccttcacctcccaaagtgttggaattacaggcgtgagccattgcatgtggcccccaaccttgcttttgaagtggaaggaaaggacatggatttgtagactttgtttttctggactaaaaacattctttaacttctcagtaatacaagtttttgaggattgattcattgtcttctaagcacttttttttgagagtttcgctcttgtcacccaggctggcatgcaatggtgcgatctcggctcactacaacctctgcctcccaggttcaagagattctccagcctcagcctcccgagtggctgggattataggtgcccaccaccatgcccggctaatttttatatttttagtagacacagggttttaccacgttggccaggctggactcgaacttctgacctcaggtgatctgcctgcctcggcctcccaaagtgctgggattacaggcgtgagccaccatgcccagccagttttctaagcactttgaaatttaaatgcactctgtctgtattttacgatataacacactagactaataattatttttactccctgctttgaagttttagtgacaggttagacaggcattggtagaggagaactccattttaattaaagttgctggccctgacagaaaggtttattagttaagagttaaccagggagcctagtgacagtggctgaactttatagacacataggccttctaatctggaaagaagggggccagatacttacctattctttccttagacacttccacttggttctagaattcttatctacagctcattctatacccagattaattttagggccaattttctcctccttgatgctgtgactctcacacttaaaactaaccgtggcttccctcgcccccaggacacactataaaccctgcagcactatgttcaaggccccctgcactgtccgcctttctggttccatcttccgctcattccttggcctcccgttagactggactttctcaatacacctgaccttgccctttttttttttttctttttttttttgagatggagtcttgctctgcctcccaggctggagtgcaatggcacgatctttgctcactgcaaccaccgcctcccaggttcaagcgattctcctgcctcagcctcttgagtagctgagcttacaggcgcatgccaccacgcccggctaatttttgtatttttagtagaggcggggtttcacaatgttggccaggctggtcttgaactcctgacctcaggtgatccgcccgcctcggcctcccaaagtgctggaattacaggcgtgggccactgtgcccagcgactttgcccttttatccctccttctgtttactggtgggagtcagtggctctgtgtccctatctgcagctatcaaaattctgcttattcctaacggtggctgatgttgcagaccttctcattgtcagaagtgctccagtacgtgcaggtcttctctgctgggctcggagtgtcctgagaacgggagcagagttttgttcagttttctataccccagctctagaagggctgcttgcatggcaaggccctcatcaactttttgtttttgtttttgagacagtcttgctttatcccccaggcgggagtacagtggcatgattatggctcactgcagccttggcctcctgggctcaagcgatcctcccagctcagcaccccccagcccccagtaaccaggactataggcgcataccaccatgcccggctaattttaaacattgcgtcactatgttgcccaggtttgtctcaaaccactgcttctaatgactcgaaccactcctacctgggcctctcaaagtgctgggattacaggtgtgagccactgcacctgactcccccaccctttaaaaaaaatgtaaccattagccaaccaggggctcgttgaaattttggtcagggaatgagaggaaggaacagtataggaggcatctctggcttggagacagagctgagatctggtttcacctttgtgcttattagcagtgagtctcagggaagttacttaatcagtatccttatcagggtatgataaatgagatgatatgtactaaaggaaggaattagttgtcattagtagcagtaattaggacatggcctggctaaaatgccacccacctcctttctggagttgttccgtcactggttagaggtggtgccttctgctcaggagacctgtgggagctagttggccacattgcttggccctcatcatctgccgccacaggttgcactcagttgtctgcagatcttatctcccctttgagatcagaagcaccaagaatagcaccaagcactggcagcacctgttccctcttaccgtagcccagtgggacagttggcaatgcctggagacctttttggttgtcatgcctgtggggcataagctgctgctataggcccaggatgctgctgaacatcctgcaatgtacagaacattcccctgcaacaaagaattctccagcacaaaatatgctgagattgagaagctctgccatagccaagaatgatgccaagtgcatatatgtaatgtagtgtgtgtactgcatttccatgaaatggtgaacatcttgggttgtgggacccaagttgtaatttagtcctttagagggaaaagacattgtagctgatattaactgatttcccccatggccagggactgtgctcagctgtttacgtatgatatttaatcctcgttaccaccctacaaagatgggcttctttattaccttgattttacagttgtggaggctgaggcttagagtgatgaagtaacttgttcaagatgacaaattttttttctttttttgagacagaatctcactctgtcacccaggctagagtgcaatggcatgatcttggctcactgcaacctcctcctcctaggttcaagcgattcatctgcctcagcctcccgagtagttctgcctgccaccatgcctggctaattttttgtatcttagcagagacggggtttcaccctgttggccaggctgttctcaaactcctgacctcaggtgatccacccgcctcagcctctcaaagtgctgggattacaggcatgagtcattgcgccaggctgatgacaaatcttaacaagtagtagaaggggatttgaattcagatctctaggtctttaaacctgggctcttggctggacgcggtcgctcacacctgtaatcccagctacttgggaggctgaggcaggagaaccacttgagcccaggaagcagaagttgcagtgagccaagatcatgccactgcactccagcatgggtgacagagactgcatctcaaaaaaaaaaaataaataaagtatttcttgtgtctccctcttcttgttaagtacttcataggcatttaatttgcataacaactccatgaaatagctgttaccattaatgccatttctattttacagataagtaaattgaggcacagagagtcaaggctgaccaaagtccagcactagtaaagggagttggcttgaaactccactgtgactctcacccttaactcatacccttaaccactgtataacctacttcctcttgtgaacttttgaaaataacttgattttttttattttttaaaaaaatttaaataaattcaggattttgaattgtagttgataaaacgaggcagtaatttgtgccatagtacctgggagtttaaacctaaggaattgttaggctaggcctaaaatgtattagattaaattcccttgcttgtgtgatgtctcaacccagccctttcaacaaagtaggaaaaggaataggtttaaagaacactgtggaatcaggagattcacagaaattaaggaaactcttaggagtcggggaaaataggcaataccaaaggaaaaatgccggattcagggatggtgtgacgttctagaagaggtatggaagtgtatctctccttgccaagtgccaccccagcttctgcgcccttcatttgaagccaggagatttcagtttcatctgtcggaactctcctgacattataatttttttttttttttttgggggagaagtctcgctgtgtctcccatgctggagtgcagtggtgtgatctcggctcactgcaacctccacctctcgggttcaagcgattctcctgcctcagcctcctaagtagctgggattacagacgtctgccaccacgcccggttaatttttgtatttgttagtagagccgggattttgccatgttgaccaggttttgtaatggaatttagtgggaaaagagggcaatcattattacataagcttataaaatatattgttttctaggctatataaagcagtaaagtctaggaataacaatttaaatgattatatttgaattataagaagtaaacaatttatgatatttaaaaagtgacattttccctaaatttgaaccgaccatctcctctctttttcatttaaaaaactttttttttttttttttttaggtgaaagaccaaagaaaccaatccctcttcaggatcagactgtcagagatgaaaaaggaaggtataaacgattccacggggcctttagtggaggtttctctgctggatacttcaatactgttggctcaaaagaaggtatcattttcctaattgtagctattataccattaaagcaaatgatcaaaatattgattctccctcacccttgctttttttttttttaattttgagacaagagtctcgctctgtcgcccaggctggagtgctgttgtgtgatcttggcttactgcaacctccgcctcctggattaagcgattctcctgcctcagccttccaattagctgggataacaggcgcatgccactatgcctggctaatttaaaaaaaaatacttttagtagagacaggagtttcaccatgttggccaggctggtctcaaagtcttgaccttgagtgatctgcccaccttggcctccaaaagtgctgggattgcaggtgtgagccactgcacccggccacctttgcttttttttttttttttgcgatggagtcttgcactgttgcccaggctggagggcagtggtgtgatcttggctcactgcaacctccgcctcccgggttcaagcgattctcctgcctcagcctcccaagtaggtggaattacaggcgcctgccaccatgcccagctaattttttttgtgtttatagagacagggtttcactatgttggccagtgtggtctctaactcctggcctcaagtgatccgcctgtcttggcctcccaaagtgctgggattacaggtgtgagccactgcgctcagctttctctgaacatacactgtaacctcttgtgttctttggatatttggatgtttccagagtcaacttgtatcttgttcattgattgcaaccttatggttaaagagttttctttcactttgtaaaaaaatgcatacctcctaatcagatgattaaatgataataatgactttggtttttattgtgtcttgccattcacgaaatactcttaaacagagtctttcagttaatcattgactgtctctcgtgactgagtgagtgaggagggcaggtgtcacagggatcttgcagatgatgccaccaagggtcagagaggttaaggagccagcatggcgttagtgctgagggaagagtcaccaggtgccctcttcagacactggggaccacagcaagactggctcctcagtgctctctacctggggaaaagtcagttaaatcttttatgttatgtacttttataaatgccaagttgtttaaagtattgtatgttttaagatatattaatctagaagcatttttttgaactggaagaaatggctttctatatctcagttatgaatggaagatgaactgattttattatatgtgctgccatagtgagcacggaagatgaactgattaattcacatagcaattatcaagaaaaagatgggctagatcttttataatttttttttttttttcctgagatgtagtctcactctgtcgcccaggctggagtgcaatggcatgacctcggctcacttcaacctccgcctcctgggttcaagcaattctcctgcctcagcctcccgagtagctaggactacaggtgcccgccaccacacccggctgatttttgtattttagtagagatggggtttcaccatgttgttcaggctggtctcgaactcctgacctcaagtgttccacccgcctcagcttccccaagtgctgggattacaggcgtgagccaccatgcccggccttaccattttatttaattaattgatttattttttgagacagggtctcactctgtcgcccaggctttagtgcagtggtgcacctactgagagtagaccttccccagatgcctcagctcacagggcccttggagagaatcaggaaggaggtgcaaccctcttagagaaaactaaacaactttatgtgcagaggttacagacatatgtgacctccagagcattccctgtttgtggacgtggcacatgctcggtaaccgtggtcagggaacaaggccattggttacaggattccagtgtctgttgaaactgggggactggcagagccgctgcccttggacctgccaggttgagtctttggtcagggtactgtgaatgttgcctggattccttctgttactctctctttatccactctgactgattaaaacaccttgacatcatatctttacacttgatcttagccaaaaggcctagaagcgatgacatcatttctttagatatgttaatatgccagtggaggttgctggtctcacgtcctgcattttaaggtgaccttgcatctgtcagctcagatctgcttgtgttcatttcacagtttaactttcaatgtgtaattctatatctcttggtttcactttcttatggggaaaccttaatgtatccactaagttttacatcaggggatacagggattaataagaaatttatgtggaataattacgtctatataagcactgagatgggaagtagctaagagtttatagttattgggaatttcaagtccatacatgttatttaatcatttactcatagacccaaatactctctaggattgtaaagttctaaactctttttttttcaggatggacaccctctacctttgtgtcttcacgacagaacagagcagacaaatctgttcttggtcctgaagattttatggatgaagaggtgcgtgtgcaaaactttaattgccaattagctggtgggacaggtctagttggttgctgtaactgccttctctctccccagaaggtccaatgtacgatttcctctttgtttgtaaggctttatcttttaggtatttgatgtgcagtgtcctgtacatcagtagagtcttgttcattggaggagcattttatactggggccaatttctaaaatcaagagtgtaaggggaaagtcatatacaggcaatttacttgaaaagcctcgtggctgggtgcggtggctcacgcctgtaatcccagcactttgggaggccgagacaggcggatcacgaggtcaggagatcaagaccatcctggctaacacggtgaaaccccgtctctactaaacaaaatacaaaaaattagccgggtgtggtggcgggtgcctgtagtcccagctactcgggaggctgaggcaggagaatggcgtgaacccaggaggcagagcttgcagtgagctgagattgcgccactgcactccagcctgggcgacagagcaagactccgtctcaaaaaaaaaaaaaaaaaaaaaaaaagtaaagcctctattgcctcaaaagctcagtatccatggtgctgggtctgcagctttccacagtaactctcaggcacactgcagtaaagaactgtgagtgactgaactaaaattaaacttctgctaccttaaaacctggtcgcggattcacccatgataaagattaaatagggagggagagcatcaggaagaatagctaatgcatgctgggcttaatacctaggtgatgggttgatctgtgcagcaaacctccatgacacacatttacctgtgtaacaaacctgcacatcctgcacatgtaccctggaacttaaaagttgaaggaaaaaaaagattaaataaaacatttatatcagcatgtgcgaggctgcaggtaagagggaaggaagtctcattctttttttgagtagcatcatctagaaggaaacatatctcatgtagcaagaagtctagatgtgctgagaccccaggctctctcttctcagtcttctgttggcagcttgtccttatactacctctcctcatgattgcaaaatggctgtagtagttccaggtggcacatccaggatgacgttgttcaagagaactttcctcttggtcccttttcttttcttttttttttttcctgagacggagttttgctctgttgcccaggctggagtgcagtggcgctatctcggctcactgcaacctctgcttgccaggttcaagtgattctcctgcctcagcttcccccgagtagctgggattacaggcgtgtgcaccaccatgcctggctaatttttgtatttttagtagagacggggtttcaccatattggccaggctggtctcggactcctgacctcaggtgatccacccacctcggcctcccaaagtgctgggattacaggtgtgagccaccgcacccggcagtctcttttcttaaaagcaaagtagcctttcatatgagtcctaccatgaattttctctacatttgcttgcacaaattgttttacatgcccattcctaacgcagtccctggcaaggaaagtgggatcaaaatgactggcttagataagacacaaagccccacttcataatcctgcctccccaacactgggagtaccactcctgcaatgtgtggcggtgcagaggaaggcaggtgcctagacaacgtcaggactctgcaaggaaagaggaaacgtgccaatggttggacaggcagccagcaacatctgctccagtaaaggcaaaggcacctgactctaggcctggcactcacacttgtgaatgcttgctggctggaactccaggctttgtctctttcacgctgacctttgagatactgtcgagaagaacacggccattacttcctgtcttcccagcttggtcatgctcggggtggccctaatgagcagcgactatcatgccctgcccttggccactggctttaccttgtgtgaggatgaggttctaaagtcagtgtgaggcggggcacggtggctcatgcctgtaatcccagcactttgggaggctgaggcgggtggatcacctgaggtcaggagttcgagaccagcctgaccaacatagtgaaaccccatctatactaaaaacaaacagctagccaggcatggtggtgtgtgcctgtaatcccagctacttgggaggctgaggcaggagaatcacttgaacccgggaggcggaggttgcagtgagcccagattgcaccactgcactccggcctgggcaacaagagagaaactctgtctcaaaaaaataaataaataaaaaataaagtcagtgtgtatgtctgtcactctgctgatccagaactaaattttgtagttttaactttttttttttaacagaaataaaactatgtgatgtattgtgtatagtcactttccaaataatgtaattctgtttgaatttttttgaaggatcttagtgaatttgggatagcacctaaagcgattgtcaccacagacgattttgcctccaaaaccaaagacagaatacgagaaaaggctaggcagttggccgctgctactgcccctattcctggagccaccctccttgatgacctcataacgccagcaaagtgagcatttccttctgactgtcatgatcttagcaccggtgttttgcatatgtgtgattctcttgctgagggatagtttgattgcaagtgagacaagccttcttaggctcaaagtctaagtgaaaaagggggttttgcgtaaaggatcttgcactgtcattgcacggagagattaagaactccagccactagctgtgctgctggggctctcagaggctggagagctgttaggaattacagtgacttctcccaccacccctccagaccttatagcctcgcctctgtctgcctccttctaccctcactttctgtgtatctccttgtgctcctgggcttgtggcctgatatggcagccttagaccttcagggattcccaggccacatgcttagcaaagactgtctagagtccctgtgatcccatcgtaaaggcccaggagaaaggtcatctgattgacttccccagttcaggtgtgcaccccagtgcagcctgctgtggctggaatggcagggtcacgccagatgtaatgtgggtgagggcaagggcccaggcaagacaggcctaggaactgagcaggaactcagaagccgcttatttcatattctttgttaatgttattttgaaaagttcattttcaatgccttgctatcctagattatctgttggtttcgaattgctaagaaaaatgggttggaaagaaggacaaggagttggtcctcgagtaaagagacggccacgccgacagaaacctggtgtgtatgttaattgattaactgttatcactgctgcagcgtactttttttttttttttgagacagggtcttgctctgtcgcccaggctggagtgcagtggtgcgatcccggcatactgcagccttgacctcccgggctcaagtgatccttccacgttagccccgcaagtagctgggaccacaggcatgtgccactgcgccaggctaattttttgtattttttgtagagacggggttttgccatgttgcccaggcccaggctgaggattgcctgagcaaattccaataaacgaaatagctgggcccagtggtatgtgtgtcttctaaggctttttatgtgtaatgcatgacagcttccagaaaggctgtgctagtttatgcttctgccagcagcatgtgagagttcatgtttcctaccctcccccaagctgtcacagtttaacattattacttgttccttatttcttgccctgagtctccccagccagactgtaagtgactctttgagggtaacagtcatttcttttgggttccttatgctgtggggcagtattggttactcattgagcacattactgctaggtagggcaggtgctggtagaaaatgattcctggctgggtgcagtgactcatacccataatcctggcactttgggatgctgaggtgagattatctttgagcccaggtgtttgagaccagcctgggcaacacggtgaaaccctgcctctaccaaatataccaaaattagccaggtgtggtggagcgcacctgtagtcccagctacgactcaggagagtgaggtgggaggatggctttagtccagaaggttgaggctacagtgagctatgatcatgccactgtacttcagcctgggtgacagggcgagaccctgtttctaaaacaattcccagttatcttcctctcaccgtaatgctgtagcacattttataaatgtacccatgtacctctgaagagttatcagtgaggtttttttttttttttttttttttgagatggagtttcgctcttgttgcccaggctgaagtacaatgcgcgatctcggctcactgcaacctctgcttcccggttcaagcgattctcctgcctcagcctcctgagtagctgggattacaggcttgcgccaccatgcctggctattttttttgtattttttgtagagacggggtttctccatgttggtcaggctggtctccaactcccgaccttgtgatccaccccgcctcagcctcccaaagtactgggattacaggcatgagccgctgcgcccagcctttttttttttaaattttttgtggaggcggaatctcactatgttacccaggctggtcttgaactcctgggctcaagcgatcctctcacctcagcctcccagagtgctgggattacaggtgtgatccaccgcgcccggcctggtcggggttttctatttgtagtcactcatgactattgcatttgaaatctcttttctagatcctggagtcaaaatctatggctgtgcattaccccctggaagctcggaaggatctgaggtattgcatggtgtgactgaccttcactttggtacaacagcacctgtttctgtatgactgtgaaatttggttggagacaattttagaaatcagatccaataactatacagttaaatactcataccctaaagctatcctcattatatcagcatacatattcagcaacatgccagcaccacagatacccaggtctgttcagcttcataaaatggagttggtgttagcatcctttgtgccagaaagtgatttagtcatttataacagcaccaatgaaagtttgctaattgttctgtgtggcattaatcactgcgttttcaattagtattttgtgggtttactttgcatccttcagtgactcaccttaattccactttaaacggaaatagggtgaagatgatgactacttgcctgataatgtgacctttgcacccaaagatgtcacacctgtggatttcacacctaaagataatgtgcatggtctagcttacaagggcctggatccccaccaggcactgtttggaacttcgggagaacattttaatcttttcagtggtggttctgagagagctggcgatcttggagaaattggactgaataaaggaagaaaattgggaatttcaggccaggtaaaattattttctattttataaagggggagtcattgataaatgagtctactttctttctttcttctttttagaggttctttattttctttttttttccccctaatcctcaagtggaatcaggtcaaagattctttcttaaaatgcatttttaaaatggtgactttgccatttcattattaccatttctgtttttttttgagacggggtttcgctctgttacccaggctggagtgcagtggtgcgatcttggcttactgcaacctctgtctcctgggttcaagtgattctcctgcctcagcctcctgaatagctgggattataggcatgtgccaccatgccccactaatttttgtatttttagtagagacggggtttcaccatgttggccaggctggtctcgaactcctgacttcagatgatccacctgcctcggcctcccaaagtgctaggattacaggcatgagccactgcgcctggccaccttttctttctttctttctttcttttttttttgagacagagtttgactcttgttgcccaggctggagtgcaatggcgcgatctcggctcaccgcaacctccacctcccgggttgaagcgattctcctgcctcagccacctgactagctgagattacaggcatgcgccaccaccccggctaattttgtatttttagtagagatggggtttctccatgttggtcaggctggtcttgaactcctgacctcaggtgatccacccgcctcggcctcccaaagtgctgggattacaggcgtgagccactgcgcccggcccaccttttctttttataaacgtgtttttttttcagtcttttaaacaaaaatgctacttgttagaggctcctttccgcagagagtaggagttcttccagcgggcagtagagtagcagcggcccttagaccccagccaccagcgttggcccaggccgcattgatcagttgatgaacatttcttcctttctcctcttggaagccacatttccacccctgcactgctgcttggctttgttctccactcctcttcctgtgctgggacctggagccatggctgttgtggggactggagggcagtgttggcagtagggacatggcattcacctctggtcactgttttccagaaaacttgtgtgtgtgttggtcgatctgggacccccgttcacttctctcttggtgatcttgaagtgctaacatggtttccaatcacatccttaaagtagctttatccctgaagatcccagacataccctaacacctgtgctcagtttgaaaccttgtttttttaaaggcttttggtgtaggtgccctggaagaggaagatgatgatatctatgccacagaaactctatccaagtatgacactgttctgaaggacgaggagcctggagacggactctatggctggacagcacccaggcagtataaaaaccagaaaggtaattcgacagccacaaacctaatggcaggaccaagtgtcagggtatcaggaaggaggggctgcaagagcgatacaggagcaccagcctctgttgttggtcaaagtcacggtaagaaacaaaacaaagaagcgaggcccagcatgggaagtgaaacaaatgcaggattcagacctggccaaggccaaagccagctgtcaaggtggggcccaggtgggagggagggagaggtctgtaatcagggaaagaggaatgcctggaccagtgaccacatggctggtcagagctggcagtgggtcaaagggaagcacccagagctcgaggaactgggcaggtggccaaaggaggccaacacatgcagcaggtcagaaggtcaagccaggggaccaggaggcaggtacaccaacagcctgcagcaagatggagctgggcgcccagtccgtcttctcccttgagtccctggctctgaggaggctcttgttgggataagaggctgacatctctcaacacaactttaacttcatgctgtgttgaaatttcaaggtgaatcagatcctgtggtttgaagtcacatttcagttgtttccagaaaaggtgcagggccagacagtgtagagtcggtattagcagcatgtgatttggagtcagtcagacctgggtttggatgccagctctccattgcccagctttgtgaccttaggcaaggctcataacctctctgggcattggagtccacatttgtaaagtgaggataaaatccactccagaggtggttgtgaggattaagtggcataactcagtgtctggcaaagcacctgtcccaaagactgaagaagtggcacctactattctttggttatcatacagtcatgtgtcacttgactgggatggtatgacagggaacccagggttttacacaggacactggaagggcatgtgtacccagtgttaggagacttaacctccgggtggtcagtgggctgctagtacttacttccttttttttttccttccaatgtttttctttttttttcccctgagtcatttagcttctgagccttcttccttttgcctccctatagtttctgatttctgtccccaaactatggattatttttatataacttaaatgaagatatattaatatatcataatatactatttaattttaatactatattataatcaatataccattatatattgtatatgatttatattttatataattaatatatcaatactattggtatattatgtaacataccaatacattattacatagtaatgtattgatctattttaattattcattatttattaaaagtggtgggagtatgaaattgataatatcctatatctgttaatataaatgatatttaatatacaacatattaataacaatatatcaatcctttaataattaatgatatgtaatgacatatatttaagtccgcctgctgaaccacatctttcacttttccctcgtgcaccagctttgcccccagctgattggttctcactccttccactgagctccgagcctgtccttgtccctctctgctgtggcctctctcccccagcttcctctctccccccctgcagggtcacagcatctgtagttttgactgtatgattttctattcggtgaatctatctttattttacctagtctccacggttgattttttacatttttaaattttttttttttgagacagagtctcactctgtcacccaggctggagagcagtggcatgatctcggctcactgcaacctccgtcccccgggttcaagcgattctcttgcctcagcctcctgagtaactgggattacaggtgtgcaccaccacgcccagctaatttttttttttttttttttttgaagaaggaatttccctcttgttgcccaggctggagtgtaatggcctgatcttggctcaccacagcctatgcctcccgggttcaagcaattctcctgcctcagcctcccaaggagctgggattacaggcgcctgctaccacgcccagctaatttttgtgtttttagtagagatggagtttcatcatgttggccaggctggtcttgaactcccgacctcaggtgatccgcccgcctcggcctcccagagtgctggaattacaggcgtgagctaccatggctggccatggttgatttttaaattctcattttttttttccatgatcaatagggctataatgaatatttttctgattctgtctttatgtacatttgtttatttcttcagaattcttcagaatgaactcataaacatgaaatttctgggttttgagataatacaagttccaagaatgtgaaattgaatcccacattacctgaagaaattttagtaagttctagaagctttaaaaaaagcccaacatgccaggtgcattggcttacacctgtaatcccagcactttgggaggctgaggcaggcagatcacgaggtcaggagatcgagaccatcctggccaacatggtaaaacctcgtctctactaaaaatacaaaaattagctgggtgtggtggcacatgcctgtaatgccagctactcgggaggctgaggcacgagaatcacttgaacccaggaggcagaggttgcagtgagccaagattgtgccactgtactctagcctggtgacagagcgagactccatctcaaaaaaaaaaaaaaaaaaaaaaagcccaacaggagtcaaagcacaaagaatggttttgtggggaggggagagatgtggtggtgctgaatgatgagtggctaaaagccttagctcatctgcactgcttgctgttcctgcttcaggcctgagctcctagcctgtgaaagagcttttgatggtcatgtagaaggggctttttttttttttcagaaggggcttttgagtgcagagaatacagttcatttatacggacttttggcgtaaccagtacgtgcaggaaaaccttgagaatcaaatcaaagagcttttgttggtggggttgtctctatgaccagaagacgatccccacctccaggtcagagggcattggtcattcagtttcctatgtctgtgatctttatgtcttgttaaagattacaggctgacctggtggcattgcctttcatccctatttggattgttgctaaggagatggccaggtagtcaccctgtagttcttcacctagttttacacatgacgctctcacagttgtgatttgtattttcctccatgcttgtccttttggtggtttttcttgatcttttactccacggggtatatcctttggtgcccctaaggtacttcttctaaaaatcacgtcaatatgcttgtcttggaggaccacagccttgtgacctgggtagcccaatctgtccagggcggtgtgggccgggccttagtcactgagtcaacagaggtgtggggctttgcttaccacttgttcttccctttactgctgctgttgagtgatagcatgtatgacacgtactatttatgttcttagagataagaacgtaaaatgctgatgtgttctgtcttattctaatcatctctacttctggaattaatctatgacatcattttgtagaatcagagaaagaccttcggtacgttggcaaaattttggatggattttccttggcttctaaacctttatcttctaagaaagtaagaaaaactttttttctttctttttttactggtttagttcttaaaatatttgctgctatgtgatctgagttctattaacaacaggaaagataagtaaattctgttttcaaaaaacaacagcctggttactagtgattgtctagaaaaacattctacattagaaataccagggcgaggcgcagtggctcatacctgtaatcccagcactttgggaggccaaggtgggtggatcacctgaggtcgggagtttaagaccagcctgaccaacatggagaaaccccgtctctactaaaaatacaaaattagccgcacgtggtgtcgcatgcctgtaatcccagctactagggaggctgaggtgggagaatcacttgaacccaggaggtggaggttacagtgagccaagatcacaccactgcactccagcctggacaacacgtaaaactctgtctcaaaaaaaaaaaaaaaaaatcagttggccaggcgtggtggctcacgcctgtaatcccagcactttgggaggccaaggttggcagatcacctgaggttaggagtttgagaccaccctggtcaatatggcaaaaccccatctctactaaaaatacaaaaattagctaggtgtggtggtgggcgcctgtaatcccagttactcgggaggctgaggcagggagaattgcttgaacctgggtggcagaggttgcagcgagccaagatcgcaccattgcactccagcttgggcgacaagagcaaaactccgtatcgaaaagaaaagaaaagaaatatcagtcagtagctacattgtgataaaaatatctaatttctatttttttttttttttttgagatggagtcttgttctgtcacccaggctgcagtgtagtgatgcaatctcagctcaccgcaacctccgcctcccaaattcaagcgattctcctgcctcatcctcctgagtagctgggattacaggcgtgcaccaccacggctggctaatctttgtatttttagtagagatggggtttcaccatgttggtcaggctggtcttgaactcctgaccttgtgatccgcctgcctcagcctcccaaagtgctggaattacaggcgtgagccaccgcgcccggccgctaatatttcaaattcaaacttcaagtgagtggttatttacatgaaaagagacatacattagaaagagaatgaaattgctatgattctaggggaaatgtaggttaaggaaaagtagaaaacattcagaaagctggataacccatagccctggttcctccccatgctctgaagctagcaggggcaaggttccctggcctcctcagctggggccgagcagaagggagagaagccgtgtgcaggtgggtgaagttggaggagagctctgcgtgcctttgcagattgctttgtttttgtgagatgctgtcacagccacatgtgaagctcttaggccacatggcgctcttcctgtcaccaccaaagtcacatgctcacaggcacactcaggagggagttagggtgctggccagcccaggaggggtgtctggccatctgccttgtcagcattcctgttttagattgtttcacgctttaatcagctttttgttttttattcagcaaacatttgttcagtacctctaaggattggcctgtgcttgtctgggacacgggaggccaggggacagttttgatttgtttcattgtgatagttcatgtgttgtgatagccagcagaatatatctaggacagtgtcgggcatacagtaagctgctattattaccagaaatgtcaaataacattaaaggaaaatgcaggtgttttacatgtatgaaaaggaagcataaggccgggcacggtggctcacacctataatcccaacactttgggaggctgaggcggatggatcacttgaggtcaggagttcgagaccaacctggccaacatggcgaaaccccacctctactaaaaatacaaaaattagccaggcatggtggtacgtgtctgtaaacccagctacttgggaggctgaggcaggagaattacttgagcctggaaggtggaggttgcagtgagccaagattgtgccactgcacgtctagcctgggtgacagagcaagactccatctcaaaaaaagaaaaaaaaagaaaaggaagcatagtttaaaaatgatggagaagcactcactggtccttaggataaataggccagcctggccccaggtagctcccatccaacaaaggtagcagatacacaaatacagagtcgtgggcaaacatccctaagtggagagacacagtcctgggggttcctggcgcttctctggagtagggctttgggcaggaacacttcagaggagggctgtgttcatctagcctttcacacacagatttagatggttctctagatctgaatctagaggtcaaacagaacaatgatttggcagacagacagagagaaatactttcaatccaagactgggcatggtggcttacgcctgtaatcctagcactttgggaggccaatgcgggcagatcgctagagtccaggagtttgagaccagcctgggcaacatggtgaaaccccatctctacaaaaaatacaaaaaaaaaaaaaaattagctgggtgtggtggtatgtgcctgtagtcctagcctcttgggggcctgaggtgggaggattgcttgagcctgggaggtccaggctgcagtgagctgtgattggctgctgcactccagcctgggcaacagagtgagaccctgtctcaaaaaaaagaaagaaatactttgaatcccatggaggatatagagaagttgtggacacactcctcctttctgccatgttcctctgggtttttgtgtggtggtaacatgagagtgttttctggctgatttgggggtgtgtctccagaaggtgatgaagctaagatgataaaaaaacaggatttcttgacaatgataacaccactctttcatggactttcattgtgccaggggcttgacccaggctgtgtattttaacaaccacctggggagcttggggaactccagttatagcagactctctggggtggggcgcaggcatcagtatagttacaactcctcaggcgagtccagcatgcacctggacctgagagccagcggagagaggggccgggagagaggggtcagtgctttcagccacagggttacttcatcatggacttcagctttcatgtagcttaaaaatctagagaatatttcagtgtgaatttgggggaaaaaaatagtaaagaaaagtctagaaaatagcttaaataacaaacacgtgtggatttgttagaccaagagcaagggagaccatttaatgcagttatttaacaatatttagtactttcctttaccttgtctgctgtgccatcattcatgcctgtcagtgttaaaaatccccaaatttcccaaacagattttcatttcacttccgtcaacttttaaattaaagtttttaaattcctgtccccactcccctcctagctcctgggccaggtcctcttggctctactcacattattcatagtaatatcttggatgaaaaaataggccaggcgtggtggcttacgcctgtaattccagcacattgggaggctgaggcgggtggatcatttgaggtcaggagtttgagaccagcctggccaacatggtgaaaccccgtctctactaaaaatacaaaaattagccaggcatggtgatgcgtgcctgtaattcctgctacttgggaggctgaggcaggagaattgcatacccagagctgagattgcaccactgcactgcagcctggatgacagagcaagactctgtctcaaaaaaaaaaaaaaaaagaaaaagaaaaaagaaagcccgaagcttcaatttgcaactgaaacataactagaaaaaataattatgaatttaaaaataactacagttattattattattaattattatttttgagatggagtctcactctgtcacccaggctggagtgcagtggtgcgatctcagctcactgcaacctctgcttcccaggctcaagcaattctcctgcctcagccttccaagtagctgggattacaggcatccaccaccacacctggctaatttttgtatttttagtagagacggggtttcaccatgttggccaggctggtcttgaactcttgaccttaagtgatctgcctaccttgtcctcccaaagtgctgggattataggcatgagccactgtgcccagctattattattatttatttgtctttcttttttttttgtttgagacggagtctcgctctgtttcagctctgcaccggggtgcagtggcgcaatctcagctcactgcgacctctgcctcccgggtttacgcgactctcctgcctcagcacccccgagtagctgagattacaggtgtgcgctaccacgcctggctaatttttgtatttttagtagagatggggtttcaccatattggccaggctggtcttgaactcctgatctcaggtgatccacccgccttggtctcccaacatgctgggattacaggcatgatccactgttcccggccccaactattatttaaaaaaattttttttttagttttatagagatggggtctcattctgttgcccaggctcgtcatgaactcccaggctcaagcagtcctcccatcttggcctcccagagtgctgggattataggtgtgagccactgcgcccagccattattttcctccatgctttgaatggtactttttctaaattttctgatgtacagtgggccagccctacctgtaggccctgacatttatgatctattgtcatctttatagttcttatcctataaaacaggcacattagcttctttctgtagaaatgggtgggaggatattcgaaatgcctgaccactggaacacggtggctcttgtgaccctccaggtccagaggggatgctggctggacctctggccagcctgttcttgtgctacctgcctgctgagtgttaacccgggaaggggcggggttaacaaggctcagaggtaacaggttttcctgattaaatcaaacatgatcttgcagcctgtattttctgggttttgtcttggtttgttaagatctatccacctccagagctgccaagagactatcgaccagtgcattatttcagacccatggtggccgccacctccgagaactcacacttactgcaggtattatcagagtcagctggaaaggcaacgcctgacccagggacacacagtaagcaccaactgaatgcctccaaacgggctgagttgcttggagagacgcctattcaaggtatgtgccatggagaagacggaaatcatttcacataattcgagttatcaaaatcaaaatggaaagttgttgttttcccactgaagttttttacatgaatttgtattcccaaactgtggaaataccactatttattgtaaatggcatacataatagtgtgcatatcttttacttctttttttaagttttatttttaaacttatttattttgagataatgtctaggtctgtcacccaggctgaaggcagtggtaactctctataacctggaactcctgggttcaagcgttcctcccacctcagactcccatgttgctgggactataggcatgtgccaccaccacacctggcacattttttaaatagagatgagggtctcactatgttgcccaggctggtctggaacttctggcttcccaaagtgctgggattacaggtgtgagcctctgcgcccagccaaggcttgtttttccaccttcagtttggttgatgtcattcaaatcacaacttttgttgtaagctcagctgttttcagacttgtcataattatcagggaatgtggttaaggtgccttccccttctctgcacagcctgggagagtatgttttcttcctcctggggatcgcattgtgtaactcttctcccgaaagtctgaaagggatgaatgtgtctgaaagtctggaaagacatggagaatcccctgcagggtgcagcaggaaagtcccaccatgagaggtggacttggactcttaggggctcgggtctcactgccatggggaactcaataggtgtctcgtataattggcaaacagaacccttggttccccacccccatcacacactgcgcttcctcatctaagtcttctcatctcaggaagtggtgccaccatgatccactgctcggaccaggatgtaggaggcctaattcttttttttttcttaatttttaatttttatttttttttattatactttaagttctagggtacatgtgcacaacgtgcaggtttgttacatgtgtatacatgtgccacgttcgtgtgctgcacctattaactcgtcatttacataaggtatatctcctaatgctatccctccccgcttccccgggaggcctaattcttagctcctctcttttcggtcctcccgcaccctccctgaccctccttggcccttagtgagtcctctcggctctacccacacgtgtgggggttctgtccactactcatctgcatttccgtggcctcccgggtctgagccccacccctccacctggaccgttgctgcagtctccttggtggtctccttgtttcctgtccatctcccgtagactgttcccctcaccagcagctggatgaggccaactataccagccaacacctctcccacctacagaaacctccaggctccccacgaggccctgtgcggccccgcccctgcccgcctttcaggctgcaccatccaccaccttcccttaccctcccacagtgtagcgtcttcctcctcctttcctcccctggaacacgccgtcatccatgacactgcctaagggcctttgtgtttgctgtacctccctttctgttcttccctcatatttttgtgaatctggctctttttttttttagcttatgacttatctcgaatgttactttcttccagccttccccgaccaccatataatctggttatctgcctgtcccctctaccagcccgctcacacaagcccccctcagtcacatcgtcctgtttttttcatagccctcctctattgagggccagcgtattgctcctgggcttctttcgtgtctccactgccctccaagctcctgggccaggtcctggcatagagctggcactcatgagtgtttgtcccattggtgagggcttgctggggagctgtactcggaaccagggctagtggtggtggactgcaggtctggagccggggatgtcaggttccccatcctggaatcactcacgtgccctgtaagtgtgcatgtattaacttccatttttgctgactataaaacaggaatcttggctggacacagtggctcatgcctgtagtcccagaactttgggaggccaaggtgggatgatctcttgagcccaggagttgagaccagcttgggaaacatggcgtaatcccgtctacaaaaaatacaaaaagtagtcgggcatggtggtgtgtacctgtggtcccagctactcaggaggctgaggtgggaggatcacttgagcctgagaggtggaggttgcagtgagccatgatcacaccaccgtactccagtccaggtgacacagcgagaccatgtctcaaaaaaaacataggaattggccaggcgtggtggctcacgcctgtaatcccagcactttgggaggccgaggcgggtggatcacctgaggtcaggagtttgagaccaacctggccgacatgatgagaccctgtctctactaaaaatataaaaaattagccaggcattgtggcacatgcctgtagtcccggctactcggtggggatgagacaggagaattgcttgaacccaggaggttgcagtgagctgagatggtaccattgcactccaggctgggcaatagagcgagactccatctaaaataataataataataagaagaagaatctcaatttttatcactgtctagtccacagggacatattaatataaatgaaacactaaacataaaatcctcatccccaattatgtaaatttgtgttattgaaatgtatgtacagagaaacgtaaatgtggttgtctcatggctcttttcatctcttctaattactgtttttatttaggttcagctacttcagtgttagaatttctgtcccaaaaagacaaagagagaatcaaagaaatgaagcaggcaactgacctgaaagcagctcagctcaaggccaggagtctggcccagaacgctcagagcagcagagcccagctctcccctgcagcggctgctgggcactgctcttggaacatggcattaggtggtgggacggccaccttaaaagccagcaacttcaagcctttcgccaaagatccggaaaagcaaaagcgatacgacgagttcttagtacacatgaaacagggtcagaaaggtgggtgctgggcctgggtgtcccaaatctcggcccgggcggggtcatattctcactgttctcatcctagacccatatttacagttgaggtatcctgttctgtcagtgtttttgctttatcctgctgcaaatagtgcaaaggtttcaggccttggctcttgacctcagaaagcaagaacagttggcttatgttcctccatatctcaggccaaagctagctgtttaagtagagaacacagctggcggtggccggtacttacaggccgtttggtgtttgcaagtgcttgactgctacaagcattgcattcacatttcatatcagcatcatcttccacctcatccgaagatcctaaccatccattcctgactcatagtctaaaatatgacttaaaacaatagttagctattgaaccgttacagagggaaaacaatcactttgtgatctgtgaagtaaatagggcaagaatgaggcaagaatgaggaaaggggttgctgttgtatgcagtagtcctcgtgagaggttatcagtaaattacagggttgttttttaaaaacagatctttgcggaatgtaaagtctatttactgtgccttaactctctactaagaacctacatcactaatgtttatttgctttaaaaaaaaaaaacggttagtgaaagagtgtttttctgccaaaacatagggatgtggttgaggtgaacttatcactgcctgggagtggtgacaagttccttactgctgaagatttaaccaaccattagcctctcaaatggttttctctgttatgtttggtagacagaattcaataaaagcatcattttggctggggatggtggctcatgcctgtaatccaagtactttgggaggctgagatgaggatcgctttagcctaggagttcaagaccagcctgggcaacatagtgagatcctgcctctaccaaaaaaaaaaagatatatatgtatatataaaatatattatatatatatatacacacatcatattttatttatttttttgaacggagtcttgctctgttgcccaggctggagtgcagtgtcaggatcttggctcactgcaatctcagctcactgcaacctccacctcccaggttcaagtgattatcctgcctcagccttctgagcagctgggactataggtatgtgccaccacgcctggtaattttttgtttcccgtctctactaaaaatacaaaaaattagccgggcatggtggcggacgcctgtagtcccagctactcgggagactgaggcaggagaatggtgtgaacgtgggaggcggagcttgcagtaagcagagatcatgccactgcactccagcctgggagacagagtgagactccatctcagaaaaaaaaaaaaaaaaaaaaagagagatggggtttcaccatgtttgccaggctggtcccgaactcctgacctcaagtgacccacccgcctcggcctcccaaagtgctgggattacaggcatgaacaactgcgcctggcctaaattttttttaaaaaagcacaattttgaaggaaacagcaatattacctgccaaatacctcaccattcccatagtcataaaaacaaggataaggacttatgaaatatacagggatacagtggtgcccagcagatgttctcttgtaagccccatgttttcctgaaaagtgaagctgcttcttgttctctgcccccgcagatgctctggaacgctgtctggaccccagcatgacagagtgggagcgaggccgtgagcgggatgagtttgcccgggcggccctgctgtacgcatcttcccattcgaccttgtcctccaggttcactcacgccaaggaggaggatgactcagatcaggttgaagtccctcgagaccaagaggtctgttgtcaccatgtcccttacctggtgaactttaatattaaagcactgcctagccaaaatagttttttccttttttttgagacggagtctctctctgtcgcccaggctagagtgcagtggtgtgatctcggctcactgcagcctccgcttcctgggttcaagcgattctcctgcctcagccttccaagtagctgggattacaggcgctcgccacaacagccatctaatttttgtatttttagtagagatggggtttcaccatattggccaggctggtcttgaactcctgacctcaggtgatccacccgcctcggcctctcaaagtactaggattacaggcatgagccaccatgcccggccgagccaaatatttttaatcccttggtgagaagatcaaaatatacatgtataggagaataggaaaccattttatgccttagtttccaatgtactggagcataaatgttatagcacaaacttttttcacagttctagaagattgcttgaaaattttaaatgggagagcagtcaggtcagtggtgcggccacttgatggaacagaatgcatgtctttttccagaatgatgtcggggataagcagtcggctgtgaagatgaagatgtttgggaagctcacccgagacacgtttgagtggcaccctgacaagcttctatgtaagagatttaatgtccctgacccttatccagagtaagttggataaacctttacatcagtacaaaatgtattcttgatattaaagctaattttccccttacatactcatataaattcttattttttctacatgaacttatttgcatatcactggatatacaaatctacacattttatagatttgctttgataaattacttctataatttgttactaaaacaaaatctggatagcaaactttattccatattgaagctatgaaactcagatatgtcaagttacaaaagcattatgcctctctcatttgccaccttcttgttgctgctcatgtggtttacatttataatgttacttatgtttttaaattatcattataaaagttaaacactttcttatttgattaataacacttcaagaggtggggtgtggtggtgcacacttgtaatcctagcttgggaggccaaggcaggaggatcgcttgagcccaggagttcgaggccagcccgggtaacatagtaagaccccatctctaaaaaatcaaacaaacaaacaaacaaacagaacacttcaagatagtaggccgggtgcaatggctcacgcctgtaatccctgtattttgggagactgaggcaggcagatcacttgaggtcaggagttcaagaccagcctgaccaacatggtgaaaccccgtctctactaaaaatacaaaaaattagctgggcgtggtggtgcgtgcctatagtcccagctatttgggaggctgatgcaggagaattgcttgaacctgggaggcggaggttgcagtgagccaagattgtgccattgcactctagcctgggtgacaaggcgagactcaatctcaagagaaaaaaaaacaaaacaaaaagatagcatatgtggtcaaaccagagactgtcagaaactttaggtatatttttatcagtggagcttttccttaatggaaatccattttgaaagttaaattcttgtccttatcataataaggaaaatctcatgggacctaaaatcagtcacccagattct

SEQ ID NO: 230 - DNA, 4266 bp, Homo sapiens
  source 1..4266: mol_type = other DNA
ggggcggcgcgtccagctctgggccagggggtccaaagtgctcagcccccggggcacagcaggacgtttgggggccttctttcagcaggggacagcccgattggggtgagcgtcccccactccttccctccaggcctcacccctggtctggctgggccgcctattttgggagcaggagtggccagcccgaggcttcccaggcaggccaacccaagagggagggagtgtggttgaggcagtgggttctgcagggtgggatgtgggtgactcctccctgccctgctggtgcgtgtgcaccctggcagggtgtggagttgggacacacacgtgtgtagggctggttgcgtcactgcgtgggggcaccggaggcccagaggaggagtattggatgcctgacggtgtttacaccccacgtcctgctccaaccagcagtttggggagaggttgttgttcatgtccattccggccccactgtgtgtgtgtgtgtgtgtgtgtgtgtgtgtgtgtgtgtgtatccctgccccagcatgtgttttctatctctaaggcccactgggctgggcctcatgtcacttgcctgacatccgattgtgaaagatgtcacccagaggcgggcagaggggctgtcttttccttttctcgttgctgcccagggaggagacggggtgacctttcccacaggggcagcctgtggcgatgtggcagctgggcctcaccccggcagggctgtgcgtgaccccctgagtgggggaaggcaggctgttgccatggtggcctgagcgagcagaattcctccagggtgaagtgggagatatttatacccggggtcaggccgcgagcgggcgggcggagagggcagggagctgggatttcgcggggcacagtgaggccgggcatgtaggcaggtgggacttgggcgtgccctgctgtctcctgctctgtgtttgtgtgaggcagcgcctcctctgccctgccagggtaggtctgggaatcgggggcctgctgcgggaggtggaggcccaagggaggccccccggggactgtgtgtctcacccccgtccctgctacgttgtgttgttgtgtgatcccatcgtggaggttgttttggtgacactgtgtccccacgaagctggggatacccgtttctctagcttggagccaccaagatagaggacaaacacttctgtgattcagtccccagactgtctctgacttaatcccttgggttcaagccctatgtgggagagcaagggcacacactgcctaatccgtggtgtcccccccaggacaatggcgtctcttggccacatcttggttttctgtgtgggtctcctcaccatggccaaggcaggtgagtgcaggggaggctgcccgctacccacctcagccccaggggtggcggtggggaccgaagaaccaagttggagaccccaacctagactaagtcggctggggtaccaagaagtttgggggtctccacgtggggtccagtcacaggctggtatttgggggaggggagaggaagccccagatcaggcaaagatggggtgggatggggctgaatccccgatgggataactgggtcacagacagcctgccgtgagtcagggagctggggcagttaggtgccacctgccccatctgggacagtgcagagggggcagctgggacccagagagtgtgggcagcctgcccagacaccctcagactctaagcccagcaaggcagagcctccagtggtctcctcatgcccctccctgccaggaccccaggaagcattcaacccctgatttctctctctttccagaaagtccaaaggaacacgacccgttcacttacggtgagcggggggtctaattttgagtcctgggggagagcctggctttgctggtcctttgattccccctcgccctcccccagagtcccagtattgatatctctgtcattctccttccctctattttgtccttcctctctgattccacctgtctgcatcttttcctgtctgtgtctatctgtgtcactgtctatgtgatacctctctggttctctttctcttgcctgcgtctgtctcagcatctcgtggcccatcctctgcttcttcccgtcttctctcccccctgtcctcctcctccctgtcccctccctccctttcctatacacccctttcctctccctggtaccccactttcctcctcccatatctgctcccccttaattatcttacttccccccttctgcctgctggtcctttctccctgttccctccttcccaatttacccctctcctattctccctcctgtcttccctgccctcaccttccctgctctgctgctcacagactaccagtccctgcagatcggaggcctcgtcatcgccgggatcctcttcatcctgggcatcctcatcgtgctgagtgagtgcccctagctcccgccctctaccccgcctctccctggccccacctctctctggccccgcctctccctggccccgcctctccctagcccccctctccctggccccgcttctccctggtcccgcccctccctggccccgccccgccccaacccctcccaggccttgccccgcctaccctgccttggttccccggcccccggtctcgcctctagccccgccccgtcccccaagccccgcccctcgcgagggcgagctggagctacagcgccgcttggcgcccgccgggagggagcctcagcttctcctacctctccacgcccacaggcagaagatgccggtgcaagttcaaccagcagcagaggtaagacgcccctccccgccctccttcgcccgctcctgctctggagggcgccgcgggtgaggcggggagtacccctgacccgcagcccgatccccgtcagcgactatgtattaagcacctactatgtgccatggcccaagcctggccctgggaccaagcgaggaaaaaacctcccgcccttcctggccgagctcccagcctagtggaggcggtggccgtgggttccaacagccccacagatagaaaaatcacaaagcgtgataacacaaagtgcaggaaagaagaaacggcggtgaaatgagatcatctcacacgcggcccagtttagcttagagtcttgttcctagctctttgattcctcttcgaataaaatgttaaagcatggacaatgtatgaatatgttagaacaattatagatattatcataagtagtagctaatatttactgggtgtgtaccacgtgttagatacggtttcacttcctctgggagggaggtgctgttattaaccccatttgacagatgaggaaactaaggcacagggaggtaaagtcactttgttcaagatcactcaagtggaagatggggggttctgggtttccaacccaggccatctcatggcagtctgccaagtccccatgactatccctcccccaccaacttcacatccctgcccccaaatccgcggaggtactcactgttaaccagcttagaagccccctgccagcacataagctgctcctgggtgctcctcatttctggcggaccccgagcctgctcttcgtccatatctgggcctagttacaccaatctgggaaaggaggcttgtactggggggttcctagaagggcagcctctccccctttccatcccgaaatccctctgcctctgtcttcccaggactggggaacccgatgaagaggagggaactttccgcagctccatccgccgtgagtctggggagactgcgggtattctggggagagggctggttccaaggaccgcttttcccggccctccctggctgcgtagagggaagggctggatctgaaagcggagggcggggagttgccccgccgcgggccccacctgcccaggagctggggatgcctctccagaatgacccccgatctccgtgttccccccaggtctgtccacccgcaggcggtagaaacacctggagcgatggaatccggccaggtgctgcagctctgacacggcggtgggagggaaggagggaggaaggaaaggcgggagagggagggggccaagtgccagagttgaagggcggcgaggggtggggctggacgtcccccctcgcctctcacccttttcaccctcacaggactcccctggcacctgacatctcccacgctccacctgcgcgcccaccgccccctccgccgccccttccccagccctgcccccgcagactccccctgccgccaagacttccaataaaacgtgcgttcctctcgacagca

SEQ ID NO: 231 - DNA, 2635 bp, Homo sapiens
  source 1..2635: mol_type = other DNA
actgtcactcggtcccagacaccagagcaagctcaagacccagcagtgggacagccagacagacggcacgatggcactgagctcccagatctgggccgcttgcctcctgctcctcctcctcctcgccagcctgaccagtggctctgttttcccacaacaggtgagagcccagtggcctgggtccttagcagggcagcagggatgggagagccaggcctcagcctagggcactggagacacccgagcactgagcagagctcaggacgtctcaggagtactggcagctgaacaggaaccaggacaggcacggtggctcatgcctgtaatcccagcactttgggaggttgaggcaggcagcccacttgaggtcagtttgagaccagcctggccaacatggtaaaaccccgtctctactaaaaatacaaaagttagccaggcttggtggcaggtgcctgtaatcccagctactcgggagactgaggcaggagaattgcttgaacccgcaaggtggaggttgcacagtgagctgagattgcaccactgcactccagcctggcaacagagcaagactccatctccaaaaaagaacagaaatcaatgaagcaccgagtgacagggactggaaggtcctaattccatgggtatttacggaacccctacgccgtgtggagtcttattctagacagtggggacgaggccatgaacaaggtagatgagagaggagatttctccatcctggtcagggaatttgttaaagactgatgaaaacatgaataaataattgtgtctagtacattctattcgtgaatctcataacagacagtggtagagtgaccgtgacccattcgccacacagtagagtcacttttttggtttgttttttagagacagggtcttcctctgttgctgaggctggagtgcagtggtgcagtcatagttcactgcagcctcaacctcctgtgctcaagcaatcctcccacctcagcgtcccaagtagctgggacagcaggcacatgccacgggttgggggaccacaggcatggtcaaggggctggcagtcaagcaagtgtttcatgagaaagtgacagttgaccttcgtcttggagggtgagagatggaggcagcaaagacctaaggagaggacaagccagcatagcccagggtcaggctgaacaagaggagatggtgggacttggggataaggctgaggggtgggcagtccctaagtcttgtgggcaaccatgcagacactgatttttccttggaataaagaggaagcccccataagcttttttttttttttctgagatagggtctcgctctgtcgttcaggctggtgtgcagtggcatcatctgggctcactgcaacctccgcctcccgggttcaagcaattctcctgcctcagcttcccgagcagctgggattacaggcggctgccaccacgcccggctaatttttgtttttttagtagagacagggtttcaccatgttggccagactggtcttgaactcctgacctcaggtgattctcccacctcggcttcccaaagtgctgggattacaggcgtgagccactgcgcccagcctcctgtaggtttttaaaatggagaaaaccacaatctcactggccatgttttaaaaaacttaatctgccagtcaggcaccatggctcacacctgtaatcccagagttttgggaggccaaggtaggaagatcagttgagcccaggagttcaagaccagcttgggcaacacaaccagaccccacctctacaaaaaattaaaaaattagccgggtgtggtggcgtgcacctgctgtcccagctactcgggaagctgaggcgggagcatcgcttgagcacaggaggtcaaggctgcagggagctatgactgtgccactgcactctggcctgggcaacagaggaagactctgtctaaaaaacaaacaaaaaaagtgactctgctgtgtggcaaatggattgaggggcaagaatgcagggaggtgtgttaggaggctggcactggcatccaggcaggggaaggtgatatcccaaagaagagtagcagctgtggaaagaggaggaggcggatctgggaggtttttttttttaggaaaagccgcccatgggaaggtgagcagaagcaagaaagcaaggcccctcctaagagtccatttgagctctgggtttaaaccacttggagaggagcaggttgccgggagccagtctcagaggtccactgggccccctgccatcctctgcacccccttctgctttcacagacgggacaacttgcagagctgcaaccccaggacagagctggagccagggccagctggatggtgagcgcaacagtgatgcctttcctagccccctgctccctccccatgctaaggccggttccctgctcacattcccttccttcccacagcccatgttccagaggcgaaggaggcgagacacccacttccccatctgcattttctgctgcggctgctgtcatcgatcaaagtgtgggatgtgctgcaagacgtagaacctacctgccctgcccccgtcccctcccttccttatttattcctgctgccccagaacataggtcttggaataaaatggctggttcttttgttttccaa

SEQ ID NO: 232 - DNA, 3646 bp, Homo sapiens
  source 1..3646: mol_type = other DNA
ggacagggggagccctataattggacaagtctgggatccttgagtcctactcagccccagcggaggtgaaggacgtccttccccaggagccggtgagaagcgcagtcgggggcacggggatgagctcaggggcctctagaaagagctgggaccctgggaacccctggcctccaggtagtctcaggagagctactcggggtcgggcttggggagaggaggagcgggggtgaggcaagcagcaggggactggacctgggaagggctgggcagcagagacgacccgacccgctagaaggtggggtggggagagcagctggactgggatgtaagccatagcaggactccacgagttgtcactatcatttatcgagcacctactgggtgtccccagtgtcctcagatctccataactggggagccaggggcagcgacacggtagctagccgtcgattggagaactttaaaatgaggactgaattagctcataaatggaacacggcgcttaactgtgaggttggagcttagaatgtgaagggagaatgaggaatgcgagactgggactgagatggaaccggcggtggggagggggtggggggatggaatttgaaccccgggagaggaagatggaattttctatggaggccgacctggggatggggagataagagaagaccaggagggagttaaatagggaatgggttgggggcggcttggtaaatgtgctgggattaggctgttgcagataatgcaacaaggcttggaaggctaacctggggtgaggccgggttggggccgggctgggggtgggaggagtcctcactggcggttgattgacagtttctccttccccagactggccaatcacaggcaggaagatgaaggttctgtgggctgcgttgctggtcacattcctggcaggtatgggggcggggcttgctcggttccccccgctcctccccctctcatcctcacctcaacctcctggccccattcaggcagaccctgggccccctcttctgaggcttctgtgctgcttcctggctctgaacagcgatttgacgctctctgggcctcggtttcccccatccttgagataggagttagaagttgttttgttgttgttgtttgttgttgttgttttgtttttttgagatgaagtctcgctctgtcgcccaggctggagtgcagtggcgggatctcggctcactgcaagctccgcctcccaggtccacgccattctcctgcctcagcctcccaagtagctgggactacaggcacatgccaccacacccgactaacttttttgtattttcagtagagacggggtttcaccatgttggccaggctggtctggaactcctgacctcaggtgatctgcccgtttcgatctcccaaagtgctgggattacaggcgtgagccaccgcacctggctgggagttagaggtttctaatgcattgcaggcagatagtgaataccagacacggggcagctgtgatctttattctccatcacccccacacagccctgcctggggcacacaaggacactcaatacatgcttttccgctgggcgcggtggctcacccctgtaatcccagcactttgggaggccaaggtgggaggatcacttgagcccaggagttcaacaccagcctgggcaacatagtgagaccctgtctctactaaaaatacaaaaattagccaggcatggtgccacacacctgtgctctcagctactcaggaggctgaggcaggaggatcgcttgagcccagaaggtcaaggttgcagtgaaccatgttcaggccgctgcactccagcctgggtgacagagcaagaccctgtttataaatacataatgctttccaagtgattaaaccgactcccccctcaccctgcccaccatggctccaaagaagcatttgtggagcaccttctgtgtgcccctaggtactagatgcctggacggggtcagaaggaccctgacccaccttgaacttgttccacacaggatgccaggccaaggtggagcaagcggtggagacagagccggagcccgagctgcgccagcagaccgagtggcagagcggccagcgctgggaactggcactgggtcgcttttgggattacctgcgctgggtgcagacactgtctgagcaggtgcaggaggagctgctcagctcccaggtcacccaggaactgaggtgagtgtccccatcctggcccttgaccctcctggtgggcggctatacctccccaggtccaggtttcattctgcccctgtcgctaagtcttggggggcctgggtctctgctggttctagcttcctcttcccatttctgactcctggctttagctctctggaattctctctctcagctttgtctctctctcttcccttctgactcagtctctcacactcgtcctggctctgtctctgtccttccctagctcttttatatagagacagagagatggggtctcactgtgttgcccaggctggtcttgaacttctgggctcaagcgatcctcccgcctcggcctcccaaagtgctgggattagaggcatgagccaccttgcccggcctcctagctccttcttcgtctctgcctctgccctctgcatctgctctctgcatctgtctctgtctccttctctcggcctctgccccgttccttctctccctcttgggtctctctggctcatccccatctcgcccgccccatcccagcccttctccccgcctcccactgtgcgacaccctcccgccctctcggccgcagggcgctgatggacgagaccatgaaggagttgaaggcctacaaatcggaactggaggaacaactgaccccggtggcggaggagacgcgggcacggctgtccaaggagctgcaggcggcgcaggcccggctgggcgcggacatggaggacgtgtgcggccgcctggtgcagtaccgcggcgaggtgcaggccatgctcggccagagcaccgaggagctgcgggtgcgcctcgcctcccacctgcgcaagctgcgtaagcggctcctccgcgatgccgatgacctgcagaagcgcctggcagtgtaccaggccggggcccgcgagggcgccgagcgcggcctcagcgccatccgcgagcgcctggggcccctggtggaacagggccgcgtgcgggccgccactgtgggctccctggccggccagccgctacaggagcgggcccaggcctggggcgagcggctgcgcgcgcggatggaggagatgggcagccggacccgcgaccgcctggacgaggtgaaggagcaggtggcggaggtgcgcgccaagctggaggagcaggcccagcagatacgcctgcaggccgaggccttccaggcccgcctcaagagctggttcgagcccctggtggaagacatgcagcgccagtgggccgggctggtggagaaggtgcaggctgccgtgggcaccagcgccgcccctgtgcccagcgacaatcactgaacgccgaagcctgcagccatgcgaccccacgccaccccgtgcctcctgcctccgcgcagcctgcagcgggagaccctgtccccgccccagccgtcctcctggggtggaccctagtttaataaagattcaccaagtttcacgcatc

SEQ ID NO: 233 - DNA, 9868 bp, Homo sapiens
  source 1..9868: mol_type = other DNA
ataaagattcactgggactggtgaggtggcagtgctcagcagcatccgacaggagccctggcaaacaggacggatttccaggactctaccagctgccagacacggcagggagagaccccagacctcctgggtcctggctgtgggcccggattgggctcccaagtggcgtttgactcacgtggggacactcttggaagagacggtaaggatggaggctacaagggcgggaaggagggagagagagattgcatgatcttggcttctcggaatcattactttcagaatctgggaagcagaactagagtttgagaagtgcagtcttattacagccacactggaacgcacgtcacagtcctgggctcttgaattaacttgggcagcccagcagcaaagctcttgtcaaaggatctaagcattttttttctttctctttttggagacaggttttcattcttgttgcccaggctggagtgcaatggtgccatcttggctcaccgcaacctccacctcccaggttcaagggattctcttgtctcagctgggattacaagcgcatgccaccatgcctggctaattttgtatttttagtagagatggggtttctccatgttggtcaggctggtctcgaactcccgacctcaggtgatctgtccgccttggcctcccaaagtgctgggattacaggcgtgagccactgtgccctgcccaaatggtttttcacacacagatgtatgggaaacagcctctctcaaacctgcaggaattcctgcagctttcggcagatccaccaaactgtagcatgtgtagcaagcaagccctttaactcagcgattccaattcttttctctttctttccttttctctctttctttcttttgacagggtctcactctgtctcccaggctggagtgcagtggtgcgatcttggctcactgcaacctccgcctcccaggttcaagtgattctcctgccccagcctgctgagtagctgggattacaggtgcacgccaccacacctagctaatttttgtatttttagtagagatggggtttcaccatgttggccaggctggtctccaacttttgacctcaggtgatccacctaccttggcctcccaaagtgctgggattacaggcgtgaatcaccgtgcctggccccctcaatgttctatcacaaaatctgtccacattcttgtgtggtgtttgttcattctcatcgtgtagaatattccacagggtgaacaccccatgatgtgtttatccattctgctgtgggtggctatttggacggtttctcatcttgggctgctgtgaacattctggcacatgtattctggtgagcatatgtgttcttttgcggaaaggaggctgattgctgggtcgtgagggaggaatcctagaagatggatgttcaggaataaagaatgttcagactccttttttttttttttttttttgagatggagtcttgctcaggctggagtgcagtggtgcgatctcggctcactgcaacctccgcctcctgggttcacgccattctcctgcctcagcctcctgagtagctgggactacaggcgcccgccaccgcgcccagctaattttttgtattttttagtagagatggggtttcaccatgttagccaggatggtctcgatctcctgacctcgtgatccacctgcctgggcctcccaaagtgccggggattacaggtgtgagccactgcgcccggccagccttctttgattctgctccagggttttccagagcagagaacccagcaagactggatgcacagacaggcgtgcaccaagaggcacatgtgagggtgcttgcaatcacaacaaaagaaacctaagtgaccacttagtctctctgtgcctcagtttactcttttatcctttcacttaccaaatatcgaccatgcctgtgctgtgtgccaggttctgtcccagatgccagggacacagcggcacccgaggctggaaggagctgatgttgtgggatatgaggatgataatattgacctcaagggtttgtgttgagggttatatcttgtaggtcataggtgctcaataaaagccatctattattttaattattatgaaataataagaagggtacctatgatttaaaagctagatataagtacagacgctctttgacttacaatggggtcccatctctatcaacccatcgtaaggctgggcacagtggctcacgcctgtaatggcagcacttttgggaggctgaggtgggaggatttcttgagcccaggagtttgagatcagcctgggcaacagagtaagggctgtccatacagaaaaaaaaaaaaaaattagctgggcatgatggcgtgcacccgtagtcccagctactccagaggctgaggcaggaggatcagttgagcctaggaggtagaggctgtggtgagccgaggttgaaccactgaactcagcttgggtgactgaacaagacgaaaacacaaaacaaaagcccccaacattttcaacataagttgaaaatattgtaaatcaaattggatttaatacacctagcttactgaacatcatagcctactttttttttttgagacagggtctcactctgttgtccaggctggagtgcagtggcgcgatcttggctcactgcagccttgacctcacgggcgtagcctacctcaaatgtgttcagaacatttacattacccaacagcaagacaaaatcatctaagccaaatccaatttttttttttttgagatggagtctcactctgtcacccatgctggagtgcagtggtgtgatctcagctgactgcaacctccacctcccagcttcaagggattctcctgcctcggccttctgagtagctgagattacaggcactcgcccccacgcccagctaatttttttttttttttaaatctttagcagagatgagattttatcatgttggccaggctggtctcaaactcctgacctcaagtgatccgtctgcctaggactcccaaagcgttgggattacaggtgtgagcttctgcacctggccctgtttctcattattctccttaccattgttattgaatggcctttagttaataagcaccacttgggcagacagtggactgtttttgatgctttgaggacgaatggggttgatatctgtacagatagacaggaaaacagatatcgggcacgttaagtggaaaagatgaagaaatggaacaacgtatgttgaaagctcccatttctggttaagacgttacaaaggaaatgccatctacgataccattgctttgggcttacagctgggcaaattatatgcacagaaagtttcctggattgggctgggcatgttgactcacgcctgtaatcccagcactttgggaggccgaggtgggcggatcatgaggtcaggagattgagaccatcctggctaacacggtgaaaccctgtctctactaaaaatacaaaaaattagccggaagtggtagcgggcgcctgtagtcccagctactcgggagactgaggcaggagaatcatgcgaacccgggaggtggagcttgcagtgagccgagatcgcaccactgcactccagcctgggcgacagagtgatactccgtctcaaaaaaaaaaaaaaaaaaaaaaaaaaaaaaagaaagttttcgttttctggattgtaatcaacaagggccaggaagggtggagtctttgcggggtgagaggatgcgtgtggacagtgataacagcagctagcctacgtatgacacccactgaaaaccagcgctatacactcagctctacccttctaacttgttgaattcttacaacaccccctaaggcaggaatattattattcccattttactgaggcacagatagtttaggtgacttgcccaaggccacacagctggtaggaatttgagggtttttgttgttgttgtttgtttgtttgttttttatgatgcagtctcgctgttgtcgcccaggctggagtgcagtggcatgatcttggctcactgcaacctctgcctcccgggttccagcgattctcttgcctcagtctcccgagtagctggaattacaggagcccacaaccatgcctggctgatttttgtatttttagtagagaccaggtttcaccatgttgctcaggctggtcttgaactcctggcctcaagtgatccgcccacctcggcctcccaaagtgctgggattacaggtgtgagccactgtgcccggctagggggggttcagtttttaaatgctgtactctttctttctttctttccttccttccttccttccttccttccttccttccttccttccttccttccttcctttctttctttctttctttctttttctttctttcttgggacagggtctcactctgttgctcaggctggagtgcagtggcgcgatcatggctaactgcagcctcaaactcctgggctcatgtgatcttccaccccagtcttagaaaaggttgggattgcaggcacgaaccactatgcctggctaatttttaaattttttgtagagacagagggtctcactgtgttgcctaggctggtcttgaactcttggcctcaagcgatccttcctcctcaactcagcctcccaatgtactgggattacaggtgtgagccactgcacctggctaaattctgcacaccttttactctagggataaaaataatacgaaagtggaatgccagactccgaatacacacaccaagtggcctggactcttcactgctacctggcatgggggaggggagtgccccaacttcctctctgtccttcctgttgcctcaacaccagctggagtgctgagcagtgccagccaacccataatagtcagcagagagcctcagggccaggtcactctgacattgtgggggtgggggggtggggactcctgcctgggtcctgtgctacccacagctttgtctaccggagcctgtgtgccacgtgctggacaaatcttaactcctcaaggactcccaaaaccagaggtaggttcacctcaatgactcttgtttccccgatgaggaaataggcacagccagctgcaactgacacccacagtcatggaggccggggctgctcaggaccacttgctgtgctgcctgccagctctccagagcccaagatttggagatggtaatattctagggcatggggttctgcagcggggactaacacactttgaaatttacctacttagggctgggcgcggtggctcatgcctgcaatcccagcactttgggaggctgaggtgggcggatcacaaggtcaggagttcgagaccagcctggccaatatgatgaaaccccgtatctactaaaaatacacaaattagttgggcatggtggcgggtgcctgtagtcccagctactcaggaggctgaggcgggagaattgcttgaaccctggaggcggaggttgcagtgagccgagattgcgtcactgcactccagcctggatgacagagcgagactctgtctcaaaaaaaaaaattttacctacttagctgagtgatcttaggtaaattacttaacttctctgtgccttatctgtagaataaatataacaatagtgtcaaattcagacagttattataaggtttcagtgaggtcaggcacggtggctcatgcctgtaatcctagcactttgggaggccgtggcaggcagaccacttgaggtcaggaattccaaaccagcctgaccaacatggtgaaaccccgtctctactaaaaatacaaaaaattagccccgggcatggtggtgcacgcctgtaatcccagctactcgggaggcttgtggcaggagtaatgcttgaacccaggaagcagaggttgcagtgagccaaaatagcgccactgcactccagcctgggtagcagagtgagactccgtctcaaaaaaaaaaataaataaaataaaataaaacaaggtttcagtgatacagtgtttaaagctgcgtggtggccactgcctgtagtcccagctactcagggggcagaggtgggaggatcacttgagcacagagtttgaggctgcagtgagccgtgattgcaccactgcactccagcgttggcaagatggcgagaccctgtctctaaaaaaaatatatatatataaatttgccaggtgtggtggtgcacacctgtagtcccacgtactcaggaggctgaggtgggaggaccacttgagcccaggagttcgaggctgcagtgagccaagatagtgccattgcattccagcctgagtgacagagcaatatctgtccctaaaaaaaaaaaaaaagttgacacaaaacacaaaatgttcaagaaacagtggcttccaataataataattttattattattattattgtcaggcacagtggcaatcatgcctgtaatcccagcagtttgagaggctgagacaaggcaggttgcttaagccccagaattcaagaccagcatgggcaacatggtgaaaccagatgacctccaaaataataataataataataataataataataattaatcaggcatgatggtgtgcacctgtagtcctagctacttgggagggtgaggtggagggttgcttgagcccaggagatggaggctgcagtgagctgggaaagtgccgctgcagtccagtctgggctacagagccagaccctgtctcaaaaaatagtaataatatagtaataatattattgtggcccgacatggtggctcacgcctgtaatcccagcactttgggaggctgaggcaggtggatcacctgaggtcaggagttcgacaccagcctggctaacatggtgaaaccccatctctactaaaaatacaaaaattagccaggtgtggtggcatgtacctgtaatctcagctacttgggaggctgaggcaggagaattgcttgaacccaggaggcggaggttgcagtgagccgagatcatgccaccacactccagcctgggcaacagagcaaaactctgtctcaaaaaaaataaattattgctatgatagattatgtcgcttccttgctcagcaccctcctatagcacctgtctcatttggaataaatgatgatgtccttgcgttgcccacgtggccctacatgccgtggcccctgataactgtttttcatttgttttgttttgttttgtttttttctttttttgagatggagtcttgctctgttgcccaggctggagtgcactggcatgatctcagctcacagcaacctccgcctccctggttcaagtgatccctcctgcctcagcctcctgagtagctgggattacaggcgtccaccatcactccaggttatttttgtgtttttaggagagatggggtttcaccatgttggccaggctggtctcaaactcctgacctcaggtgatccacccaccttggcctcccaaattcccgtgattactggcatgagccactgtgcccggcccctgatgactctgctattgcctctcaccctctccctctggcagattccactccagccacactgggctccttgctgttcttggacatgaccgtcatgttcccacctcagggcctttgcactggctgttctcgatgcctgaaacactcttcccccagatctcgatgcatctctcccactgttccttcagatttttatgcaaatgtcaccttctcaagaagccttccctgaccatgcctgtacaactccaacatagccagcttccctgtgtgatatttttcccatagtatttattatcttctaaaatactgtggattttggattttgctcatttctttctttcttttcctatttttttttattttttgagacagagtctctctctgtcatcctggctggagtgcaggggtatgatcaagctcactcaatctcctgggcccaaatgattctcccacttcagccttttcggcagctaggatcacaggcacgcatgaccatgcctggctatgttttaaaaaattttcgtagagatggggtctccctatgttgcccaggctggtctagaactcctgacctcaagtgatcttcccaccttggcctctcaaatcgttgggattacaggcctgaaccaccgtgcccagccccaatattccaatgtactagggttctggcattgtaatattctagaattccaagatgccacttctaacaacactaagttctagaattccaattttttttttttttttttgagatggagtctcactctgtctcccaggctggagtgcagtggtgtgagctcagctcactgccacctccaccttctgggttcaagaaattctcagcctcccaagtagctgggattacaggtgcccgccaccacacccagctaatttttgtatttttagtagagacggtgtttcaccatgttggcctgtcttgaattcctgacctcaagtgatccacctgtcttggcctcccaaagtgttaagattacaggtgtgagccaccacacccggcctagaattccaatattctaaagcactggagtccttatgacgcaatattccagtttgcaaggtgctggtgggccgggctgatggacaccctagatctccagggccatggagtttcctcctctgagttttcatcgtctttctctcctgcccagacaccaggagcctgaatggggaacgattctgtcagctacgagtatggggattacagcgacctctcggaccgccctgtggactgcctggatggcgcctgcctggccatcgacccgctgcgcgtggccccgctcccactgtatgccgccatcttcctggtgggggtgccgggcaatgccatggtggcctgggtggctgggaaggtggcccgccggagggtgggtgccacctggttgctccacctggccgtggcggatttgctgtgctgtttgtctctgcccatcctggcagtgcccattgcccgtggaggccactggccgtatggtgcagtgggctgtcgggcgctgccctccatcatcctgctgaccatgtatgccagcgtcctgctcctggcagctctcagtgccgacctctgcttcctggctctcgggcctgcctggtggtctacggttcagcgggcgtgcggggtgcaggtggcctgtggggcagcctggacactggccttgctgctcaccgtgccctccgccatctaccgccggctgcaccaggagcacttcccagcccggctgcagtgtgtggtggactacggcggctcctccagcaccgagaatgcggtgactgccatccggtttctttttggcttcctggggcccctggtggccgtggccagctgccacagtgccctcctgtgctgggcagcccgacgctgccggccgctgggcacagccattgtggtggggttttttgtctgctgggcaccctaccacctgctggggctggtgctcactgtggcggccccgaactccgcactcctggccagggccctgcgggctgaacccctcatcgtgggccttgccctcgctcacagctgcctcaatcccatgctcttcctgtattttgggagggctcaactccgccggtcactgccagctgcctgtcactgggccctgagggagtcccagggccaggacgaaagtgtggacagcaagaaatccaccagccatgacctggtctcggagatggaggtgtaggctggagagacattgtgggtgtgtatcttcttatctcatttcacaagactggcttcaggcatagctggatccaggagctcaatgatgtcttcattttattccttccttcattcaacagatatccatcatgcacttgctatgtgcaaggcctttttaggcactagagatatagcagtgaccaaaacagacacaaatcctgccc

SEQ ID NO: 234 - DNA, 21263 bp, Homo sapiens
  source 1..21263: mol_type = other DNA
gcagagaggggcgcggggggcgggggtggtggggcttctggactgagccgctgagggtgcgggctgaccctgtaagtggctgcggcgggaagatggcggagctgcgcgtgctcgtagctgtcaagagggtcatcgactacgccgtgaaggtgatcgggcccccctctcccacatccctgagtcccgcagccgtgtgcttccggggccacgagcgcacactgggtgggggtcttctcgtaacccccgacctctgccgctttaacccccaaacgtcaaagtcacctgagggcaaaaatccaagagtgaagttctaacatccgatccctccggggtcacggccatgttctcttttccctcgttctggattcactctcttgataactgttcagagtgagttgctttctctatttcttacccactggaagaagtcacggtccctgtttaatgcacggagaaactgaggcacagagaggtcacccagctagagaagggcagagccgagagttctatccaggttcctctgactgctttcacccactaggctgcattacttaccattgtactcttatattacccgaaatgtgctatagagggagtcagacagggtcctgtggggccccagaagctgctttccaccctccatagccacagggtgagccaggaggctctagctagggagagagaagtgtgtttgctagagatgaaagttcaaggagccaacctgactgagctgggggtagctcacattctccatgaaagaggtgggggagggtgctctcagcgcctggcttgttgtccccagagggaagctggtgtggacagaggtgaatcagacacggtctctcaggcccgtttctctcaatgcttggcctgaactggactgaagatggtgactgtctgtccatgtctgtccttcccatcagcctggggacttacctccgtgtccccagcattacctagcgcagggcctggcaccctggaggcctcagggtgggcaaaaccagggtcacaaagttgacactgatactgcccctgcctgcttagggagtgggctggggaagagggtacaggagccagacttgagcatgaaagtgtcagtgatgatagcagccagcatttagcgggtacttacgtggcaggcatcgttccaagtcctttgcagagattaacccattcagtcctttcagtaccctttgtattatttattatttatttttattttttgagacggagttttgctctttttgcccaggctggagtgcaatggcgcagtcttggctcactgcaacctcagcctcccgagttcaagcaattctcctacctcagcctcccaggtagctgggattacaggcatgtgccaccacacctggctaattttttgtatttttagtagagatggggtttcaccatgttggtcaggctggtctcaaactccagacctcaggtgatccacccgcctgcctcggccccccaaagtgctgggattacaggtgtgagccaccgtgcctggccgaccctttgtattattaattccattggatagatgaggaaactgaggcctgtcagatctcccagccagtaagtggcagagttacgatcgaaaccccgggcaagtctggctctagactctgctctcccatctccctcaatgccccctgtcctaatgatgcctctggcagcacatgacagggatgtcacctgtagcccttttgagacacattcctcttggggtcctgggacccaacacttggtttcctccctgctctgactgttcgttactgtcacatctttggagtcctacagctccctgggcctcttctctccatcccagccctggccttccacgcctggcatgtctgggattggatccgtctcccccatggtgcaggcccacgtttgactcagctctggtcccagcatcactcagcacagagcctggcacatggatgtctctggtgtgctcagggagagaacagaggggaagcgtgaaggccgcgttgaatcagctactgtcctttccagagggtgctgccttcccctcccgcagtgccccagggctccctgcattacatcctgtctcactggatgtgtctgttgatgtccttttcagaacaaataaatgattcagaccctgccagcttcctaaacaccagattagacctgggtactgtcccaccctctttcccttctcccaaagctgtcagttctccaccccccacccttcttgccctattgtctcttggtgtcattgtctcacctggaccctcacccgggtcctccctcactcccagtctctccctctcagcccacctctacccagccttaggggcctttctgcacccagagctcaccctgctctcccctgctcccagcctgcctgtggctccccagcaccctcaggacagagtcgcagcccctctgcctggcatttgggatgctttgtggtccagcctcctcttcatggtctgcttcagccgtccacttccctccttggaccctcccttaccctttgtgcttctgccactgtgacctgctcctcctgtcctgacagaccaggccgcggcttgcccgttccatgccttcttccagcaccaccctcctacctctgctttctgtcctttgtcctgcccaactccaactcatggattatatcaaaatctagtgattctcggccaggcgcggtggctcacacctctaatccctgcactttgtgaggctgaggcgagtggatcagttgaggtcaggagtttgagaccagccaggccaacatggtgaaaccccatctctcctaaaaataaaaaaattagccaggcatggtggcacgtatctgtagtcccagctactcgggaggctgaggcaggagaatcgcttgaacctgggaggcagaggttgcagtgagccaggattgtgtccctgtactccagcctgggtgacagagctagactcagtctcaaaataataataataataatttagtgattctccctggcatcgcctcctccaggaagcccctgaccctacaccctcaggttgccttggtatatccctgggggcttctgcagtccctagatttgcttccatcagccctcgccagactggattgggatcctctgtttaccccatgttccccactgccctactccatcatccccaggctggtagctccctgcagagaggggccatgtctgatccacctctgttcccagaatcacgtgctcactccctgacctctttcacctccttttcaaacatcaccttctctgggaggacttccctgcttgcctccttaaaatcacaggccccaggtccctgtgttttgctgtgttttcccctatacttagcaactagaaagggagaggaaagtatgtttgctagagatgaaagttcaaggagccaacctaactgagtggagggagtgactcacattctccatgaaggaggtgggagcaggggcaccctctgagagcccagcttgtccccagagggaagctggtgtggacactttgtaatccacagtgttgtttacttattgattgctctggtgtctgtcgccccttctggaatttgagctccaggtgtgggggagacagtttgatgtggtcactgcttcctgagacagtgggttcactactagaatagtgcagacctcagactccaagcccagcgcctgcgtccacttcctgctgtgtgaccttgaggaaattgcttcaccactctaagcctcatttttctactctgtacaatggggatgatggtactatctactttattgagttgtaatgaaaattaaataagcccttggaacagtgcctggcacacagtggtttgttttgttttattttttgagacggagtctatctctgttgcccaggctggagtgcagtggcatgatctcagctcactggaacctccacttcccaggttcaagcaactctgcctcagcctcctgagtagctgggattacacgtgtgagccaccacgcctggctaatttttgtatttttagtagaaacgaggttttgctatgttagccaggctggtctagacctcctgacctcaggtaatccacccgcctcagcctcccaacgtgctgggattacaggtgtgagccactgtgaccagctgcaataagtgtttttattgggagtagtagtaatggatgtttagttagtcatttattcaaaacataacaaatgctgtgctcagagtgtattcgtgtgtgtgtgtgtgtgtgtgtgtgtgtgtgtgtgtgtgtgtatgtgtgtccggctgtgtgtatgtttctgggtatgtgcgtgtatctaacattttaataggtatttggcaactcagtaacaccctgtcctgttcaggggcacattttacaggaagctgatgaagcttaaccttcagggcctctttcaagaccccaggagaaaggctgggcctggtggctcacgcctgtaaacacacactttgggaggctgaggtgggtggatcacgaggtcaggagttcaagaccatcctagccaacagagtgaaactctgtctctactaaaaatacaaaaattagctgggcatggcggcgcgtgcccgtagtcccagctactcggggggctgaggcagaagaatcgcttgaaccagggaggcggaggttgcagtgaaccgagatcgtgccactgcactccagcctgggtgacagagggagactccgtctcacaaaaaaaaaaaaaaaaaaaaaaacccaggagaggctgggcaattttgtattcattatctgggattcattttcttagagatgaccccacaggatagaaactccaggcccagaaaacgtgtttccatctcggggcccaaccccgaccagccacaccctctcgtctgggagcgcctggtgtttcttcaggttttcctctttgggctccacgcacttgcccctcctgctctcagcaaggccaccttgtctgacagggcacacgtggggctcacatgtcacctcagggacgagttctctgtctgccccccgccgagttagtgatctgtcactggggtggctccctggccttggctgtcctgcttgctgagtgccctagcacgtgcccagggactcgcttgacagaaaagcctagaggacagaaccacacaagtccttgagctgtgtcaggggttcaggaagagctgtcgaaaatcactttataaaatccctcttgggccgggcgtggtggctcacacctgtaattccagcattttgggaggccgaggtgggcggatcacctgaggtcaggagttcgagaccagcctggccaacatgacgaaaccccatctctactaaaaataaaaaaattagccaggcgtgggccgggcgcggtggcccacacgtgtaatctcagcactttgggaggctgaggcgggtggatcacaaggttaggagattgagaccatcctggctaacacggtgagaccttgtctctactaaaaatacaaaaaattagccaggcgtggtggcaggcgcctgtagtcccagctactggggaggctgaggcaggagaatcgcttgaacccagaaggtggagtttgcagtgagccaagatcatactactgcaccccagcctgggcaacagaacaagactctgtatcaaaaagaaagagaaagagagagagagagagagagagaaagagagaaagaaaagagaagagaagaaaatccctcttgcctgcagtggacaacaaataggaagactggctctcctaacaccgtgggcacacgtagcctctttcagagtctcacagttcccaagacagatttggggttagacccgtggtcctgccacttccatgctcagtggccctggccaaggtacttggcctctctgtgcctcagttgcctcatctgtaaaatgagaggtaatggcagtaaccaacctcacaggctactaggatggtcaaacgagttaatgcatataaaacccttgactcgttgtctgcatgggtcagtgctgcttttaaaaaaattttttttttcttttctttttttttttttgagatagaatctggtctgtcacccaggctggagtgcattgatgtgatccctgctcactgcaacctccacctcccgggttcaagtgattctcctccctcagcctcccaactagctggaattacaggcatgtgctaaaacgctcgactaatttttgtatttttagtagagatggggttttaccatgttggccaggctggtctcgaactcctgaccacaagtgatccacccacctcagccccacaaagtgctgggattacaggtgtgagccgccacgcccagctttgaggctgtttttgatattggtggatatgtcgtctctttaagagaaagccagcacttaatgctgaatgatttacctcaattataaaactttttttttttctttttgagacaaggtctagctctgtcacccaggctagagtggtacagtcacagctcgctgcagcctcgaccctcctgggttcaagccgtcctcccacctcagcctcctcagtagctgggactacaggtgcacgccaccatgacctgctaattttgttttttggtagagatgaagtctctctatgttgcccaggctggtcttgaaatcctgggctccagtgatcctccttcctcagtctcctaaggtgctgggattacaggcatgagccatcattatttaaaaaacaaacaagctatcatttttcagccctaccattgtttcctgacttatgtaatataactaaactgtttttgaagcttaaaatcaactcaagcttaattgagaagatgagctagtttgtttcctcaggtgtgtgtgcgtgcgtgtgtgtgtgtgtgtctggaaagttcttaccctttctcctcaggagtcaggagcctgggaatcaggagcttagggctgggagttctgccagagcaagagcaagatgtggcttgaggcccttcagaagcctccctgactcacagcaagaagcttggggcctcttactgatgggtggatgaggttcttttctgtcttaaaggggcaactcctatgttgtgtttttttttttaagaaaaaaggccaggcactgcgactcacacctgtaatcccatcactttggtaggctgaagcaggcggatcactttaggccaggagttccagaccagcctgggaaacacggggaaatcctttctctacaaaaagtaaaaaaaaaaaaattagcccggcatgatggtgcccgcctgtggtcccagctactggggaggctgaagtgggaggatcacctgagcccgggaggtggaggttgcagtaaggcaaggtggcacctctgcactccagcctgggcaacgagagagatgaaaataacagttctttctctttcctctcctcttccagctccttctcctctttctcctttttctttttctttttcttttttgagatgaggtcttgctctgtcacccaggttacatgtagtggcatgatcacggctcactgcacccttgacctcctgggctcaggtgatcctcccgcctcagcctcctgagtagctgggactacaggtgtgtgccaccatacctggctgtttttttttttttttttttgttgttgtttgtttgtttgttttgaggcggagtcttgctctgtcgcccaggctggagtgccgtggcgcaatcttggctcattacaacctccacctcctgggttcaagcaattctccctgccccagcctctgagtagctgcaattacaggcgtgcactaccatgcccggctaattttttattttatttttatttttagtagagatggggttttgccatgttggccaggctggtcttgaactcttgacctcaggtgatccgcccaccttggcctcccaaagtgctgggattacaggcatgagccaccacgcccagctgtttttgtttttgttgttgttgtttgtagaacctgttgcccaggctagtatccaactcctgggcacaagtgatcctcccaccttggcctcccaaatttctgggattacagacaggagccactgcgcccggtctcagtcctccatcttttaatgttaccctctccatgaggcacagccagagtgggaagccccttatgggtcccaccttctcatctcggattctgtcctgcctgtgggaggaacagttacacccacagccccagagaaaaaggggcagggaaatagcaagagcatcccagtgtcctcaccaggctcagctgccacccgagatctgctctggccaagccctgggtggcggccacatgggagaagaggaagagggcaggctccaggccaaatggggcagctccctagcaaggcttctgtggatgtccctggaggctttttaaaaatttgtgccccaaaccaaactcgccgtcttcccggctctggctgatgtactgactggaagcccctttttggtgtcatcttcccatcacgaaccatggcctgtcagttgcacctccagaaacctcttgcatctgtctctgctgtcacagctgtctgagccactgtcacctctcactttggtgacaaacagccacccagctctctccccacttcctctcatccttttccaattttctccaccaagaatccagaatgaccttataaaaactcaggttgggccaggagcggtggctcacgcctgtaatcccctgcctttgagaggccgaggtgggtggatcaccagagatcgggagttcgagaccagcctggccaacatagtgaaaccctgtctctattaaaaatacaaaaaattagctgggcgtggtggtgggcacctgtaatcacagctactcaggaggctgaggcaggagaatcgcttgaactggggaggcagaggttgcaatgagctgagatcatgccactgctctccatcctggacaacagagcaagactccatctcaaaaaaaaaaaaaaaaagaaagaaagaaaaaaaggattgtggtgggccaagaaataaaatagccctccaaaacagccaggtttcaatccctggcacctgagaaggggaaatcacttagaaacagggtctttgcaggctggccatgttggcttatgcctgtaatcccagcactttgggaggccgaggagagcagatcacctgaggtcaggagttcaagaccagcctggccaacatggtgaaaccctgtctctactaaaaatacaaaaattagccaggcgtggtgatgcatgcctgtaatcccagctacttgggaggctgaggcaggcaaattgcttgaacccgggaggcagaggttgcagtgagccgagatttcaccactgtactccagcctgggcgacagagcgagagcccatctaaaaaaaaaaaaaaaagaaattagaaacagggtctttgcagatgtgattaaattaagcatcttgagatgggggcattatcctggattatttaggtgggccctgaatgccatctcaagagtccttataagagagagacagagggagactagacacgcagagagaggagaaggccacgtgaagacagagctgaggatgctggcattgaagataaagcgatgcagccacaagccagggagtgtcagcagaagctggaggaggcaagaaacgtgttcctcccggggcctgcagaccccttggtctcaccctggtgacactgactttggacttctggcctccagagctgtaagattctaagccaccaaatatatggtgatttgttacggcagccgagagaaactaataggagagtggttagtggttcacgctacaccctggtctacaccggaagcctctctccctggcacatgatggtgtccccaggatccagctcagagccaggcacacagtggggcccaggagagacaaaaatgatgtgcagaagcaaatgggtggggtttgccacccacctcccttacctcccttgtctgtttagcaaagaggtctttcatgctggtgttttccaaattaggttgtgaccatgtgtgatcatgacatccaggcagagggctggcatttttccgaaaaagggtagaaaatgtcagagtatggtgtgtgtgtaggcagggtcagtattggtcactgacccttacactgcagtggcatttgtgaaataggtcagggtcactggtcacgttgtctaaggtgttatccgagctcgtttcacaaccaagagaattaaagagcatagaccacccaaaaggtgaggttggagcgaaagtttaataagcaaaagaagaaagctctccacagaggagagggaagcccaagcgggttgccatttttacagttgattccaaaagctttttttttaaaaaattatttatttatttattttttattattatactttaagttttaggatacatgtgcacaacgtacaggtttgttacatgtgtttatatgtgccatgttggtgtgctgcacccagtaactcgtcctttagcattaggtatatctcctaatgctatccctcccccctccccccaccccacgacagtccccggtgtgtgatgttccccttcctgtgtccatgtgttctcattgttcaattcccacctatgagtgagaacatgcgttgtttggttttctgtccttgcgatagtttgctgagaatgatggtttccagcttcatccatgtccctacaaaggacatgaactcatcattgtttatggctgcatagtattccatggtgtatatgtgccacattttcttaatccagtctatcattgttggacatttgggttggttccaagtctttactattgtgaatagtgccgcaataaacatatgtgtgcatgtgtctttatagcagcatgatttataatcctttgggtatatacccagtaataggatggctgggtcaaatggtatttctagttctagatccctgaggaatcaccacaccgacttccacaatggttgaactagtttacagtcccaccaacagtgtaaaagtgttcctttttctccacatcctctccagcacctgttctttcctgactttttaatgatcgccgttctaactggtgtgagacggtatctcattgtgattttgatttgcatttctctgatggccagtgatgatgagcatttttcatgtgttttttggctgcataaatgtcttcttttgagaagtgtctattcatatccttcgcccactttttgatggggttgtttgtttttttcttgtacatttgtttgagttcattgtagattctggatattagccatttgtcagatgagtaggctgcaaaaattttctcccattctgtaggttgcctgttcactctgatggttaaactaaagagcttctgcacagcaaaagacaccaaaagcttttataagaaactcctttcatctctgtagctgtttgagtatcttatctgtaaagctatctgcataactctccgttatctatgtagttgtgggtacgtctttaggcaagcacaaagctccgcttctcttgtttctgtaaccgtgggtttgttttaggtaagctccgcccctccccgtgcaagttcccacagagaccaccatgtacgtgcctgaaaaggggagggaacttttcctgggagcctgtcagtcacgcaaagaacaaaaggcttctgtgctgggcagcttgagttttccccaggctgctctattgttgcctgtagctgtgatttttcaggcaggctgctcctctgaggaccacccttaactgtctacctaactggtttttccttttcttctcctcatttgtatttatgtatcagtgtattatgtatttatatacacttggagatacagtaaaatgtacctctcactgtgggttaccataaatactgtaaatttgagaaacactctttcaggcctgagaggagcagtgacaacagtagggatgatcaagtcagatgtccctggtacccaggaatggctggatgagagaaggagacagggtgacctgcccctgcctacaaactctaacccagttctgtccctggagctgtgtgaccccggacaaggccctgcccctttccaggctgtcgttgtcctcatccagcctgggagagggttggcgctgaggcccccaccttcttgcctgtttcctcctgaccccaccccttcccctcctgctgggcagatccgagtgaagcctgacaggaccggtgtggtcacggatggtgtgaagcactccatgaaccccttctgtgagatcgcggtggaggaggctgtgcggctcaaggagaagaagctggtgaaggaggtcatcgccgtcagctgtgggcctgcacagtgccaggtgatgaaggtcttggggagggggctggactcctgggtctgacggaggaggggctgggacctggactcctgggtctgagggaggaggaggctggaagtctggacccctgggtctgagggaggatgggctgatagcctggattcctgggtctgaggaagaaggggatgggggcctggactcctgggtctgaggaaggaggggctgggggcctggactcttgggtctgaggaaggaggggatggggccctggactcctgggtctgaggaagaaggggatgggggcctggattcctgggtctgaggaaggaggggatggggccctggactcctgggtctgaggaaggaggggctgggacctggactcctgggtctgagggaggaggaggctggaagtctggacccctgggtctgagggaggatgggctgatagcctggattcctgggtctgaggaaggaggggatgggggcctggactcctgggtctgaagaaggaggggatgggggcccggactcctgggtctgaggaaggaggggatgggggcccggactcctgggtctgaggaaggaggggatgggggcccggactcctgggtctgaggaaggaggggatgggggcccggactcctgggtctgaggaaggaggggatgggggcccggactcctgggtctgaggaaggaggggatgggggcccggactcctgggtctgaggaaggaggggatgggggcctggactcctgggtctgaggaaggaggggatggggccctggactcctgggtctgaggaaggaggggctgcgagccagactcctaggtccccctgaggatagcagccaagtcaagcccctctgtccttggcaggagacgattcgtaccgccctggccatgggtgcagaccgaggtatccacgtggaggtgcccccagcagaagcagaacgcttgggtcccctgcaggtggctcgggtcctggccaagctggcagagaaggagaaggtggacctggtgctgctgggcaaacaggtagctgtggtcagccctccctgtgcccccttgctcatccctgctcgggaggagggtggtggagatacggggtgagacagcagctggccaggcccagggcattcaccactccaggctgagcagcttgggactttgctgacccttctgacagagagtttgagcagggaggacagagtccctctgggtgttagaaagatcctcttgggccaggcacggtggtttacgcctgtaatctcagcactttgggaggccgaggccagtggatcacttgaggtcgagagtttgagattagcgtggccaacatggtgaaaccccatctcttctaaaaatataaaaattagccgggtgtggtatcacctgcctgtaatcccagctacttgggaggctgaggcatgagaatcactggaacctgggaggcggaggttgcagtgatacaagatcgcaccactgcactccaggcaccactgcactcctgcctgggagcagagcgagactctgtctcaaaaagaaaaaaagaagaaagatccttttgggtgagtttagaggctgggaggccgaggtgatggtcacatgggggagaatgaggcctcagccaaaggtgacaggacagagcagagacatgatgtggcaggagagactgggcttagcatggggagggagggcagggaggaggcaaggacagtgcctgggtctgccttggtaacacaggtaggaaacccaggaagaacaggaggttagaggaggatcctacaaggggagtgtgaagagcccaggagacatcgatgcaggttcaggagacaggcctgggcttgaaacaaagacttgagaattttggagggcactggggagctatgggagttctatgagcagaagaggggtgggatcagcactaggtgcagaaagagcccccctgggctttgagaatggactggaatgggaaattggaggccaggagttagggaaggaggttagggctgggtgaggacccgaccagaaccttccctgccacactggtgctccccactgagataggggtacatggagctcatctgttcccccaggagaccctcgggcaccacctctgctcaggggtagctcatctcatttgagggcaaacctcatggcctcaaccagggaaggggcagaagagggacgtcagaagagccacaggcagatgggagtgagaagaggcagggaattagggatgaggctgagaaggaaggccaaagactgcaaggtatgtcaagcagagcacggagacagcagagcacagcaggctcaggtagagctggggcccccggagagagatggggatcccagggccaggtcagttctgggacaaagaggaggctgatgggtccaggtaggtcactgggtgtcctgcccagccctgagaaagtcagaagaaaacagagagagattatcaacagcaggggcatcagagtacagatcagtcaactgtggccgaagggcctacccggagaacaggccaaaaaggcagggcctgggtggggctgcagaggccgaggtgctggaagcatggcctttgcagccccctgcatttgctggtcgttctcagactccgatgtcctacctgtcctgggccagggacagttcctggggccagggcctccagctggggaaatgccggatgaactggtcaggatgctgtttgttctaggaagcagattcacaactcaaactggcttaagccagaaagcgaatttattatctcacgtaaatcaggggcttcaggcacagcttgatccagggtcacatatgagctgtaggctcccctctaccttgtcttcactgtctgcatctccaggctcagatcccaccagcccagtgaccccagcagaaagaaaggagcatctttcccaagggccccagcaaactcccagggctgactcttctttggtgcagcttgagtcatgtgcccctccctgaaccaatcactgggctggggctagaatgtccttgctggcccagaccctgttcatgcagctgcccaggggccacatagggtgggactcctgagaggctttatacagagggcagagacttgacgacagggatgccaggtggccccacatgtccctggacaagtggctgcttatctctgggcccaagtgaggggatcgttctagaccaaaagtcagtgaactatggcccagagcgacctctgatttgtaaataaagctttattggaacatcaccacatacattcatttacatattatttatggctgcctgtgtgctacaacagcagcgctgagtcaccgtgacagagaccgtatgacctgcagagcctgagatatttactacatctgttccaccatagaaaaggtttgccaacccgactggctgcggtgactcatgcctgtaatcccagagctttgggggatcatctgaggtcagcagttcaagaccagcctggccaacatgttgaaaccctgtctctactgaaaatacaaaaattagctgggcgtggtgttgggtgcctgtaatcccagctactcaggaggctgaggcaggagaattgcttgaacccaagaggcggaggttgcagtgagccaagattgtaccattgcactccagcctgggtgacagagcaagactccgtctcaaaaagaaaaaaaagaaagaaaaagtttgccaacccctgttctagacagaggcctgaatggtccatgagctccactgattgtcatacagtcttctgtctctccccattcaggccatcgatgatgactgtaaccagacagggcagatgacagctggatttcttgactggccacaggtgagactggagtggggagcacctgctgagggccaggccctcatccctcaaacttcatttctgcctcaaggcctttgcatttgctgttctctcctcctggaacactgttccctcggattgcctcatggctttcttgttcccctccttgaggtctctgctgaggtatcacctcttcaaaggggccttccttgccatcctacgtgaaatactcatgcccacccgctcaactctaggttccccagtccccatctctgccagtccaatagaaatgcaggctggggccaggcatggtgagtcatgcctgtaatcccagcactttgggaggccgaggcaggtggattacttgaggtcaggaggagtttgagaccagcctggtcaacatgttgaaacctcgtctccactaaaaatttaaaaattagctgggtgtggtggcgtgcgcctgtagtctcagctactcagggggctgagggagaattgcttgaacttgggaggcggaggttacagtgaggcaagatcgcacgccactgcactccagcctggcaacagagggaggctccgtctcaaaaaaagaaaaaagaaatgcaggcttggcacagtggctcacacctgtagtcctagcactttgggaggccacggtgggaggattacttgagcccaggagttcgagaccagccttggcaacatagttagaccccatctctaccaaaaaagaaaagttagctgggtgtgatggcacatgcctgtagtaccagcctcaggaggctgaggtgggaggatcccttgagttcaggaggtcaagactgcagtgagctgtgatcataccactgtactccagcctaggtgaaagagggaaaccctgtctcaaaagaaaaaaaaaaaaagaagcaaggcacatagacaaatttaaaatttttcacagctacataaaaaagtaaaaagaaacagacaaaattatattttatttcaccccattatatctaaaatattattttaacatgtaatcaacataaaaatattaagatacatatgctctacaagcaatggggttacgtcctgataaatccatcataaattgaaaatattataactgagagaatgcatttaatattcttaatctaccaaatatcatagctgagcccagcctaccttaaacatgtcacaacacttaacgttagcctacagtggggtaaaataatctaacataaagcacattttataataaagtgctaaatatcccatgtaatttatcaaatactgtactggaactaaaaaaacggaatggttgtacggacactggcagtatggtttctactgaatgtttatcactgtcacatcatcggaaaactgaaaaatcttaattcaaaccatcataagtcagggaccatctgtattttacgttttttggattttctttgtactaaatcttcaaaattcagcatgtattttatatttacagcacatctcaattcaggtgctaaatttctatgagaaacacattcctaaagatgacagttgaaatagatttacacacccaagttgttcaaaacaaacttaaaagttttctagtaactgcatttccagtaactgcattgggtatctgtgtttttttgtttgtttgtttgtttgtttttgttttttttttaaacagcttcgttgagttatttacctacaataaaccgcacatatctaagttgcacaatttgttaagtttgcttttcttaaactcttttatttagatagagatgggggtctcactatgttgcccaagctggtctttaactcctgggctcaagcaagctgctcacctcagccctccaaaatttaagttttgatatgtgttacatccatgaaatcatcaccacaatcatgataatgtgtcttgaattctcagtatttatttatttttatttttttgaggtggagtcttgttctgtccccagactggagtgcagtggcgcgatcttggctcactgcagcctccgcctcccgaatttaagcgattctcctgcctcagcctcccgagtagatcggattacaagcgtgcatcaccatacctggataatttttgtatttttagtagagacagggtttcgccatgttggccaggctggtcttgaactcctgacctcaagtgatccacccgccttggcccctcaaagtgctgggattacaggcatgaaccactgcgcctggccaaattatcagtatttaaatttaaataaaatgtaaaaattcattcctcagctgcactggctggacagccacacgcagccagtggctactggatgggacaacacattcaaaaccattatcctgttttatcttcaaagcatttaccactgtctgactagcttctccaacgtgcgcccttcttgctctcatatcatgtgtcttattttcttcttattccttctgattggaaatgatctcatttgtgtgtgtgtgtttttccctggtgactggttgtcttccctggcagaatatgagcccacccaagctggtgcttcactggtcgtgttcacagtgtgtctccaggggcaggttcataagggcactaggaggaggttgtgaatgaagggaggtgatgttcacactaagacctgaaaaatgtgtccagttaataagtggacagggacaaaggtcgttagacaaagaggagtgtaggtggcatcagttaccaggggaggaaatgttgattcaggactgagaggcaaagggacctggctagaggacggggtcccagaaggtggtttaaggactggtgtggacacacacagttctgttgtctgcccagcggaggggcctcacggggggccgttgggagccagattgtcagcttttggatttaccagctgtgggtggcagtgggcgtgtaactcagcatcttgctgcctcagtttctctcatctgtaaagtggggataataacatttacctcataaagttcctgcgaggattcgatgacttgatacatcagttgcttagcacagggctcagcactcagtacatgttccctgtcaggaaggcagggaggcctcactggcagcatcaggacatgggacatcaggacatacaccgtggctctcagggaaaggaaaaagaccctctcccaggtgtacaagctcgattctaaacctcatgggaccctgcattgttcgctccctcattcattcactagtccatgcgtgtactcagtagtggcataagcagactgctcgggtcggacctgaattagcctcacccactctcctcctacactgtccctccccagggcacattcgcctcccaggtgacgctggagggggacaagttgaaagtggagcgggagatcgatgggggcctggagaccctgcgcctgaagctgccagctgtggtgacagctgacctgaggctcaacgagccccgctacgccacgctgcccaacatcatggtgagcccctggccagcgggcactgagggcctgggggtggcaagcacattgccagcccagtgccccccggtggtcgcacgtggggagggaaggatccaaaggaggtctcgtgcacaggaagccgtcacctggagtttggctgatagagagagtttgctgggtcatctctgccaatactgagagttcatgggggctgctttggctagcagggagggcttgctggtatctaggccagtagaaagccttcgctgggcagcagaaggtgttccctttgtcattccagccagtggaacaagttcactgggtcatctaggttcattagggagggtccccttggtaatttttgccaatgtgaagttaccatgtagatcatcttagttaactaggaagggtgcatggggtctcttggctaacaggtagagttcactaatcatcatggccagtagatgggttcgctgggtcatcttggccaatattaacagtttagtgggtcatctccgccaatagagaatattcatctcagccaacagggagggttcactggatcatctcaactaatggggagggttcaatgagtcatttcagccattacagagtgttcactacatcatctcagcctatagggagggttcagcgcatcatctcagcctatagggagggttcagcgcatcatctcaacctatagggagggttctgcgcatcatctcagtctatagggagggttcagcacatcatctcagtctatagggagggttcagcgcatcatctcaacctatagggagggttctgcgcatcatctcagcctatagggagggttcagcgcatcatctcagtctataggcagggttcagcgcatcatctcagcctatagggagggttcagcgcatcatctcagcctatagggagggttcagcgcatcatctcagcctatagggagggttctgcgcatcatctcagtctatagggagggttcagcgcatcatctcagcctatagggagggttcagcgcatcatctcagcctatagggagggttcagcgcatcatctcagcctatagggagggttcagcgcatcatctcagcctatagggagggttcagcgcatcatctcagcctatagggagggttcagcgcatcatctcagtctatagggagggttcagtgcatcatctcagcctattgggagccttcagcatgccatctcaaccaaaagtccactgagtcattactaccaaaaggatgggtttgccactctgttgcagccagtgaagggcttcctgatttggttacctaaaggaggactgctgcagtagttgggcctcccagggcctcctagccagcaggagttgtccacaccaggtgtggccctgtgagaagtttcgcgtgtcctggccagtgggtgggtccagagggttcagcccatgggactggtctgcaggcctggcacccatgggaaggaggtggcaggaagggtggcaggagttccacagccctgtgaacaatggcttcccatgtgcagaaagccaagaagaagaagatcgaggtgatcaagcctggggacctgggtgtggacctgacctccaagctctctgtgatcagtgtggaggacccgccccagcgcacggccggcgtcaaggtggagaccactgaggacctggtggccaagctgaaggagattgggcggatttgagcccctcccagagatggcaataaaactgactctcaacatctatctctgttaactt

SEQ ID NO: 235 - DNA, 6693 bp, Homo sapiens
  source 1..6693: mol_type = other DNA
gggcctcattgctgcagacgctcaccccagacactcactgcaccggagtgagcgcgaccatcatgtccatgctcgtggtctttctcttgctgtggggtgaggcctcctggggtctgggtccctggggcgggagggggcgggaacaggagccttacgggggctgtctccgcaggtgtcacctggggcccagtgacagaagcagccatatgtgagtgcaggggtgaggtctgggaatggtgggcccaggccgggggggagccctgtctctgtggcactgagctgatcccagccaccccttgcagtttatgagacgcagcccagcctgtgggcagagtccgaatcactgctgaaacccttggccaatgtgacgctgacgtgccaggcccacctggagactccagacttccagctgttcaagaatggggtggcccaggagcctgtgcaccttgactcacctgccatcaagcaccagttcctgctgacgggtgacacccagggccgctaccgctgccgctcgggcttgtccacaggatggacccagctgagcaagctcctggagctgacagggccaagtgagccggggcatgaattgggggccaggaggcagtgggtaggttgttgactggggggtctcccttcctccaagtcacccgatgtctctgagccccaagccccaatcttcccatctgtcaaatggggatgatgtctgtgttgtaaggaatacatggttgtgtccccagcaggcccggcatgccgtacagctcccacacactctttttctcttgccgtatgccttgtttccactggtgcctgcctgccttttcccagcaatgccctccatccctgtctccttcacagtcttatgagtgtggggcccaggttctgctgggcttcccacgtctcctgttatgcagaagcactcttcaactccaccccacccacagagtccttgcctgctccctggctctcgatggcgccagtgtcctggatcacccccggcctgaaaacaacagcagtgtgccgaggtgtgctgcggggtgtgacttttctgctgaggcgggagggcgaccatgagtttctggaggtgcctgaggcccaggaggatgtggaggccacctttccagtccatcagcctggcaactacagctgcagctaccggaccgatggggaaggcgccctctctgagcccagcgctactgtgaccattgaggagctcggtgactgtgggaaccatctctgggggctgctgggggaggaggatacagggggcatgaccacattcatcctgacctccatgctgaatgtccttgcccaggaccaggtccaggaagctggccacacggttgcctgggtctgatggttgcaaaggagtttgggcagaggatgcccaaagaatggaagggtgaggccgggtgcggtggctcacgcctataatcccagcactttgggaggctgaggccagcggatcatgaggtcaagagatcgagaccagtctacccaacatgacgaaaccccgtctctactaaaaatacaaaaattagccaggtgtggtggcaggtgcctgtagtaccagctactcaggaggctgaggcaggagaatcccttgaacctgggaggcagagcttgcagtgagctgagtggcgccactgcactccagcctgggcaacaagagcgaaactccgtttcaaaaaaaaaaaaaaaaaagaatggaagggtgttcctgggattgccacccggagggcagaggtctggggactgggcagagggcagctccagggatggggcagcctagtaatgctgcctgcattgcagctgcaccaccaccgcctgtgctgatgcaccatggagagtcctcccaggtcctgcaccctggcaacaaggtgaccctcacctgcgtggctcccctgagtggagtggacttccagctacggcgcggggagaaagagctgctggtacccaggagcagcaccagcccagatcgcatcttctttcacctgaacgcggtggccctgggggatggaggtcactacacctgccgctaccggctgcatgacaaccaaaacggctggtccggggacagcgcgccggtcgagctgattctgagcgatggtgagccggggccagcagggacagggacgcggctgggtccctggggagcaggagcagtaccaggtgtagagtctggggaagtgcagtgctctgggccagggtccaataccaactttatccgcccacccgccgattcagggtcctaaactgcaaatatgatgatgagcgtgacaaccttcaggccccacagggaataactgggtgaacaggtctggcccaggccacagggggcaccacctggcaggtcccatcccagctgccaggtctaggtgagcactgagggcctctgctgaggcagctcctccgctcgcttgccttggacctgatggtatttagcaaactctgagcaccggacagcgaaccccatgcccagcggaccacaggggcccctccgtggggcgggcattggggcggtgctcagaagacgctcgtggagcaaatccactactgagcggcatcgtgcaccaggcatcaagccatgcacaaaacatgtccccgtccccgcttcccgtctgtgtctgtagacaaacaaattactaagaaacagtgaaagggtgcgtgtgagatatccaaggactgggatgcaaaggtggggcgggcccggaggaggcgagggaggaagctggccaggtcattgcgggcagaagactcagccaaggcaaagagcgcgaggccagaccacgcgttagggccgagccagccgctgggcgcccgggtcagcccgtgtgctgctccgcagagacgctgcccgcgccggagttctccccggagccggagtccggcagggccttgcggctgcggtgcctggcgcccctggagggcgcgcgcttcgccctggtgcgcgaggacaggggcgggcgccgcgtgcaccgtttccagagccccgctgggaccgaggcgctcttcgagctgcacaacatttccgtggctgactccgccaactacagctgcgtctacgtggacctgaagccgcctttcgggggctccgcgcccagcgagcgcttggagctgcacgtggacggtgagctggcggggcaccagcgagggcgggcgcgggttcagtgcccctcggggcctcctgtctttcccctctttccttgggcgtccgacggcggcgctctgggccttggttcagcccccatcgcctaccccggcggggagcaggcgatcggtggtcgagggtctggggacgcctggaatttcggcttatttcccacggacgcaagcccgtaggtcacgtgtagcgtggtggtcggcagcagggaggctggccccaggttttcttgttcagatccctgcagctctgtggctgccttgttttattactggccatgtcagtcgtcatactggaccccccgccccggccccggtcccgcaggcgcacggctgatgtgtccttctccccatccccgccgtccccagctctgtttgtccctctgatttcctcatcgacgtctccaggactcagagcccagcagagcgtgagggcacaggtctgacctccagatcttgaggtcgtaccctttgctgggagcaccgttttctcttttctttcactttctttcttttctttcctgccttccttcctctttctttctttctctttccttctttctttcttccttccttctttctctcttttctttcttcttttttcttctttctctctctctcatctctgccccccaaccccatctctctccttcattcctcccttttcttctcctttttgttttttttttggataacttacttttattcttgcaggccggagtgcagtggtgcagtctcagctcactgcaactttcgccttctgggttcaggcagttctcctgcctcagcctcctgagtagctggtattagaggcgcatgccaccatgcccacctaattttcgtatttttagtagagaccgggttttgctatgttggctgggctggtcttgacctcctgaccttgtgatctgcccgcctctgcctcccaaagtgctgggattacacttgtgagtcaccatgcccagcctattcttgcagtgttataagccaccatccacaattgatgaaaaatgtttaatcttggccaggcaaggtggctcacgcctgtaatcacagcactttgggaggccaaggcgggtggatcacaaaatcaggagttcaagagcagcctggccaacatggagaaaccctgtctctactaaaaatacaaaattagccagctgtggtggcacatgcctgtaatcccagccacttgggaggctgaggcaggagaattgctttaacccgggaggtggagtttgcagtgagtccaggtcatgccactgcattccagcctgggcaacaagagcaaaactccatctcaaaaaaaaaaaaaatgtttaatctttaaattgtacatctatatcctatgactccaaattttatttatcactctccttaaagtctgaagaaaatgattaatttactaagctccaaagacaacacagtcccactgacataacatttagtatgatgtcctactctcctgttagaattaagaacagccagtatcaaactggcctgaaatctgattgggttcctgggctcagaataactgtagtaaatttgtaaatccacactaagacacaaaattaaactaggatgtgtatatctatcttacaagaaaacgtttcacagtaaaaattaacattatgattttaccaaatttcaacattatagtttgttaatccaatcaagctttcaaaattcctgattagcttacaattaattgcaaataacttcatgtagtttggctagcatttcaaaatggatagggaatataacttttaaaatgcgaaagtatattatacatattgcacttttctgctaggctgggctagtatcttccatggcaagatactcaaactattgaataaaatacacatttaaatcaagcacttacatgtacttcattaatttccctgaaattatcaacagcattaccaaaatcttccaggattttgtaacatttgattccttacagttttgttttgtttgtttgtttttgagacggagtgtcactctgtcacccgggctggagtgcagtggcgcaatcttggctcactgaaacctctgcctcccaggttcaagcaattttcctgcctccacctcccgagtagctgggattacaggcgcacgctgccacgcccggctaattttttgtattttagtagagacggggtttcaccgtgttacccaggctggtctggaactcctgagctcaggcaatccgcctgcctcggcctctcaaagtgctgagattacaggtgtgagccactgcgcccggcaccttaaatacacttttaaagttaaacttatggagggaaaaccctcatctattgacatagattgtatgtccttttttggtccctccatgaaggagcaccgttttctccatcatttcttcttcccttcacccgtcagagtgaccgaggctggggaccccagaagccccagagcaggcccgaatctgggacttccacggtcctgggggaggggtgcggggacactcacgtgtggcgcggatgtccggggtgtgaaggcagcgggcgcagctcggcggcgccggaggagccctctgcgcccaggaacaagacagggaagatgaagccggggctgaggcgcaggcgcgggcgcggcctggggtgtggcctggggtgtggcctggggcgtggcctggggcgtggcctggcccgaccacccgcccgctccgcccaggaccccctcccaggcctcagctccgggcgacgtggagtggggcggtcctggcgggccgagatgccgtcctgcgctgcgagggacccatccccgacgtcaccttcgagctgctgcgcgagggcgagacgaaggccgtgaagacggtccgcacccccggggccgcggcgaacctcgagctgatcttcgtggggccccagcacgccggcaactacaggtgccgctaccgctcctgggtgccccacaccttcgaatcggagctcagcgaccctgtggagctcctggtggcaggtgacgtttccctgggtcccgggtgctggttccgtctgctgatgtttgcctgggctgtgcccacctccaggagggcctctcccggctcctcccttgggcacccctggttagcgctgggtctccccagggctcgtgggggaattgcgggcgaggaaccgcccagcaaaggccctgcagctggaggcgcagatgggggtctcggctggcagccgaccacgcgcttccttccgggggggcgtcagggaggtcggccttgatttccgcgaggaggagggcataggatttcccctcctccaccatttctcttttctcccgttgtctagaaagctgatgcagccgcgggcccagggtgctgttggtgtcctcagaagtgccggggattctggactggctccctcccctcctgttgcagcacaaggccggggtctctggggggctggagaagcctccctcattcctcccaggaattaataaatgtgaagagaggctctgtttaaaatgtctttggactcccagggctgagtgggctgggatctcgtgtcctca

SEQ ID NO: 236 - DNA, 32746 bp, Homo sapiens
  source 1..32746: mol_type = other DNA
cagtcctgacgtcctacccccggttccaagaccccaagtggtgggaagcctcgcgagcggcgtcccccgaccggaagtcgaggggaggagtctagtgccgcgggctccggagtgacggaagttgtgctcttggtgaatggggttcttccttttttatttaccggtggctgtgcttccaatttaggaagaccccggcgacctgttcctcacccccgcttcgccctcacactttcgggatgtctgcgattcctgctgaggagagcgaccagctgctgatccgacccctgtaagggaccagcgagagagggaatgaagccacgggctgtgaggggcgcgaggggtaaccggagactggcctcctccgtcgcccgcgctcccacctaccccggcagcctgcctttggtccgcgcttgcgggccaggcttctcaggctcgaggggttggaggaccgttgatcggaaggggcctgctatagagtgaacgggattttgctttttcatcagtttcaggggagggtatgttggagtcggaaaaaaaaaagttttacggggccaccgctcgctttcgtacacgctaagaagcgttttcacttagcacaagcacggatctctgcgcgtcagggcaagctgtgagggagccggtgaagcttatgaccgacaggatgagaggaggacctgaatgaggctacagccgtgcagggaagaattaagtctgtttcttaacaccagggcttcacatgtgccagaagttagaaaatattagggacttgccgtgagtttcgatcttctcagctcaggccctagtagaataaggaaggtgtaaagctggagaagagaaagtgcagaggtgttagggacaaaaactcagccctcgactgtccataaggagagtggcctttcagtggacacgatcctcatcagtcgggaatgctgctgaaggggagatgcaaatgtagagaacttgaattcctacagatgagcatttcgaacccacaacatgtttattgttagatactagttggcacaacatgaatatacgctttccaaaaggtagaaagtatctcctttacacaatcattcagtaaggcttcattgagcacctgcttgggacatagtccgtttccttctgcttagttcacacctgtcatgtcttcctgtgatgagcaaacactgagcaagtgtcaagcaccacacatggggatatagacgcaacagagggcccagttaattgctctcgctcttttggagagaattacagtgcacagtgggaaatattggagagatactttggaataataggagactattactttgaagtcagacctgaagtccattatctacttgaccaattagtaggacaacaatctcactgaacccgttttctcatatggaaataagataaaacttgaagagtgaacatcgcggtaggtgctttgtaaataatagctaatctaagaacgcaggcaggcattgcactgagcactgtgaaagtatggaaaagggatttctgacagattgaggaaaaaaggatacctcgtggatcctgaaaaatgtgatgcctgagctgagtcctaaagaatgagtaggagttaaagactggggggcccaggatgttctaggcagtggaagtggcacatatgaaagtgagagtggtcacagcttgtggccagattcctcatggctgtagctaaagagttgagttagcagatgaagcgacaggcagttgaggtccagtttaggaagcacctcgtatacacaggagtttggacctttatcaagtcaattacagggagccagcgaaggctattaagcaagcatggatattgtgggaattatgttttaggaaaatctctcctggcagcagtgtagcagatgaataaaagcatggatgaataaaagcatggattgagtagagcagattcagtgagatattgaaagattctaagtctagctgacgagagcctgtagtgagtgatgtgagtgtgagagagtatgcaaatgagatcttcaggattttgtggctgatcagctgtatctggaagggtggttgtggggagggaaggcagggcagagaggatgttatgatcagattcctaagtttggcagttgggaaagggtagtgttattcactcaaggagtataagagatggggcaactctggagtaaatttgggaatttggttgtttcgtaacagctttattgagatacagtttacataccatacaactcacaatttacataccatacaactcatttaaagagtataattcagtcgttcttaacatagagttatacaaccatcacctctctctaattccagcacattttcatcactcccaagagataccttgtattcattagcagtcatagacaatccccactacctctccagccctaagcaaccactaatctacttctttatagatttgcctgttctggacatttcatgtaagtgtgatcatacaatacatactcttttgtctctggcatctttcatttagcataatctttccaaggttcaaaattgaggagttttgttcattcaataagtattttttgtgatgtgctacatgccaggtactgtagcaatacagcagtgaataagatggacaatgcctctgttcttaggaagctttcatttagtagcctgaaagaagacataagtaggtacaataacttcatgtagttgtattaagataactgatgctgggttgtggcttgctgtgaagggcaaattagaggaggtagtcaagggaaagcatctgagaaggtgacgttggaactgagacccaaatgatacaaaggagccaaccacatcaatatctgaagacaaagcatttcaggaagaaagtagagcaagtacggggcatgtggtggaaactagtttggcatcttgaatatgaagtcccgggagagatcctagtagagatacctagtgtcacgtgtatgtattaaaggtctagaattcagaagaacaatctgggttacaaatacaggcttggaagtccttagcatgtcagaaagatgagaatgaagattgagaagttggccaaggagcaaaccctcggaatatcaacatttaaagggtaggcagaggtggctgaatatgtgaaggaaacaggaaagccagcaagacaagatgagagcatcaggtcagagaagccaagggagaggtgcttgaggaaggagcaggtactccttaggagtgacaacggctgccaagagaacaagatagggactgacacctatagttccagctacttgggaggctgaggcgggaggatcacttgagcccaggagttgaaggccagactgggcaacatagggggaccttgtctcaaaaaaaaaaaaaagactgaaatgactactgagcagcaaggacagtttcagaaaagtgattggtaaaagccagagtatagcgaattgaggagcgagtagaaggtgaggaagtacaagagggtccactgccctgggaggtggtctggggaaagaataaagtgggaactaaaggagcttagagtcaagggattttaatttggggatgaacatggctgtagtatgtttaaatttggattggatggtaaagagcagacagtgaggaaaatgtcaatgacacagcagtgttgagttcctcagaaggagggagggagtacgtagagtagaatggtggaaagtttcattgtggaaagagaggtctattctatctatagaggagaaatagaaggagacagatgtgggcaggttggtaccctgttggtacatgtattcttaattattgtaccaacatgaagttgaggaaatttacaaatggactgtttatttttttgatgcagaagatggcccatgcctcaagtgaagaagaggatagaaggttggaaaatttgggaaagggaagaaagtttgaaaatagttgatatggaaatgaaatggagaaaacagccaggcaacattgagggccagttaaagtggaaggccagggtatccacaataattacaaataaaaaatgtttaaaaagtggaaggccaggaatttatggcggctctcatccacagttgtttgatcttctgtatcaacacctgtttggaggtaggatctcagtttggggatagatccattgcatgtccatctgactgagttccttgaggtcagggtccctgtaaggcatttccatgtcctaggcacttaatccagtgcttggcaaatagaagctgcttaatgttgagtgagtgagtggattgtgagctagaatggttgggaaaaggcatcaaagaaggtgagggatttgaaagatgaggtttaacttaaagtgtgccttgtgaccattgcaaattatggctgaaattattaagaagaaacaaaaattatgtaagtagttggtataaaatatgctgaaataacagaaagtagaagaaaaagtgattgaaattcacagtatgaataagtattttaaaaaaaaaaattttttttttttttttttgaggcagagtctcgctctgttgcccaggctggagcgcagtggcgcgatctcagctcactgcaagctccgcctcctgggttcacaccattctcctgcctcagcctcccgagtagctgggactacaggtgtccgccaccacgcctggctaattttttgtatttttagtagagacggggtttcaccgtgttagccaggatgggtctcgatatcctgatctcgtgatctgcctgcctcggcctcccaaagtgctgggattacaggcgtgagccaccgcacccggccatttaaatttaagccatttggcaaatacacattatgatcttaaagaagatgacagtgttgaaatgcttatggctttctacttaagtgctaattctagaagtattattatataatctgcgtaactgctagtttacattttaaatacattataatttaatcctaaaattcagaaaattgaatttaaatcaagcccaaacctttgggcttcttggatctgtaccgccttctctcttaattttaagaactgcaagatccctggactcccaaggatcagttttcatctgttctcatgtggacactgttcttccctgtctttgtgattttgtagaactctcttacgtctcagaatttttcagtgaggtgctgtcatcagatggcatgtagtgtacattgtaaaaaagtgtaagtttattggacttggttttgattttttttaatccttctttttctccccttgaatatttacagtggagctgggcaagaagtaggaagatcatgtattattctcgagttcaaaggaagaaaaataatggtaattactatttttgtactcagtttaatagtatggctctgtctgtattgggtgttagtcttttctcatagactagttatctttttagctcccagaaaaatgttatagtacatgtaatctatgctgtatagtgttaatgagaaaaactaatacacacttctacttagtaatttagttgattaagaagatatattctatgactgtaaaattgtcagctagatctgttgaactgttacctcttcaaagtccctcttccactcctgaagggttgagccagcctaactgccccacccccagtggaagatcccaagggcccaagcactctgaacacactgagagctctagccgcctccagcatgtggggatcaagccttggcctagaagcttggatccccaggtcccactggggctgccggccttggccaagtcactttgcttctctaagcctgaaaggtagaggggttagaggagatagtttctaaggtactcattagaaagtcagttctgtgtctcagattcctttgattcctctttcttctcaactcctcccaatctgaaaagaacatgtataggtcagacatagtcatccttttagtcatctgttttgttaatttggtagtaacgccataaaaataagtaactttaatgactgagtcttaagaatttgttccctaatgccttaaaatatttaaattaccctgatcaggtaagtttcccatttctaattattatcttctcacgagagtcgatctggtagtagtaaatctataaacttttaaaattttaatctgatatcaaagtttttgaaaaagatttaattcgttgttagaatgacgaccaaaagtagctggaaagaagctgttttgtactttgcatcctgtgacccctaaatgtgagctatattttaaatttgttgggaagttagaattgttaatggcatatttgccacatttaataagaatcatgttccaagtgctagtgcctggagtccatcttgagtatatgggtgatggaactagaattattgcctatttgccgaatgaattttaataaaatgtgcaggagattgtgatctcttttcctgtttctttcagctcgactgtgggatccaccctggcctagaaggaatggatgctcttccttatattgatttaattgacccagctgagattgatctcctattaattagtcagtaagtttttccctttattaatgacactttttcacggacttttactatcaagatcattctttactagattttgagagtttggttttttaaaagagtgttttctgctaggaagcatattgcagacatctgagtctaaaccaacactccgtaatgtcatcacaggctagagaagtttgctatgaaaaacttacctacctctatgtataagttcagtgagtatgtgagaaggagatagtacagaacttgaatcattgtaaaacttgagactaagaaagcccttttccaggatatctccttgaggtcactgttttatcacattcttctataagaacgccatttcacctttattgaaactatttttaaatagagttcatatagaaaaatgtgacaagacagtgacctcagggagatatccatgtttcaactttattctgttaaaatgtttgctgtaattctggctgccaggagtaggcttgggatattcttcttcctccctaattcactaataaagttttttgctgtttaaaaacaatactttaaacatctttcctccattttagaactgtatgcattacttcttccttctacacatacctactcttggtttttctgaaagtatcagcacatagttgtttatataaaacttgttttgtacagtaagcaacagtttcattacatggtatctgatggataataattttaagaattaatgcagcctctttctttttaagtttccatttggatcactgtggagctctgccctggtttctacagaagacaagtttcaaaggaagaacatttatgactcatgccacaaaagctatttatagatggcttctttctgattatgtcaaagttaggtaaattactttattagattatacacgactttggctctatatggcatgtatggttcaagatatggaccattttgtgttttaaaatgaggtgctcccttttcatgtataaggatatcagtaatttcatcattcattaacaaggtcattgaaacctattgtgtttctagcaccttcctgaccttgaaggtttttttgagacaggatcttgctctgtcatccaggctggagtgcagtggtgtgatcacagctcactgcagcctcagccacctgggctcaagcagtccttccacctcagcctcctgagcagctgagactacaggtgtgtgccaccacacccagcagagttttttgttttttgaagagatagggtcttatgttgcccaggctagtctcaaactcctgggctccagtgatcctcctgccttggcctcccagagtgctgggattacaggcatgagccactggcctggccttgaagtctttatatagctttttgtgtccttttaaaacttcattaggctggattggaagagttatgcttaattgtggtaacactcgttaacacttcaataatgcttaccacatactaggcccaatcctaaattcctaatgtatattaacttcacacaaagataaataaatatacatattttttttttctttttttttttcttttttttttgagacggagtcttgtgctgttgaccaggctggagtgcagtggcgctatcttagctcactgcaacctctgctcccgggttcaggcaattctcatgtctcagcctccccagtagctaggattacaggcacacagtgcataccaccacgcctggctaatttttgtatttttagtagagacggggttttaccatgttggccagcctggtcttgaactcctgacctcaggtgatctgtctgtcttggcctcccagagtgctgggattacagggttgagccaccgcacccagccgggagataaatatatttaatcttcacaccaactcatgatgtaggttctattataaattccattttatagatgatgaaactgaggcacagcgaggttaggttatttgcctaaaatcgtcacagtaagagacagagcaaggatttgaacccaaacaatctggctccagagtcagcgtccttaaccactgttctctcttgcttttttgtaagtacattaacataattttcaggagaaaggttgtgctagactttgtagaaaaatcttttctcatcctaatgtgagaaatatctgccatggttcaatgtatgtgagtgtgttatatctttcaggagtgttggggtgggaaaaaagtttgagaagtactatcctaaagagtattttgtcttaatttattgtatgtattattgaaaattgagagtactttgagctcagtgtcttaatttcctgtgtggtttgtttaaaatcaagttttgtagctatacacacaatagagtaaaaaaaaaatacacaaaatatctgagaaattttaaatacatgattcatacagtatattttaaagaaatatcttcatggagatgttatccacaatttctttgtgttcaaaggctttttaaaaaatctgactcttaattgtttttgctggcatctttcaaaatttagtaacatatcagcagacgacatgctgtataccgagacagatttggaagaaagcatggacaaaattgaaactatcaactttcatgaagttaaggaagttgcgggaatcaagttttggtgttaccatgcaggtcacgtcctaggagccgccatgttcatgattgagatcgcaggcgtgaaggtaccctctggctgtggcgcttttctccccagagaaatcagtacagagctttgtgccaccaagtactattaaaaaaaaaaattccctaagacttgcaaagtgtcagaacacggaaacataagataaaaatacagttaacgcttgttccttttaaatattgcagttcctacctccattacaatactttctttatcaagactgaggaaaaaaaaatttttaaagactgagaaaagagtaaaataaacatctcaaaaagtgattccctgacaccataggattccgtttgctttagaaaactggttagggaagaggtgtctttgtggctgcattcgtttaaaattaaaacacaatttgatattcatgtccccctgatgtcttagaattcacaggtaagcccctaagcagggtggactgcaagagtgaaaggggttaattaggaaagatctttggggaagccttgaacttctgacaacgtgggtgggccgctggctttccagactccagagcagccgctctgaactcaggctgcaaataagactcacttagggagctgctgaaaataactgttgaatcaaaatctggaggcgcagcttggccttttccttttcgagtttgctaggtgattctaacgtcagccagagaaccaatgctctagtgtcacgtcctaaatttttcacagctgcttatacatttggaacttttagacattgaattgtaaagtatatcactaaatcacttattcttgcagtttgctccagggcacaaaaaataagtagcacaaatgcagatgtgaattctcttggaatttgatgcagaccctcttatgattttatctccggttttagaccatgtacctcagtgcactcctttccttgtctgcatgccctttttctctaagaagttcagagcacttctcaagtggattaatgttatataggttatcattgtgagatgatactgggaatagattattcccatttactagaggaaataattgaagcactgaaccgtttactgactgaactacacattttgaattggacacaagcactgcatgtaaatttcatcagttttagacttaaaaactgtaactgcacttttggatttcatgagtttaatctattcactagcaaaatgaagccttccccaaatcctaactttctagttttatctttttcacagcttttgtacactggtgatttctcaagacaagaagataggcacttaatggcagctgaaattcctaatattaagcctgatattcttatcattgtaagtattaatatactatattgtaatcaatgtaatgtaagcagattttttttcttttggaaaataatactgtgatctcactttcataatatgttattggatataaacttaccttttttaaaatataagaaaactggtggccgggcacggtggctcacacctgtaatcctagcgctttgggaggctgaggtgggcagatcacttaaggccaggagttagagaccaccttggccaacacagtgaaaacccatctctactaaaaaaatacaaaaattagctgggtgtggtggtgcagttacctgggaggctgaggcacaagaatcacttgaacccagaaggtggaggttgcagtgagccaagatcacgctgctgcactcgagcctgggctacaaagcaagactcagtctcaaaaaaaaaaaaaattggggcaggtgcttctttttgtagtgcagtttcactttcttgctgttaaatgcattaactctagtctaatatcagagatgccaggctgcctctgggcaggatcagcaggctgtctctgggcaggatcatttttactggctatgccctctctctgtcttctaaatatatatttctagatgagaatatgtagaagaacatcttacgggtcattttaaaatggtgtgacctcactgcctttgccatggtgactatcctcaggcccttagtccatgctaacttatcgttttgtttatctttgtgtgtcatgtctgcctactaggttgcaagtcccaggggagcaaaaaaaatgaactgtgtacagaagctctttgggggcagcttgggatgtgtgttgctgactgtagagtcaggggttgggagagaaatcttgcaagcttttggtgtatataagaacatcaggtgtatgtggttcaaggaggaagagttgtctgtttctcctccaccacctaccatgttccccagctgcccaggcatgtgggccagtacatactgctgtccataagcaacatgtgagcagattagattggactctgctcatggtatgcccagcatataaacttaatttaagggaagatttattttttgaaccctcagaaaaagtagctattttcatagtaccatactttagagcagtgcttcaaattttaatatgcttataatcatctgatgatattgctaagatacaaattctgattcagtacatctgggctggggtctgagattttgcgcttctgataagctcccaagggatgtcaatcttctggtcagtggaccatacctagtaagactttaaggatattcttaaacagaagtataagaaacaacatctgtttctattttaaaagctttgacttatcagaggtgggagaaataacctttttcttcctaatggaaagcaaaatggttaaaaaaggacatgggaagaagatacagttttggactatttcattttataaaaagttcttagatttgaattctagcattctttttttttttttttgagatggagtctcactctggagtgagcgactgcaatggcatgatctcggctcactgcaaccactgcctcccaggttcaagtgattctcctgcctcagcctcctgactagctgggattataaggcatgcgccaccatgcccagctaatttttgtatttttagtagagacggggtttcatcctgttggtcagactggactcctgacctcaggtgatccacccgcctcggccttccaaaatgctgggattacaggcatgagccaccatgcccggcctctttttgttgttgttgttaaattttatttttttgagatggagtcttgctctgtcgcccaggctggagtgcaatggtgcgatctcggctcactgcaacctcctcctcctgggttcaaacagctctcctgcctcagcctccggagtagctgggattacaggcgcccaccaccacgcccagcttatttttgtatttttagtagagacagggtttcaccatgttggccaggctggtctcaaactgctgacctcaggtgatccacccaccttggcttcccaaagtgctgggattacaggtgtgagccaccacgctgggcctgaattctagcattcttgcttgctcttcccaattactattatgacaacacatgttcgagtaaatgacatgctaatggagaagtgaattgcttagcccctcagtatttcattgatgtttaacttttgaattcttggaggatcattggtcttagtctcacacttctaatgtattatttaggaatctacttatgggacccatatccatgagaaacgtgaagagcgagaagcaagattctgtaacactgtccacgatattgtaaacagaggaggcaggggtctcattcctgtctttgctcttggaagggctcaggagctgctcttgattctaggtatgccatttcctttgtatttaggcgatgatcaaaatcttgtcattttatcaagataataatgtggtcttggatgagtcattccaccgttctggacttcagttttcttcatttaaaaatagagatttggggccgggcgcggtggctcacgcctgtaatcccagcactttgggaggctgaggtggggagatcacgagatcaggagttcaagaccagcctgaccaagatggtgaaaccccatctctactaaaaatacaaaaattagccgggcacagtgacagatgcctgtaatcccagctactcaggaggctgaggcagagaattgcttgaacctgggaggtggaggttgtagtgagccgagattgcgccactgcactccagcctgggcgacagagcgagactccatctcaaaaaataataataataataataatagggatttggatctaggaatagcccaggaaaacagcaactctcatgcactgctgttgggaatgtgaactggcgaccccttccggttgccatcagaagtcttaaaatatgtgtaccctttggccagcagttccgcttctgggaaataaatgagatgtacagaaaattttgtcaggaaaggtattcatcattttagtattttcaaagaaatatgtgagtaaatatagcattgtaggaaaaaattgtgttacagatgagtaattacatactttgcacataatatattaagtcaaccaaaaaagtagagttcaaaactatatttactctgggctggacgtggtggctcacgcctgtaatcctagcacttagggaggctgaggtgggcagatcacttgaggccaggagttcaagaccagcctggccatcatggtgaaacctcgtctctaccaaaaatagaaaaatgagccaggtgtggtggcacacacctgtagttccagcttttctggaggctggggcatgagaattgcttgagcctgggaggcagaggttgcagtgagccgagattgcaccactgcactccagcctcggtgacagagggagactgtctcaaaacaaacaaacaaacaacaacaaaaaaaaaactatatgtactctgatcctagttaggtaaaaaatgcacacacaaatgactgaaaagctactaaatctggatagtgaggatatggatgatattttttgttttctgcttttctccattttacaagtacttcagtgagcatgtataattttttgtaataagagaaacaatggttgttactttttagcatacatttgtacttcatgatcccttctacctcacattcggtgattctagttgggaagagcactcttattgaagaataaaagaaggtactttacagccaggcatagtggctcacgactgtaatccctaattccagcaccttgagaggctaagggcggaagatcacttgagcccaggaatttaagatcagcctgggcaacaaggcaagaccctgtctctacaaaaaatacaaagaattagctggacgtggtgatacacgcctgttgtcccagctacctgggagactgaggtaggagtatcacttgagcctgggaggtagaggttgcagtgagccaagattgtgccactgcactccagggtgggcgacacaatgagaccctgtctcaaaaaaaagcaaataataaaatgggtgctttgcatgagtgtcacctctgtgcgaagcactagaaacacttgcatcttagctcatcctctctgttctgccatcttggtgaggaggagaaaaaatagtatccctgtcacactgaaaaggaaaacagaaggaaagttggaagaaatgaccccagatgaaaaggaaatctgtaatagataggacttctagaagctgaatttcccaaatccgaatctaattcagtcttttgatcttgattggtcctccttcctaactgcaagtcaaattcgtccttagaagtcttgaaatcaaagtcttcgtaacctgtaagatgaagaacagagaagttaggaagttgaaacaatgttgccaccatcaaattgggttgccagatttagcaaataaaactagaggacaactcattaaattttaggttcagataaataatgaataatgttttagtataagtgtaccaaatatttaatatatattctttttttttttttttttttgagacagtctcaccctgtcacccaggctggagtgtggtggcgctatctcggcttggcgcgatctcggctcaccacaacgtctgcctcccgggttcaagctattctcctgcctcagcctcctgagtagctgggatcctagctaatttttgtatttttagtagagacgaggtttcaccacattggccaggctggtctcgttagtatatattcttatactaaaaatcttttgttgttcacctaaaattcaaatttaactgagtatttgatatttttatctggcaattctaccgtctgttctttgcaactggttgccctttttccttcaattctcccttgtaatgtagtataatagaaagaacagctgctttcaaatcttatctgtgtttcagatgaaatctatcatatggctagagccatatgaccttgggcaaattatttaactttttttaatattcagagtttattcataaaaacacgcacaacaaaccaagaaatggtggcatgattgtgggatgtagtccgctttagggtatctaagaaatcataagagtaataaatcatgaatgggataaactagaagacaaagcaggaaatttgtaatgcatgtgacagaaagtctttgtcctcatataaaattatcattgatacatcaaatggaagaataacattcacacaataatcagcctttttttttacccttagtttgctagttaaaatggtgataagtcttcgtaagttgttttgaaaattagaaattatagatgtaaattggtgaaaccccgtctgtactaaaaatacaaaaaattagccaggcatggtggccagcgcctgtagtcccagctactctggaggttgaggcaggagaatggcatgaacccgggaggcggaacttgcagtgagcggagatcgcgccactgcactgcagcctgggcgacagagtgagactccatctcaaaaaaaaaaaaaaaagaaattacagatgtaaattatataataggcatataatacattttcaaactgcagaggcacctattagaataaagggtgtctttcagccatactaccctgataaaattttgggatttaatgagggcttttcccttaacataagtcttttgacggtatattacccactgctttctttaattatcagaaactggttagtaggtttttaaaaatacaagcatggctgagtgtggtgactcatgcctgtaatcccagcactttgggaagctgggcaggaggatcacttaagtccagagtttgagaccagcctgggaaacataatgagacccagtctcaaaaaaaaaaaattagccaagtatggtagcacactcctgtagtcacagctcagaaggctgaggtggaaggatcacttgaacctgagaggttgaggctgccatgagccatgatcataccactaccctcaaggctagtcgacagcctgggtgtaaaacacaaacaaaaacaaacaataatagcataatatgactatactttttttttaagtgttcaaaatcggttaactcttggcaattctcttttgtaattagcactcaataaatctgtttgaaatattaataatacatttttaaaaccatcacagaattttttctagtacacttttctaatacatttaaataaaaatgtattatttagtgtcttattatggtagtaagttatagacttcagtgtaaacttatactgagtcatgtttaaaagcctccacatctttggactatgatcatagcattctttttaggtcatgcactatttagaaataagttttggttttgtaaatttaagttagttacaaccaggataattttgcttaaactctttaaaatatagttgtgtgctttatttcttggttgtatgtgtatcatttcttgttctgtgtgtatcatttgttatttgaactgtttaccccatctaacaaagtgatgtttgtttcttgcaaaatctctctagatgagtactggcagaatcacccagaactacatgacattccaatatactatgcatcatctttggccaagaagtgtatggcagtgtaccagacatatgtaaatgccatgaatgacaaaatccgcaaacagatcaacatcaataatccctttgttttcaaacacattagtaacctcaaggtgagtgcttgtggaagaaagacaaggatggataaaaccaaatcagtcattagtagtaggaggtacgaggccgtgagtgatggctcacagctgtaatttagcactttgggagtctaaggcaggaggatcactagaactcaggagtttgagaccggcctgggcaagatagtgagaccctgtctctatcaaaataaaataaaaatcgtaggcagtgcttgtcagtgactctggctgaattcctcttgctggagtcttaccgcttctcaacaggtgtcgtttttctgcagaaaatcaaaacttcagcagctgacattctttttctgcttcaacagattttgccacttgccccaagtagccatgtgttctcagtatttataatactcatctcttttgccgtaggcataaaaagttctgaggagaaaaatattttgtattatgtatttaagtttctcttctcactcaaaccaaatcatctttttgattagtgctgcaaattctatatatgaaaatttttatatacttttctggaagcattcaataaaatctgattttatttaatttaaaaaatactgtttaactcgatgcttgaatcataataaaataattgatatccgaaataatttaaaagtggacttccagttgtaaataggctttgttcataaagtatttattttaagttaactgcttaaggattgtagacaagttctccctagaacaatgttaaaccttttgatttccaggccagctcaaaacatgcatggagcatgcaaagctattgtgagtctttgggaatattttttcagagttgtgtcttgggtagatcaagacccatttgactcttccttttacttttctgcctgcctgctaggcgctgaagatggtcctgatggttctgatggccctctagctaccaacagaaggttttgaagatcggggtgaacttaccgctttttattacttggtttttctaccattcctagcctaaactgtttaggaatttggcaactgaacttaaaatgtttacagatcttgtgaaggctctttcagtgatgtgattaatctcttagccttttgttattctttaaaaagaaagaatgctttgtcagctgctggtagctaacatacttttcccattctgttttctctcttagagcatggatcattttgatgacattggtcccagtgttgtaatggcctccccaggcatgatgcaaagtggcttatccagagaattatttgaaagctggtgtactgataagaggaatggtgtcattatagcgggatactgtgtagaagggacacttgccaaggtcagttacagtcataggctgttgtgttattcctattcagaatcacggaggtggcacggtcctcacaggtttttgcactgaagtagttcttcaaataatacaagttttgatttttaaaaatgaggacgggaataggtagctagagatgtgcgtaggatgtagaattatgcagacactgaatggcataatgaggtcccaggtgattgatatacacattaaagtttgagaaatgctcatctggttgcaagtagagaagaatggacaggaacctgtttgagacaaacacgtgaatactctccgtcctctcatgaagaagaggttgactaatacatatgatcttaaaaagctgtagaatgtgtttgggttgaccactttctactattatgaaacattgattttcagctcttagggatgtagaaattgtagaaaatatatgcagaacttgggaggcagtttctgagcatccaggcatcacattctcatcctctattttatttttaaaaatatgatatgattctttgataatctttattactttaccttattctataaagttctttagtgacaatgttgtatttaaaatagatttccaggctgggtgcagtggctcacacctgtaatcccagtactttgggaggccaaggcgggcggatcacctgaggtcaggagttcgagaccagcctggccaacatggcgaaaccccgtctctactaaaaatacaaaaaattagctgggcgtggtggcgtatgcctgtaatcccagctactcgggaggctgaggcagggagaattgcttgaaactggaggcggaggttgcagtcagccgagattggcgccactgcactccaatctgggtgacggagcaagactccatctccaaaaaaaaaagaaaaaaaaaatttccaggcctggcacagtgcctcacatctgtaatcctagcacttcaggaggccacagcaggtggatcacttgagctcaggagttggggaccagcttgggcaacatggagaaatcccatctctacaaaaaatacaaaaattagccaggtgtggtggcacgtgcctgtagtcctagctagttgggggactgaggcaggaggcttgcttgaacccaggaggtcgaggctgcagtgagctgagatcgcacactgcatttcagcctgggtgacaaagtgagaccctatttgaaaaaacaaagattttcagaatagaaatatatccacatatctaggaaatgactttggagagcacaagaatagttgggaatacaggtttgtctttctaagcataagagttatgattctcactgccagcactccagatagatgagttttagttaatttgtttacttttctcattaaatgtttgcttgattgagaacatgagtatttgatatttactgagtcagttatattagaatgattttgtgcgtaaggtcctaaatttaacatgaatttatgactgcatgaaaaaaatgaaaatgtacctttacgattataactgggtagtttgttttgttatttttctttattttccacagcacatcatgtctgaacctgaagaaatcactactatgtctggacagaagttaccactgaaaatgtctgttgattacatttctttctcagctcacacggattaccagcaaaccagtgaatttattcgtgctttgaaaccgcctcatgtggttagtctatgaatttcatttattgtattaaagggaaaaaaagtgcatacccaggaaactgtgcagcaggcagttcacaaagcaggcatcatcacctactaatgcgacaccccctgagcagagcctttcacatgcactcggatttggcctttacaactcccctttgatttcagcaagctgccccctttctccagaactgactgactcagacctaccaaccccaatcctaatgtttttctgttattttctgctgcctctccaataatttaagagccaggcttggagtatgactgctcatttggaatgccagctccatctcttacttactatgtaacccttggcaagttacttaacctctctgtacctcatttgtaaataggaataatagctcataaggttattgtaaggatgaagtgaaagaacatatctaaagcacttaatatggtgcctggcacatagtaaatgcttaatatatatattatatatatatatatatattttttttttttttgaggcggagtcttgctctgtcacccaggctgactgcaactccgcctcccgggttcaagcagctctctgcttcagcctcctgagtaactgggattacaggtgcccaccaccacacccggctaatttttgtatttttagtagagatggggtttcaccgtcttggccgggctggtcttgaactcctgacttcatgatacacccgcctcggcctcccaaagtgctgggattacaggcgcgagccactgcacccggccgacttacttatatttttaagtatcgtgtaacttattaaaaataagttagatattttgatggaattggaaaggaggggtaagctgaaaaaagtgtgtatttttaattagaagaacactaatgaagcatgtgtccatagaaaatagatgacgtgccctttccaaatgtattggaaagcaggagaaatggccttttgttagttttgtttgtttgcttgttgtttggggtgttttttggtttgtttgtttgtttgtttgtttggatgaagtcttgctctgttgcctaggctggagtgcagtggcgccaatctcagctcactgcagcttctgcctcctgggttaaagcaattctcctgcctcagccttccgggtagctgggattacaggcacgtgccaccacgcccagctaatttttgtatttgtagtagagacaggttttcaccatgttggccaggctgttctcaaactcctgacctcaggtgatctgcccgcctcggcctcccaaagtgctaggattacaggcatgagccactgcacctggccttgcttgttgttttttaaatacgttttactgtggtaaaatatctaacataaaatttgcagttttaaccatttttaagtgtacaaaccagtggcattaattatattcacagtgttgtacaaccatcaccactgtctattttcacagcttttcatcactccaagcagaaactctgtaccgttacacagtaactccccattcccttccgccaaccctggtaatctcaaatctactttctgtttctatgaatttgactattctaggtatttcatataagaggaatcataatgcctatgatgttttcaaggttcatcatgttgtggcatgtatcagcacttcatgccgaagtcatggtccgttatatgtagaccacatgttgtttatccattcacctgtgggtggacactcgggttgtgtcactttacagcaaatgtgaagtggtatctcgttgtggtttttattttcatttctctaatgactaatgatgttgagcaccttttcatgcagtcttttgttcgtttttgagttttttctagcatgataggcctcacaggtatttgccactggcccttaatgagcagattatttggtcaagaaaaatcactctcctgtctatagcatcacagtgtgtagggtttagtcacagagtaggctcctcccaggtgtttcttattgtctgtgtgcatgaacactcccccagatttccaagccagggaggaaaagccgaattgctcttttgtgtggtgtcaccacctcatcctcagccccatttcatcctgtcactctcctggttctacttctgctgacagtttaagttcctgggttgaacttcatgctcattttcttgtgataaccagctccagcaaaagtatagctgcaggataaaattgcaatactagtagtgttggtggtagtaatgaatactagctaacattgattatttaccatgtgccggacactgtatatgtgttttatatgaactgacttgcttaatcttcatgaccgacagctgttctgcagatgagacaactgaggtgtgaaatcacttggtcaaggttacacagcttaaataagcagcagcaccaggattctgttcaggcagccaggcccaggcccttccccagcaagcagtaagcccctgccacgtgctggtgctggctatgcccagccacaagccatctaccacatgtgagaggctaagaacaatctatcttggccgggctgcagtcccagcactttgggaggccgatgtgggtggatcacttgaggccaggagttcgagaccagcctggccaacatagtgaaaccccatctctactaaaagtataaaaattaggcagggcacggtggctcatgcctgtaatcccagcattttgggaggccaaggcgagcagatcacgaggtcaggagatggagaccatcctggctaacacggtgaaaccccgtctctactaaaaatacaaaaaaattagacgggtgtggtggcaggtgcctgtagtcccagctactcgggaggccgaggcaggagaatggcgtgaacctgggaggcggagcttgcagtgagccgagatcacgccactagactctagcctgggcgacggagcgagactcggtctcaaaaaaaaaaaaaaaaaaaagtataaaaattaggtaggcatggtggttcacacctgtatcccagctacttggaggctgaggcatgagaatcccttgaaccctcgaggcagaggctgcagtgagccaagatcacgacactgcactccagcctgggtggcagagtaagactgtctcaaaaaaaaaagaacaatctgtcttgtaagatagaagttacaaaagtgaatggaaagggactggtagctaatgctgttgttgtaaataccctctaaaatattccatttggggctgagcacagtggctcatgcctgtaatcgtaccactctgcaaggctgaggtggaaagactgcccagaagtttgagaccagcctagacaacatagtgagaccttgtctctacaagaataaaataaaactagccaagcatggtggctcatgcctgtagtcccagctacctgggtggctaaggtgggaggattgtataagcctgggagattgaggccacggtgagccaagattatgccactgcactccaacctgggcaacagagcaagactctctttaaataaagaaatatataaagtaataaaatgttccatttggttctgaaatattttattaggataggtacagtggctcacgcctataatcctagcattttgggaggccaagatgggcagatcacttgagcccaggagttcaagaccaccttgggcaatatgtgagaccgtgtctctacaaaaaatacaaatattagccgggcatggtggcgtgtgcctgtagtcccagctacgtgggaggctgaggcaggaggattgcttgatccctggaggttgaggctgcagtgagccatgatcacatcactggactccagcctgcgcaacagagtgagaccctgtctccaaaaatatatcaatatatgaggtaggccaggcacagtggctcaagcctgtaatcccagcactttgggaggccaaggtgggtgtcaagagttcgagaccagcctgaccaacatggtaaaaccccgtctctactaaaaatacaaaaaattagccaggcatagtggcgtgtacctatagtgccagctactcgggaggctcaggcaggagaatcgcttgaactcaggaggtagaggctgcagtgagctgagatcacaccactgctaccctccagcctgggcgacagagcaagactccatctcacaaaaagagaaaaaagagaaccatgggtgttttctaagacagtagggtagcaatagttttgtacaagagtcataggcatttaaaactagaagagactacagaagtcagccctttacaactgtgaacatagaagcagtgaaacatggaaaaggcgtgtatctcattagtggcaaagactggagtagaaaagaagtttctttactctttgttcaaatagtaccacataaggatcaaacagaatgaatatgtgtatacaagttgaatcggctggaggtccttaaaagtagtaaagtttcataacttccaagtatgtctctatttcatatattaaatatatttcatatatttaattcaacttaaggaccatgattaagctgaatgatgtttccatatattcttttaacatttattctatgtagattttagtccatggagaacagaatgaaatggccagattgaaagcagcactgattcgagaatatgaagataacgatgaagttcacatagaggttcataatcctcggaatacagaagcagtgaccttaaacttcagaggagaaaaactagccaaggtaaaaggttatggttcctgtctgtccaatccatgttttttcttcaggaaagactgtacttcttaagaaaatagatctttagtcaaaagaatatgcttatttctgtctacttgttacactacaggaattttatccttatcctttttggcttcttttggttctgtgcattcatttcttcaggtggaaaatgttcagctagattagattttttgtgtgtgtgtgtgtgagacggagtctcgctctgtcaccaggctggagtgcaatggtgcgatctcggctcactgcaacctccgcctcctgggttccagcgattctcctgcctcagcctcctgagtagctgggattacaggtgcgcgccaccacgcccagctaatgtttgcatctttagtagagatggggtttcaccacgttggccaggatggtcttgatctcttgaccacgtgatccacccacctccgcctcccaaagtgctgggattacaggcgtgagccaccgtgcccggcctagattagatcttaatgcagctgaatctcatagctctttaatccatatccccacttgcttttcctacccacatctgagggtaaagaactgtttgttactgtttgttactgtagccagtatagccttgtgtccacctcttgtcattctccctgagaatctgaagataggctcatatctctaaacatatatgtttgtgtagatatgatggaatatatgaaacattttctctttaaaaattaatcggccggacacggtggttcctgcctataatcccagcactttgggaggccaaggtgtgtggatcacttgaggtcaggagttggagaccaacctggccaacatggtaaaaccccggctctaccaaaaataaaaataaaataaaaaaattagctgggtgtggtcgcaggtgcctgtaatcccagctacttgggaggttgaggcgggagaatcccttgaacccaggaggtggaggttgtagtgagctgagatcgaacctgagagatggaggttgcggtgagctgcgatcgcgccaatgcactccagcctgagtgacagagtgagactgtgtctcaaaacaaacaaacaaacaaaaaagaagtaatcaaggctgggcacggtggctcactcctgtaatcccaggactttgggaggccaagtcaggcgaatcgctttagctcaggagttcaagaccaggctcggcaacgtggtgaaacccagtctctacgaaaaatacaaaaattagctgggtgcagtggcatgctcctgtagtcccaactacctgggaggctgaggtgggaggatggcttgagctccagaggttgaggctacagtgagccattgtcctgtcacggcactccagcctgggtgacagagcaagaccttgtctcaaaaaaataaaaaaagaattaatcatttttgagagtgaaatgtaacattttcagaatttaaagttgaaatagttaaggaaagcctgagctggctttttagagggatgctgtcagaagtctgcatctttacttctgttgatcacaactcgtttagaaatacttctaagagaaactttttaaaaattacatatataattttaaatttttaaaaaggaattgaaatcattatgttgaagagatatgtgcaactcccatgttctgtttttttgttttgagatggggtcacactctgttgccgaggctggagtgcagtggtgcattcatgacttactgcagcctcgacctccctaggctcagctgatcctcccctctcagcctcccaagtagctaggactacaggcacaaatttttttttttttttttttttttagaaggagtcttgctctgtcgcccaggctggagtgcaatggtgccatctcggctcactgcaacctccgcctcccaggttcatggaattctcctacctcagcctcctgattagctgggatcacaggtgcccaccaccacgcccggctaattttttttgtatttttagtagagacagtgtttcaccacattggccaggctggtctcgaactcctgacctcaaatgatccacgtgccttggcctcccaaagtgctgggattacaggcgtgacccaccgtgcccagtctgaggctcaaacttttaatgatttagttgaaggtttaagtatcaacatatgggccaggtgctgtggctcacgcccataatcccaggactttgggaggctgaggcggacaaatcatctgagatcaggagttcgagaccagcctggccaacatggagaaaccctgtctctactaaagatacgaaaattagccagtcgtggttgtgcgcaactgcagtcccagccactcgggaggctgaggcaggagaatcgcttgaacctgggaggcggaggttgcagtgagccgagatcatgccactgcactccagcctgagcaacagagcaagactccgtcttaaaaaagcaactttacgacacacttttaatacataatgagccaaacctgcagacgctaatgaatatcctttcttgaaggtgaattggaggaaaaaaagaaattagcaaaacttagggtatgaggtttttgttgtaaatagtcgtagttactcctgagtcttactgtccacaaaacttttcaggggccgatttaatagtatttttcttatacctgtagaaaaatatactcagttgagaatctagaactgtatttcacatactctgctggtggtggatatgtggggagaaaaaaaaagttttgcagtcagacagtttagaagatgaattgaactgagttcaggaaaagttgggtttcttatcggagtgttctgtttctcacccataattttaatgatttaaaatcattacctttagttatttttctctctcaagtacatcactgtattaaaattagtctcctaggagcaaaggttcttttctgaaagctacctacaattaaggagaaaataaccctaggaaatactgtgaaatacaaccctctgtgtttataattatgagaacaaatatagcactgcctggttgctgtttgcccttacttgcttaaaggcaaacaagtatggaacacactacctttattcctttgagctcatttatttgcagttgagagaagttatatttaagaatactgggtttcagccaggcttggtggctctcgcctgtaatcccagcaccttgggaggccatagcaggcagatcccttaagctcaggaattgaagatcagcatgggcaacatagtgaaactccatctctacaaaaaatacaaaaataagccaggcatggtggcgcacatggtgagcgatgatcgcaccactgcattccagcctgggtgacagagcaagactgtctcagaaaaataaataaatgaaactttttttttttttttttttgagaaaaagtctcgctctgtctccaggctggagtgcagtggcgcgatctcagctcactgcaagctccgcctcccaggttcacgccattctcctgcctcagcctcccgagtagctgggactacaggcgcccgccaccacggccagctagttttttgtatttttagtagagacggggtttcattatattggccaggatggtctcaatctcgtgacctcatgatccgcctgccttggcctcccaaaatgctgggattatgggcgtgagccaccatgcccggccataaatgaaactttttaaaaatgaatagtggggctgggtgtcatggctcacgcatgtaattccaacactttgggaggccgaggtgggcagatcatctgaggtcaggagttcaagaccagcctggccaatgtggtgaagccccatttctactaaaaatagaaaaattagccgggcatggtggtaggtgcctgtaatcccagctacttgggaggctgaggtgggagaatcgcttgaacccgggaggcagaggttgcagtgagctgagattgtgccattgcactccagcctggcgacagtgagacactgtctcaaaaaaaaaaaaaaaaaagaatagtgggtttcacgtttgtagtatttttgtttttaaatggttgttattttattctcttaaaaatgtttctccctcaatgtatgagctcacccataacctgtttttattgacctttttattcaaagccgctgctgctgcttttagtgttaggtgtaccacagcctcccaggtttgtatcagtgggcctcactctctgttatgagtttgcagccagcctgagggagtgcatgtgtgcgtttcacggggacttcccggccttccctactgcagtgcagctagtgagagctttcttaagccccggcacctagtaagttacttgcttgttgaactgattagaactgaactgtgccagatctgccactgtgactcttccctttgacattggtagcaatgcaactgccctcatcatagagatatcaaacattttatgtttttcgtggttaaatccatatgttgttttcatagttcaaaggtgttatggtcttcattatgatgaactgcattttattacctgaaaaactgcattttaccaggttctattttcttcaagtattttttttttacaggttatgggatttttagcagacaaaaaaccagaacaaggccagcgggtctcaggaatacttgttaaaagaaactttaattatcacatactttctccttgcgacctgtccagtaagtatactattaaatgtcaaatccaacttcaccttagcactgaaagaaaatctatgaaaacttctcttcaccttgtggcctaatgttatgtaatagacaaataataaaaaaggaatgaggcaagttagctaattagctttgtggggagagaaaaacacctcccatgaactactgaaagattgaaattattggtgaaatcactttcttcatctttggaaacataagttcatttctgagttcaccttgttttctaccctctacaacagacttgtgggcttttattttctgaagtgactttggattccccagagaagccgtttggtttttatgacctttgcataagcatttcagttttttatgacctttacatcacttgcagggcctttgtattccttcaccattccaaaaggagtaggaacaaaaacttgtataatttctttaaaagcaaaaaagtattaatgtaaagcctaattttttcattacattgaaactttcaacatccaaataagtaacaccaactatataactgatgcctctaatgtgtgtgtatacattgaagctcattatagagaaaaatgaaaaattgggcagggtgcagtagctcacgcctgtaatcccagcactttgagaagccgaggcaggtggatcacgaggtcaagagatcgagaccatcctgaccaacatggtgaatccccgtctctactaaaaatacaaaaattagctgtatgtggtggcacgtgcctgtggtcccagctactcaggaggctgaggcaggagaattgcttgaaagtgggaggtggaggttgcagtgagctgagataatgccactgcattccagcctagtgacacagcaagactccatctcaaaaaaaaggaaaaattgcacaaaactaataagattacatttaagtttgtaaattgcttttttcccatagttgatacacatttccatatgcattctttgtctttataaatttactgagccatcaataagtcattttccaatgaatatggtattattttcgagtaaatactatgctcaaggtgatttacatggtactaatacattatatgtgctttatgcaggaataaaaaatagcagtggcccggcacggtggctcacgcctgtaatcccagcactttgggaggtcgaggtgggcagatcacaaggtcaggagttcgagaccatcctggccaacgtggtaaaaccccatctctactaaaaatacaaaaattagctgggtgtggtggcatgtgcctgtagtcccagctacttgggaggctgtggcaagagagttgcttgaatgcaggaggcagaggttacagtgagccgagatcacgccattgcactccaacccgggcaacagtgcgagactctgtctcaaaaaagaaagaaagaaatagcagcagtggtgaggtatttacctgtgagattgccctgctgtcagttttcatagcatcataggtcactgtctgacttgtgccttcattctgagttagtgagctcttatactctttttttttttttttttttttgagatggagtctcactctgtctcccaggctggagtgcagtggcgtgccgtctctgcttactgcaagctccacctcccgggttcatgccattctcctgcctcagcctcccaagtagctgggactacaggcgcctgccaccatgcccggctaattttttgtatttttagtagagacggggtttcaccgtgttagccaggatggtctcgatctcctgacctcgtgatccacctgcctaggcctcccaaagtgctgggattacaggcgtgagccactgcgccgggcccgagctcttactcttatgccacatagtcccagcccttgaaatctgtctaatgagggaagcagtcttgggaagagctaatcccagtattgctcagtggcatatagaagctcatgatacatatgtgaagagaaactgtgcacctcaggagctggaaaaagctttgtaaattaggtagcccttgtgccaggtggtgaaagattgttgggagttaccaaggaaagaaggcagatgacagctggcataccagctctgtggcatccaagaacctggtatgtttggggacatgaggtgctttttttttttttttttctgagatgaagtcttgctctgttgcccaggctagagtgcagtggcacgatctcggctcacttctgcctctgcctcctgggttcaagcaattctctgcctcagcctcccgagtagctaggactacaggcatgcgctaccacgcctagctaatttttgtatttgtagtagagacggtgtttcacaatcttggccaggctggtcttgaactcctgatctcgtgatccacctgcctcggcttcccaaagtgctgggattacaggcatgagccaccgcgcctggccataaggtgctttcttacagctggagcagaagttaactgaaggggagaggtagggacatagggagatcagtggggaaatgtaaggtggtaccaaattaaggagcatcttgttagctttctgaaaaacatgttcacatttacttgcttttatttcttttttctttgctcctggtatgtgttttgtaggactagtatttcttcaagtctcttctcattttctcttcagattatactgacctggccatgagcacggtgaagcagacccaagccattccatatactggtccctttaatttgctctgttaccagctgcagaaattgacaggtgtgtgtgtgtactgaaattcatttcattgttttctgtcttttagtaagataattttctatctagaaaagaatgttacttaattttgataattgtctcagaattgtgtaagttttataaatatgtgtgatcatgttattattgcctttatgtgaaattttagaatatacactcatattcttgcctgacggtcctgggaaaaaaataaaaacttaaaaaaaattaaaaaagaaaatatactcaaattttttttaattccataatacttatctttgacccaattaaaatttagtagtctttgttccttatgtttgaaatctattttccttgaccatacctaaaattttatctgtttcttttctttgatcagtgaaaataatttttctggttctattgataccagtctatacagcaggttttataagagttcatgaccactggccaaaggccagtgagaaaataaacctagtctgctttcattattagaccatttgagttcgagattttgtatattaacatcatgagg

SEQ ID NO: 237 - DNA, 32745 bp, Homo sapiens
  source 1..32745: mol_type = other DNA
tctcgcgtttccggccggaagcttctccagcctttcccggaagctgcgctcgctacccgggtaacgggtcccggctgtggaagctcccgcggcgccgcgatggacctcgaggaggcggtaaggaggcggtgcacctggcgggccacgatcgccggggccggaggagagagaagctgaggaggagcggcggaggacgccgcgggttggggcggcgacgccaccggctggaggaaggcggggcggagggctgcagggcgggctaaggactggggctggccggccgcatgcgcgcgcggctttggtaaagaggctggagtttctggctcggcgaggttgtgggggagggagggtgtggtgtttgtcgttatgggtgtgtttaaggatgaagctgtgggttttgtggggtggccacccacagggctcatcctcgagactggaccacccacaagttccctttaatgctggggtgggtgagggaggggcaggggttggaacctgagatgccgccgggtaacccctgtcggtctctccgggaatccttgccactgtctccagcagggattctaaattcgggtttgggaactccccaaattgtccagctatcattcatcgtagtgttagtacggggtcactgaacactttaccaagttgccaaaattgatttggcatgcattttgttttgttttaggtactacgtaaaatggcacatttttgttttttatttttgagacaagatctcacttcttcccccaggctggagtacagtggcacgatcacggctcactgcagcctcgaatcctgggctcgagagatccttccgcctcagccttccaatgagctagggctacagacatgcaccaccaagcccggctaatttttttttttttaattttttgtaggggcaggggtctcgctatgttgtccagactggtattgaactcctgggctcaggcgatcttcctgcctcagcctcgcaaagtgctgggattataggggtgatcccccgccctcggccaaatggcacacgctttgatggtattaaatgatactcgataattagatcaatgctaacaacaagtcaaactccaaagagttggggatcagagaattaggcctgtatatacaggagcagtacggtcttatagtagaggcttaaaaaatgtttactgatgatggttggctaacttctgtaaatgctaggctgatgaaatgaataattgtaactcaccattagctagcgtatacccagactagggatcatgtctggtctgttttgctcaccattgaatccccagcacctagtaaaaagcctggtacacacatagttgataccccttatgctgccgagtgaataaatcgaaacttgaaaccattacaaatctagttcctctgtggtatgcgcttttagtgtcctggaggagttccaaattgtatttgcattttttaaaagtcttctctatacttgtttgtcatcttctcacagtattttcaaggagctttgtttactcatctttggttccagtttacccctactacctccttttctttttttttcctgtcacactgcatatttcaataaattttctccagtagtttaattcggtttcataccgcgcctctccttgtttgcggataatctctctgacatattttttattgtctatgattttttattaataaagttgccaggaacccattaaatagaactgcaaggtttaggtacgatgtattgaatgtggcttgatgggaacaccttttctgtcctcttctcccataggaagagtttaaagaacgctgtactcagtgtgctgctgtctcatggggtcttactgatgaaggcaaatattattgcacttcttgccacaatgttacagaggtaagtaacaaatatcatttatgaatttgcttatgttttaaaaattgccatttcagcctgatatgtagtctaagtcccaaagaattgggttgatttttgtcactcatgcaatgccaacattccaaggatgcatgtggtcttaggtacttacacataggttaagggatttgtgaattagattgaggatgagtttttgaaattatgttgggccacatttataaatgatttcttattcagagtatgtggttgagggaaataattaaaattgtacttagaagatgatgcatttctttttatcagttagtacttatttacatttttttaaatgtgtcatggtggcttagaggtttggaagatggaatgttagaaaacttgaggactgggccgggcgcagtggcttacgcctgtaatcccagcactttgggaggctaaggcaggtggatcacctgaggtcgggagtttgagaccagtctgtccaacaatgggaaactccgtctctactaaaaatacaacaattagccaggcgtggtagcatgcgcctgtagtcccagctacttgagaggctgaggcaggagaatcgcttggacccaggaggcggaggttgcagtgagacgagatcacgccactgtactccagcctgggcagcagagcaagactctgtctaaaaaagagaaagaaagcttgaggactgttgggaatattggaattattcttcgttatccttttacctttgtatagtaccttacagattacaaagtttttggatccattatctcatttcctcctcatcactaactgtgagagcctattgatagggctcagaagttgagtgagtttgccaaagttacccaagtaccaggacttgaatgtgagtcttctgacttcagtgttcattttacccatcacacctgcctcttaaagtagagattgtcatattgtcctgtgtaaccttggtaaacgaggctaccttcacattgtgagtgctaggtcctattgtggtgaacacaccttcgggccagcatcaccaaagtgatcaagggtgtagagagtctgctgctggacaggctaaatgtgccaggactctcctcagtggaaaaggatttcctcaaagtctacagatccaggaaggaacaaatgttaccttcaccatacaggcttaagaaaggcaaatttgggacattaaaagtaactgtgtagacttctgcttctggctaagatggactaacagagaccagacttacctttgtcccctaaacaatgaaaaacctggacaaaatatattaaatgagtaaaaggaaaaacattttcccttgacaaaactggtgaattgagcttgcaggtgtgtcacacaagtgcttttccttgaggcagtgttcttgagtctgcagctggaatgcttatctctgcttcctgtttagtcatacagaatattaaaaagatatgtgctcacttgatgaaattgttggggtgatggagatatttattatcttgattatagtggtggtttcatggagatatattttgtgtgtgtgtctgtgtgtgtcagattgtgcacctgacagatgtgcagtttggtcctcaccctcattgtgtagtaaggagctagcagttttactcactgttgcttttgtactatagtgcaggtgtaaacccagtgaagaaagattatgtctaatggagtatttgccattagtagatgaagtcagcatactatttttataggaattgaactacattaactaattgcttttctatttttgattttgatactgtttccgtttgattctgtttgatcaaatctgctgcagtcattttttagtttgaaagatcctaatacttctccctagctccacatttggaagactgtcaactcctgtggagtaatttgtcaagaatgtagagttcatgaaggtggacaacatctttataaagaccaagaacctagctcagtgccttcctttcagacgacaggcttaaaggaaaaaaaagttacgtgttgcacaacttcagtagttattcttggctttatggcggtccaggcatgttcttcacatggactgtgagaatataatgtggtaggggctccctggagctgagcagtgtggcgatggtgatgttgaaatacagtgggtggggaatggcaggtgagacagttacagctgtgaagaatggaagtcatggtgcaacttgccctatttttctgccccttttattgccccctcttccttggcatgtaactgtcaagctccagacacgctctgcaatctgggaaaggccttccagattgataaaggaaccaaaatgttatcctagtatattttatccaggaaaaaaaaatgtaaggtcataaatctgttcaatttagacaatagatatttttgcaagagtttcacggatatttaaaaaggtgtaggctagacttgtgtgaatgtaagagatttttatgatcataagagcaatgcatgtttactatagaaaatttggaaattgtgaagatgaaagctaaaatcaccagtaatctctacatttgtctcttttttcctgtgtgtgaaatggagaaagggatgtgtgagtgctgttcaatcttctgccgtaacaacttggaaaaatacttttatctaaacatttgcagacattttttatagactgtaaatattccataatggccatttggtaatttaattaattatagctctagttttggatgtttcattttttcaggttttttgctctttcacgttttgtctagtacagattttaagtctttttttcctggctaccctttgcaagttttactgtctttgctagataatggcttttgtatttattttgacgtgtcttatgttttcagtgtggccaacccagtataccaaaattgctttgaatatggtttctgtgattagagagactacgttccaaaaatcctgttggtagagacatttcttttattcttatggagggttaaagataaatttcattccaaatctctaaatttagaaaaacagtaatgtcctctgttggttaaaaatcctcacctttcttctggcattaagactcaataatgggggctgggcacggtggctcatgcctgtaatcccagcactttgggagaccgaggtgggcagatcacctgaggttgggagtttgagaccagcctgaccaacgtggagaaacctcgtctctactaaaaatacaaaattagccaggcgtgatggcgcatgcctttaatcccagctgctcaggaggctgaggctggagaattgcttgaacctgggaggcaaaggttgaagtgagcagagatcgcaccattgcactccagcctgggcgacgagagcgaaactccctctcaaaaaaaaaaagaaaaagactcaataatgggaacatttattctactttatggaataaagtgtggccccatttaaaaaaaaagactcaacactttatttttagttgtgggagagccagaatctttgatatttgcccttgagagcagttaagattgaagactctgatatgaattatactaaccattttagtcattctaaagttctctaagtttgattaaaaataaaatgtaatacgtacttttataatttcagaaatgaaagcagttttagagtattattcaaagacatggaaaagtaggccaaaactaatctgtctgtagtttaggcattaccagttacaaaaaatacataaaactgttttcataccaaagtgtattttgtgtggagaaaaaagtgagtagatgtaacttttagtttggcttggtttgtaaaagttaaaaagtgatttaaaataaaagttattcatttaacaaacactttatggttactgtattccaggcactgttttagttactgagaaattttgaatgaaaaaacaacatcaacattaactagaatgttaaatgtttataattttcccaagattttaccatccttggtcctggcactcacaatttggtttattatactttccagaaaatacctggaaaaatgcttagggggatgtaaaacgatcttttttaatggtctttttctctttcctgcagagatatcaggaagttacaaacactgatcttattcctaatacccaaataaaagccctcaaccgggggcttaaaaaaaaaaacaatactggtaagttctttcttcatatgtacttaacattctttattcacatctttcaccttcatgatgtcaggacatggaatggaattttaagtaggttctagagaaaatgccagattttatctactggcatacgttcttctatcctatgtctgtattcattgtgggtgaatattatttctggtgcttttatagaaaaaatgcttattttctgaaataattcaaccgtggaattgttaggttaggtgagttaaatatgatattcaacttctagaaatccatttcttgtgttgaattttgaacacacctttttaaaattgggaaaattattttcccttaaaatgacctcaacatgagtgtgctttgaaaggcaaagtatttcattaatccagtgagtacatataattaaccattgttgagaaggatcttaggtaaagtctaactgatggtttttatttttgtgactaggtagctaggaccaaatccccaagtttgaaaccaggctgatgataatggggactcttctacatgagatagctttaaggatacacacacattaaaaaatatatatatatatgtgtgtgtgtgtgtgtgtgtgtgtgtgtttatgaaatatgtgaaatacaccgacattcttagatgctaacagtgactgcctaggtgctgtctcatgtttctgcttagcctttagtagtgactttttattaggctaaaacctgattaacttttaaattttattggagtaaaacctgattaattttgccttgacctacttaaatagttaaaatgtgtagtttaaacatgcatttcttaaggaacttcaggtgctttatattaggtgttaagtatcttatagtcaacctcatcacccttaatttcttcatttgtaaaatgagaataaaatgccatccattatggaaaataggaacacagactcaaaatttaaaatacaactttatcagtttctaagaacagtatgcaggaagagggagtatatgcatatagcttgaagagtttaaacttcctcgacttatggacccatcaaaattattggcttttgagacaattcgagaccctttctgggaaggaattgggttagttagcagaggtggggagactttgtgacattcaggtaagggagaagagttgaagtcctctggcattctgcagagaagagatcttgaagtcagtaacacacctcagaagctctgtgtaaaaagtactgataacaagcttttggaagagttacagtatttgtccagcagtgaggggcaaaacataagggtcttcacagacttttccttcagctcgtagttgtcattaaacatgtaactctgtctattgtggtggcaggtttcttcacaatctcttagggtagttttgagtattccagaaaataacccacgtaagatacctggcacacacttggcacctaggctgagatcagtattagtaccttgctttcattttctccctataacctagaaccatttcaggaaaagcagaatgccattgagcagtttattttctttgaatgttcttactgcccttttctatactccggtatcatgagatcgtgacattcgttcactcattcactaacagttcactgttcccttgtgagttggaacagaaaagtggtggaagcagtgacttagtcctttcatttaggattctgctgggcatcgttcatcatttaggattctgctgggcattgttcgggaaaatagacatttttaaaactcgtttcacttttttttaacatggtgactattcatttttctgcctcttaggttaatatttcagaaaaatacagataatggaaaacatttgaaatcggaaattatacaaaatatttagtttcagcatttgtgtacacattgccaggttggaaacaagagaatataagaatggaagccctcttgaatggtacaaaaaaattcaagatgctaagctgctaagttctgggttaattgaaaaaaaaagaaaaattcaagtcgcaatgtgtaaaacacaaattgtaactgtagtagcattaaagttagtaaattaggaatgtatatgctaaaacatgctatttgtcatttagaaaaaggctgggattggtatgtgtgtgaaggtttccagtatattctttatcaacaagcagaagccttaaagaaccttggagtaggcccagagttaaaggtaagtacatttgtgactagatgttagctttacatatttttgtttaaagaacagtaagacttatagtggaactaaggagaaatcagtagtaacactagggctactggaagaataatttttctgatgtttttgctttaatccttttagtaggttagcagttctggaagtgtgttctacaggatgtaaataagcaatacatccaaaagaaaaatttaaaggttttagtcttcagatacttaggaaacaacaggttaaacaaagtaaaactcaaataactttgggggtttattagtaccttttgtgtgttaatgtgcttgtttaatttccagggaatgtcctgtgtgttattcacaatttgagaacaaaatcgtttggtgtatgtacataacgtccatcaggacttgagttccacagaatgcactttggacagcgatatgctaaaccagtcgttcacctgagtgcatcagaatcacctggagtgcttgaaaaaacaccaatcactggaccttaatccccgaatttctgagttagtatgtctggagtagagcccaagaatgtgcatttctaacaagttcttatgggacacccatgcttctggtctggggaccactctttgactttgctgccttcctggagcaacacagtatttctgcaattatttgaatttcatattccttcatctagtaaaagtcatttaaggaatgctttaaaaagccagttatttagcaacaagttgttcacttgcttcatatgcttcattggaaaccaagtgttgagaggtccagcctagttggggagagggatttatgcatatgtgaaatgaatagacatgaatttatatggtgatatgctaagtgatttttttttttaagagacggagtctcgctctgttgcccaggctggagtgcactggcatgatcttcgctcactgcaacctccacctcccgtgttcaagcaattctcctgtctcagcctcccgagtagctgggactacaggcacacactgctatacccagctaattttttctattttagtatagatggggtttcaccatgttgctcagcctgggctcaaactcctgagctcaggcaatctgcccatctcggcctctcaaagtgctaggattataggcatgagccccagcacctggccctcataagtgatattaaaggcaaaaaaagaacagagaaagatcaacatgggctgcagtcaccaaggaaagatttgtagaggagcctttgctgttcaaactggtggttggggcaagtccaaacagaacaaccacgatttcagtgcatggcctaaatggatgctgggcctaccctgaaaggcgttaagaattaaaaattcagaagcatgaagcaacagaggctaacccataatagtcattgcattaggtatgatagctgatagtgggggggttgtgatctgatttctgcttacatagtcattttatgtataaatgtttagaaacagttttatatagttacactatatagctgtagcagggtttgttcctatgtagctttatgctcacctcattaggggttaattctgaaaacaatttttctgaaattagccaatgagcataactgtttagacctgatcagttgagtggcattatgccatgtacacaggctccagaatcagaactgactccaaatcctattgatagtttttctgcttaatggctgggtaatcttggacaagttattcagtttcttcaatggtaaaatgaagctaatagctgtcttacaatattgtgttggagctaagggatacctggtacctagtagatgacgaataaatggaaaagtctttctgtttgctttttttttttctttttcagacagggtcttgctctgtcacccagactggagtgcagtgacctgatcatggctcactgcagccccaacctcctagactcgagtaatcctcccacctcagcctcccaagtatctgggactacaggcatgtgccaccatacctggctaactttttgattttttgtagagatgaggtctcaccatgttgcccaggctggtttcgaactcctgggctcaagcagtttctcctgccttgaagtctggggattacagtagtgagccaccgtgcccagccggaaaagttttttgtttagtttcactatcacttgggactggttagtaaacctggtaacagctttgcccctaactaaaagtgtagtcatgtatcagttgctttgtactctgatccttaatttacttaatatgcagaagaaaaggactcaactcggtgattttaatgtctttctctatctaaaattaagaaggattttttcagcatttctcatgtacctgacactatgatgatattataattctttttaaggaaaggcaggtaagaatacatttagatggaagacttaaccagccctccaggtgattctgatgcacacttaagcctgagaactactggttcaacatactaatccctagtgtgcattttgtggaactcaatgttctgatagatgctacatacagaccccagagattttgttctcaacttgtgaataccacataaaacatttactggaaatttatatgtaagttaatatttaaagtacaagagagctgtggtgtagatgtgcctgtacatttgttgtcataacctgaatcacccaccactcatttcccttccaccttagaacgatgttttacataatttttggaagcgctaccttcagaagagcaagcaggcatattgtaagaacccagtttataccactggaaggaaacctacggtaagtcacaagtctgaaaagttggattaaaaaacatgtctgttgagatgtagagatgaagatgggttcatgaccagtttgagtatctgagattatgatgcttgtcagaggattttcagttaagaggcttctgttacagtctagaggacggggtcactgatttaaacgttggaataaagttttttcttcacttttttcctgcagtatggaattaattttgacatcttatcagactagttgaaacataaaggaatttgtggttgattttctagatagaagatagtttctatcactgtactattaaaataatttttaatttaataatgtatttattctgtttgcttggaatacctacttactttatgtggcatttcaagattcagctcagttatcatatcttctcagaagcctttatgtgaagaaaaataaaatctgggtattctcccatatccaccagctgtttttagcagtttctttgtaactgctttataaatgtgccatgtaacattttatttggggtcgaggatgattctacttctaagaaaagcaagtttgataattttttttgttcatttgtttggtttttttttgagacggagtttcactcttgttgcccaggctggagtgcaatggcgccatcttggctcactgcaacctctgccttcctggttcaagcaattcttctgcctcagcctcctgagtagctgggattacaggcgcccgccaccacacctggttcatttttgtatttttagtagagatgtggtttcaccatgttagccaggctgatcttgagctcctgaccgcagatgatccatcctcctcggcctcccaaagtgctgggattacaggcgtgagccactgcgcccagccagttggataatttttgatgtgtggtacagatgccccttgccatggggtcacatcccgataaacccattgtaagctgaaactatcattaagttgaaaatgcaggctgagtgttaatgactcatacctgtaatcccaacactttgagaggctagggcaagaggattgcttgagcccagaagttcaagaccggcctgggtaacataatgagaccccaactctacaaaaaattaaaaaatacgtactgggcatggtgacacatgccctatatagtcccagctacttgggaggctgaggtgggaggattgcttgagcttaggaggttgaggctgcagtgagctgtgatcacaccactgcactccagcctgggcaacagagtgagacttgtctcaaaaaaaaagaaaatgcatttaatatacccaacctaccgaacatcatagcttagtctagcccactttgaacatgctcaggacacttacattagactacagttgggcaaaagtcatcaaatacaaaacctattttataataaagggttgaatatctcatgtaatttattgattactttactgaaagtaaaaaacagtatggttgtatgggtgcttgaagtatagttttgactttgtgcatattgcttgcaccgtagtaaagtcaaaacatcacaagtaagggaccatctatagttactcttcatatggctagaagagattctgaatctgtttgatacacatttgttaagggcttgggaatttggcccagtgtttccttgtttgcttgggttctcataggtttcacatccagagttgagagacccagtactgagaaacccaggtctgggtgaagagtaggttacagagatgagcaaaagagataacctctgagctccttcagtatcctcatgtgataccaatcctaagaatgagaagtttagagtagtcaagtcgtacgggatagtgatggttaaatgttatcctggcgggcagttgtgggggccaacctgagaaagctaactgaaaaaaaaaaaaggcaggggaataacctgaggggttcgtttggagaatgttttaaaatatgagataatgaatttaaataaactcaagagaaataacttgaatttactagaaaagataatattttataatcatagaactatgaaacattatactgtcttgatacatgagagagatacttcccaagaaaatcggaagatgctatatggttctaaggtaacactttgaaaaagaaaggaaagaattgcctaaactactaagaacctgatctttaaaatttcatatctaaggtatttgttgattgtatttatgccctgggagtttgcctaacacatagaaaatatgcatcagaacctgggattctctgacatttaaatatttttgggttaacttaagttttttttaaaaaaaggtttttctagagttgagtaaattctcgtgtaaagcaatattagcatcacgctaaaatcttggtgaataaataagcaataagtaaaatattaagctgatgtatgaattagtaaggtaatttctacttcaagagtacagctatactctattttgaaaggaaatggaaacaattacttttaattagaagcatagttttctcaagtatatccattaaatatttccttagtgctttggagataactgttttgagaacagtaagaggcctggtccctgcttttgagctgtattatcttgggtgaggtaaattactgaaaatgtgcagaagaagcaaattaacaagcaaatatagagagggggacactggggaagggtgctatttaataaaaggtggtcatggaggcccttgctgatgtgggagctgaagtgatgaagaaagtgagagagtaaaccatgggatatctagggcaagaaatgcagaatttcaggtcttaccaagaccagttgaatgcagatacgcattttaagaagtccgtagatgcttcctatacacagtacactaaagtttgagaagcactggtgtagatgagaagtgatggtggctggtaccaggtggtagaactggaggtgataagtgataggattctatataaagtctgaagatagagccaacagaacttcctgacggattggatgtgagagaaagagaggaataggagtcaatgatgactctaaggattttgacctaagcagctggaaggaaagagttgccatcagctgaagggtaagtgggccaggaaggtcagtggttccattttggacatgttaagtttgagacagctgttagcatctattagtccattttcacactgctataaaaatactacctgagacagggcaatttctaaacaaaagaagtttaattaactcagttttacatggttggggaggccctagaaaacatgtaatcatggccgaaggagaggggaagtaaggcatgtcttacatggcagcaggagagacagagagagtgcgtgcgtgtgagcaagcccatgcagggggaaactgccactttaaaaaccatcatattgcatgagaactccctcgctatcatgagaacagcatgggggaagccacccccatgatccagtcacctctcaccaggtccctctcgcaacatgtggggattacaattcgagatgagagatttggatggggacagagccaaaccatatcattccacccctgccccctgccaaatctcatgtccttctcacattgcaaaatcaatcatgccttcccaacagtctaccaaagtcttaactcattccagcattaactcattaactcaaaagtccaagtccaaagtctgatctgagacaaggcaagtcctttctgcctatgaacctgtaaaatcaaaaacaagttagttacttccaagatgaaatgaggttacaggcattgggtaaatgttcccaatccacatgggataaattggccaaaacaaaggggccaatacaagtccgaaacccagcagggcattcactaaatcttaaagcttcaaaataagctttgactccatgtctcacatccaggcatgctgatgcaaggggtggtttcacaaggtcttgggcagctttgctcctatggctctgcagggtacagcccccaaggctgctttcatgggccagagttgagtgtctggctttccaagtgcatggtgcaagatgtcagtggctctaccattctgggatctgcaagacgatggccctcttctcacagctccactaggcagtgctccagtgggaatctgttggggctccaaccccacatttctcctctgcattgccctagaagaggttctctatgagggctctgcccctgcatcagacttctgcctggacatccaggcatttccatacatcctctgtaatctaggcagaggttcccaaacctcagcccttgtcttctatgcacccacaggcccatcgccacgtggaagctgccaaagcttggggcttgcaccctctgaagccatggcctgagctatactttggtgccttttagccacagctggagctggagtggctgggatgcagggcgccatatcctgaggctgcacaaagtaactgagccctggacctggcccgtaaaaccatttttccctcctaggcatctgggcctgtgatgggaggggctgtctcgaagatctctgacatgccctggagacattttccccattgtcttgactattaacattcactcctcattactaatgcaaatttctatagccggcttgaattttctccccagaaaatgggttttccttttttaccttgtcgtcctgctggaaatattccaaacttctatgctctgcttcccttttaaataaaagttccagtttcagataatctctttgtgaacacacatgactgaatgctttcaggatcagccaggttacctcttgaatgctttgctgcttagaatttctgccagataccctgaatcatctttctcagcttcaaagttctgcagatctctagggcaggggcaaaatgccaccagtctctttgctgaaacatagcaagagtaacctttactccagttcccaataagttcctcatctccatctgaaaccacttcagcctggacttcattgtccatatcactatcagcattttttttttttttttttgagatagagtgttgctttgttgcgcaggctggagtgcagtggcaccatcttggctcattgcaacctccgcctcctggattcaagcgatttttgtggcttagcctcccgagtagctgggactatagatgcatgccaccatgcccaactacttttttgtatttttaatacagatggggtttcactgtgttggtcaggctggtcttgaactcctgaccacaggtcaggcccacctccacctctcaaagtgctgagattataggcatgagccatcgcacctggccgctaacagcattttgatcacaatcattcaacaagtttctaggaatttccaaactttctttcatcttcctgtcttcttctgagccctgcaaactgttccaacccctgcttgttacccagttccaaagttgcttccacattttccagtatctttatggtggtattccactcctggtaccaatttcctgtattagtttgtttccacactactatgaagatactacctgagactgggtaatttataaacaaaagaggtttaatgggctcagagttctgcatggctgcaaggcctcaggaaacttaaatcatggtggaaagcaaaggtgaagcaaggcatgtcttccatggcagcaagagagagagagtgtgcagggggaaatgccacttttaaaacagtcagatctcatgagaactccctcactatcacaagaacagcatgggggaaactgcccccatgatccagtcacctcccactaggtccctccctccagacatggggattacaattcaagatgagatttgggtggggacacagagccaaaccatatcagcatccaagaggaaatttcaagcatgcagttagatgtaaaagtctgcagttcaggagagaggtctgagccggagacataaatttcgaagctgttagtttatattataatcatgaaatctaacatgctattgtttgtaacatacgccattattttaagtactgctaagaaagaaaagagtgctacaaattcaattttgacatgccagtgattgtaagataaatcttgatttctaggatgttaaaatgtggtatgggaggggacattttaaaatttgaagatagtagctagtatttaaaactgtaagaccggatgacatcaccaaggtatgaagacagagagaggaccaataacttagccctaggtcattctacggttaagatgtttgggataaaagaggaactggcaaaaaaattcttgggaacaatgtgaagtaagaggacagctgagagaatgagcactctggaaaccaagggaacaaagtgtttcaagaagagggcagtgatcagctgtgataaatgctgtcactaggtcaagaaggaagagggctgcaaagtggttagtggagcagtgggatcaaaaccttgattggaatggaatataaggtagactgagaggagagaaattggagacaacaaatttggactttttcaaggcattttgctgcaacaagtacaaagaaattgcatggttgctggggtcaagggagagcttttaaaaagtgggatagaggggtggagccaagatggccaaataggaacagctccagtctacagctcccagcatgagcagcgcagaagacgggtgatttctgcatttccaactaaagtactgggttcatctcactggggagtgcgggacagtgggtgcaggacagcgggtgcagcacaccgtgcatgagccgaagcagggcgaggcatcgcctcacccgggaactgcaaggggtcagggaattccctttcctagtcaaagacaggggtgacagacggcacctggaaaatcaggtcgctcccaccctaatactgcgcttttcgaacgggcttaacaaacggcacaccaggagattatatcccacacctggcttggagggtgctatgcccatggagcctcgctgattgctagcacagcagtctgagatcaaactgcaaggcagcagcgaggctggggaggggcgcccgccattgccgaggcttgagtaggtaaacaaagctgctgggaagctcgaactgggtggaacccaccacagctcaaggaggcctgcctgcctctgtaggctccacctctgggagcagggcacagacaaacaaaaggcagcagtaacctctgcagacttaaatgtccctgtctgacagctttgaagagagcagtggttctcccaccatgcagcttgagatctgagaacgggcagactgcctcctcaagtgggtccctgatccctgagtagcctaactgggaggcaccccccagtaggggcagtctgacacctcacacggccaggtactcctctgagacaaaacttccagaggaacgatcaggcagcagcatttgcggttcaccaatatccgctgttctgcagccactgctgctgatacccaggcaaacagggtctggagtggacctccagcaaactccaacagacctgcagctgagggtcctgactgttagaaggaaaactaacaaacagaaaggacatccacaccaaaaacccatctgtacgtcaccatcatcaaagaccaaaggtagataaaaccacaaagatggagaaaaaacagagcagaaaaactgtaaactctaaaaatcagaacgcctctcctccaaaggaacgcagctcttcaccagcaacagaacaaagctggaaggagaatgacattgacgagtcgagagaagaaggcttcagaagatcaaactactccgagctaaaggaggaagttcaaaccaatggcaaagaagattaaaaaccttgaaaaaaaaattagacaattggctaactagaataaccaatgcagagaagtccttaaaggacctgatggagctgaaaaccacagcacaagaactacgtgaggaatgcacagtcctcactagctgatgcaatcaactggaagaaagtgtatccatgatggaagatgaaatgaatgaaatgaagcgagaagagaagtttagagaaaaaagaataaaagaaacgaacaaagcctcccagaaatatgggactatgtgaaaagaccaaatctacgtcttattggtgtacctgaaagtgacagggagaatcgaaccaagttggaaaacactctacaggttgttatccaggagaacttccccaatctagcaaggcaggccaacattcaaattcagaaaattcagagaatgccacaaagatactcctcgagaagagcaactccaagacacataattgtcagattcaccaaagttgaaatgaaggaaaacatgttaagggcagccagagagaaaggtcgggttacccacaaagggaagcccatcagactaatagctgatctctcggcagaaactctacaagccagaagagagtgggggccaatattcaacattcttaaagaaaagaattttcaacctataatttcatatccagccaaactaagcttcataagtgaaggagaaataaaatactttacagacaagcaaatgctgagagattttgtcaccaccaggcctgccctaaaagagctcctgaaggaagcactaaacatggaaaggaacaaccggtaccagccactgcaaaaacatgccaaattgtaaagaccatcaaggctaggaagaaactgcatcaactaacgagcaaaataaccagctataacatcataatgacaggatcagattcacacataacaatattaaccttaaatgtaaatgggctaaatgctccaattaaaagacacagactggcaaattggataaagagtcaagacccatcagtgtgctgtattcaggaaacccatctcacatgcagagacacacataggctcaaagtaaagggatggaggaagatctaccaagcaaatggaaagcaaaaaaaggcaggggttgtaatcctagtctctgataaaacagactttaaaccaacaaagatcaaaagagacaaaggtggccattacataatggtaaagggatcaatgcaacaagaagagctaactatcctaaatatatatgcacccaatacaggagcacccagattcataaagcaagtccttagttatccacaaagagacttagactcccacacaataataatgggagactttaacaccccactgtcaacattagacagatcaatgagacagaaagttaacaaggatatccaggaattgaactcagctctgcaccaagtggacctaatagacatctatagaactctccatcctaaatcaacagaatatacattattttcagcaccacaccacacctattccaaaattgaccacatagttggaagtaaagcactccttagcaaatgtaaaagaacagaaattataacaaactgtctttcagaccacagtgcaatcaaactagaactcaagattaagaaactcactcaaaactgctcaactacatggaaactgaacaacctgttcccgaatgactactgggtacataacgaaatgaaggcagaaataaagatgttctttgaaaccaacgagaacaaagacacaacataccagaacctctgggacacattcgaagcagtgtgtagagggaaatttatagcactaaatgcccacaagagaaagcaggaaagatctaaaattgacaccctaacatcacaattaaaagaactagagaaacaagagcaaacacattcaaaagctagcagaagacaagaaataactaagatcagagcagaactgtaggaaatagagacacaaaaaacccttcgaaaaatcagtgaatccaggagctggtcttttgaaaagatcaacaaaactgatagaccgctagcaagactaataaagaagaaaagagagaagaatcaaatagacgcaataaaaaatgataaagggaatatcaccaccgatcccacagctaccatcagagactactataaacacctctacgcaaataaactagagaatctagaagaaatgaataaattcctcgacaaatacaccttcccaaaactaaaccaggaagaagttgaatctctgaatagaccaataagaggctctgaaattgaggcaataattaatagcttaccaaccaaaaaaagtccaggaccagatggattcacagccgaattctaccagaggtataaggaggagctggtaccattccttctgaaactattccaatcagtagaaaaagagggaatcctccctagctcattttatgaggccagcatcatcctgacaccaaagcctggcagagacacaacaaaaaaagagaattttagatcaatatccttgatgaacattgatgcaaaaatcctcaataaaatactggcaaaccgaatccagcagcacatcaaaaagcttatccaccatgatcaagtgggcttcatccctgggatgcaaggctggttcaacatacaaaaatcaataaacataatccagcatataaacagaaccaaagacaaaaaccacatgattatctcaatagatgcagaaaaggcctttgacaaaattcaacaacgcttcatgttaaaaactctcaataaattaggtattgatgggacacatctcaaaataataagagctatctatgacaagcccacagccaatatcatactgaatggacaaaaactggaagcatttcctttgaaaactggcacaagacagggatgccctctctcaccactcctattgaacatagtgttggaagttctggccagggcaatcaggcaggagaaggaaataaagggcatgcaattaggaaaagaggaagtcaaattgtccctgtttgcagatgacatgattatatgtctagagaaccccattgtctcagcccaaaatctccttaagctgataagcaacttcagcaaagtctcaggatacaaaatcaatgtgcaaaaatcacaagcattcttatacaccaataacagacaaacagagagccaaatcatgagtgaactcccattcacagttgcttcaaagagaataaaatacctaggaatccaacttacaaggcatgcgaaggacctcttcgaggagaactacaaaccactgctcaatgaaataaaagaggatacaaacaaatggaagaacattccatgctcatgggtaggaagaatcaatatcgtgaaaatggccatactgcccaaggtaatttatagattcaatgctatccccatcaagctaccaatgactttcttcgcagaattggaaaaaactaaagttcacatggaaccaaaaacgagccctcattgccaagtcaatcctaagccaaaagaacaaagctggaggcatcacgctacctgacttcaaactatactacaaggctacagtaaccaaaacagcatggtactggtaccaaaacagagatacagaccaatggaacagaacagagccatcagaaataatgctgcatatctacaactatctgatctttgacaaacctgacaaaaacaagcaaaggggaaaggattccctatttaataaatggtgctgggaaaactggctagccatatgtagaaagctgaaactggatcccttccttacaccttatacaaaaattaattcaagatggattaaagacttacatgttagacctaaaaccataaaaaccctagaagaaaacctaggcagtaccattcaggacataggcatgggcaaggacttcatgtctaaaacaccaaaagcaatggcaacaaaagccaaaattgacaaatgggatctaattaaactaaagagcttctgcacagcaaaagaaactaccatcagagtgaacaggcaacctacagaatgggagaaaatttttgcaacctactcatctgacaaagggctaatatccagaatctacaatgaactcaaacaaatttacaggaaaaaaacaaacaaccccatgaaatgtgggcaaagggtatgaacagtcatttctcaaaagaagacatttatgcagcccacaaacacatgaaaaaatgctcatcatcactggccatcagagaaatgcaaatcaaaaccacattgagataccatctcacgccagttagaatggcgatcattaaaaagtcaggaaacaacaggtgctggagaggatgtggagaaataggaacacttttacactgttggtgggactgtaaactagttcaaccattgtggaagtcagtgtggcgattcttcagggttctagaactagaaataccatttgacccagccatcccattactgggtatatacccaaaggattataagtcatgctgctataaagacacatgcacacgtatggttattgcggcactattcacaatagcaaagacttggaaccaacccaaatgtccaacaatgatagactggattaagaaaatgtggcacatacacaccatggaatactatgcagccataaaaaatgatgaattcatgtcctttgtagggacatgggtgaagctggaaaccatcattctgagcaaactatcacaaggacaaaaaaccaaacatcgcatgttctcactcataggtgggaattgaacaatgagaacacatggacacaggaaggggaacatcccataccggggactgttgtggggtgggtggaggggggagggatagcattaggagatatacctaatgctaaatgacgagttaatgggtgcagcacaccaacatggcacatgtatacatatgtaagaaacctgcatgttgtgcacatgtaccctaaaacttaaagtataataaaaaaatttttaaataaagtgggataaatgatagcatatttgtgtagtgataggaatgatgcaggagagaagaaaaatttgcaatggagagaaagagtagatgtgaatctttgaacagatatctttgagtgtacagagaggtgggatcaagtgcacaaatagagaaactggctttaaacaggagtttgaatcgtccagaagaatcaggcagaggcagagtatgtggtagagttgctggcagtggtaacctgtgggaacctgtggaagttttctctgtgttcatgctcatcagccagctttctggtgtagcctccttctcacagggcttccctatagggaggggatatgcttgacagaggacacaagcatcttacttcattctctgaggtttttgtttgtttttttgtttttttgggttttcttgcttcattgtcttgtgagcctctttaccaggagtcttagtcttatcttcctgtaataagatcaagtttcttggcctgcagggttgaaatcatggctttttgactgtgatcggtttgcctgggtaatgtcagctaatgaggtctttaggtagccagccagctgacctttttagggacactctgttgtttcaacagtacatgtgtgaacagttaaacagtagtatgagatagtatatccttgttgattacatgttacaaatcgtatatgctacaggagttcaaggaaaggagaaatcactgaagagtgggttggaaagatggcatgatgagtaagtaatgagttagggagagggaggaaaaggcgtagttcaggcaggagaaccagaattaacaaagatacaaagcaaaaattccccaggtaggtttggtaaaaagaagccagccagcatgtgtggggtcattgatgcgcgatgttttcagtggtgaagatattagcgctgtaagagagatgttcatggaagaaggagacctgatggcagggctggcagccggtttcctcgcccatccttgtctgtgactcctctccaagaagcactgctgggagctgtcaggagcgtgtttcagaagtaaagggacttggcaggcagttgcagttttctagagtggtttcttttagggtgtttgtgataggagttgtttaagttcacagaaattaactgtttaaaactgttacacaataattttatttatattgttttgcaaacaggtattagaagataatctaagtcattcagactgggctagtgagcctgagctgctaagtgatgtcagctgtcctccttttcttgaaagtggagcggagtctcagtctgacatccacactcgaaaacctttccccgtcagcaaagcatcacaatcaggtaaaaatgagaaccaaaccatttcgaattttaaagctgttatgccccttaaaaataatttagtctaatcttctgataatccaaggaaagggaacttggtctagcgaggaagaatctagcaaggaagaatgacttgctgaatcatatggctaagacaaactaagtgaaatcttagcgcaattttttaaaaggcacattgtctccatgtgagttttttgtgtgtgattttaaagggacataaagttcaagtggatccagaaagaaggaggctgcttcagaaagatctatatgtgtgggctcagcgtcttcaaagaaaagttgtagcagaaaaatgttattatgtagccatatagtaaaatagacaaagatggtatgtccagtttctaagcatagactaaatcaagctgagtaaaatttaccttgttacatgtgtgttttactttctgatataattccataacttgaaataaataaggaatgtatttaagattaaaatataggccttcattcctttatcagtgtatccacatctcttcctggactgcacagtgacacagatatcaaataagttacttttggtgtaaagtgttaggatcattgactaattgggcaacaaggaatttctggagttttcttctccaccttttcagacaagcctgagctcaaatattcccagaagaccatgactgtaaaaccatcgaacctttttgaaagaagatattagctccttttaaagcatcatgattgttttgtttacctatgtgtaacagttttgtttgcttatttttttttgttttgttttgttttgtttttgagatggaatctagttctgtcacccaggctggagtgcagtggtgcaatctcggctcactgcaacctccgcctcccaggttcacgtgattctcctacctcagcctcctgagtagctgggattacaagcatgtaccaccacaccctgctaatttttgtatttttagtagagatggggtttcaccatgttggtcagactggtctcaaactcctgaccttgtgatctgcctgcttcagcctcccaaagtgctgggattacaggtgtgaaccaccgtgcccggcctgcttatttgttttttaataaatgatgatccctagagctttcttttagtttttacattaaaagtaatcaatggccgggcgtagtggctcacacctgtaatctcaggactatgggaggctgaggcgagcagatcacttgaggtcaggagtttgagaccagcctggccaacatggagaaaccccatctctactaaaaatacaaaaattagctaggcgtggtggtatgcacctgtagtcccagcttcttgggaggctgaggcagaattgcttgaaccgggaggcagaggtttcagtgagccaagatcacaccactgcactccagtgtaggtgacagagcaagactccatctcaaaaaaaaaagaagtaattattagtgaaactcaatataaaactataaaatgcagatagtcacgaagaaaataaaatcaccagttactgtaccaactagaaattaccgctactgctattgtagatcattccagaaagtttttcttcatgtatgtatacggaaagaatttattttgtttttgtaaaaatttgaattatttcttcattctttaaatttttaaaaacttaaagtataataataaataaatttttaaatcaaaactctacaaatcattctataagtcttgttataaaaaaatcgtaaaaataaaaaattgttttaagttgtagtccaccagtcacggcagtggactacacctattgtaatcccagcattttgggaggccaaggagggaggatcagttgaacccaggagtccaaaaccagcctgggcaacatagtgagacctccatctctcaaaaaataaaaattagctaggcatggtggtgcatgcctacagtcccagctactcaggtgactgaggttgctggagtgcttgagccaggaggtcgaggctgtagtgcgctgtgatcatcccactgcactctagcccggccgacggagcaaaaccttgtcttaaaaaaaaataaaatttgtagtctaccttcagctaatgtcctgttcccaaggggcattcattttcaactcttttgtgactttcatatttccgtatcacgtgcttctagtattacatcttgatttctagtttgggacattagctattcaattctgttttagctctttcacacattcctcactgtcccttatctgcacatagtccccagtacatgcatgtgcatttctcattctctctcttctcaatataattgctgtaattttttactagatcagtatttactgcttaaattattataaatgtatacacattatttagactgagctgtatagcttactatgattactttttctgtatatcctgtggttttcttggagttgataattgttatttatttagttttctgtttattactaatccataatttattactaatgtatctccacacttccagttcttataatctcttaatatcttatgcattctatcagtttcatcttctggaagaagtctccctggagcctctgatctgctctgatctagaatgatatctctagacctgtggcctggctgactttaggatctctccttttttgttgttgttttttttttgagatggtgtcttgctctgttgcccaggctggagtgcagtggcacgatcttggctcactgcaagctccacctcctgggttcatgccattctcctgtctcatcttcccgagtagctgggactacaggcgcccgccaccatgcccagctaatttttttttgtatttttagtagagacggggtttcatcgtgttagccaggatggcctcgatctcctgaccttgtgatctgcccacctcggcctcccaaagtgctgggattgtaggcgtaagctactgtgcctggccaggatctctctttaccaccatcctgagattctgtcatttttcttttgttggaattttttattttctgcatcccatttcttctttcctggattaccctctcatttttgtggagcatcttttatttcacagagaatattaacgatatttcatgcctgacttgattgttttggcctctgctttttacatgaaaggcttcaaatgtttagtgagcctaagatagctattcttacttaaacatgggagactaaaaagttgataaaaggctttgtttccgtggttagtcttgtcagctctgctctgcttgcaaggttattttctcagtgaaccccagcattatcatctttaaatcttttccccccgagctgatcagattcctcagagaaatctctttgagtcttctgtttggcgggtttgtaatcttggctgtcactgttctggaaactgggtaggaagaagaagaccggaggggaatgggggattgttttagtattcagtatgtaaactttcacttaagcctcctgttttcacttctcaacagtgcatgtgagtggcatgccttattctagagacccttctctctggagaagaaatttccagtttttggccaagactagggaggggcatcacttggctgcatggatttgggataagaatctggatgtctggctgggtgtggtggctcacgcctgtaatcccagcactttgggaggccgacgcaggcggatcacgagggcaggagattgagaccatcctggccaacgtagtgaaactccgtctctactaaaatacaaaaaattagatgggtgtggtggcgcacgcctgtagtcccagctactcaggaggctgaggcaggagagtggcttgaacccgggagttggaggttgtggtgagctgagatcacaccactgcactccagtctgggcaacagagcgagattccatcttaaaaaaaaaaaaaaaaagaatctggatgtctaactgcttcttaatctggattttaagcagtcatcctggtgttaggcctgccttcatccagtttctaggggtatgagtttctccaattcctgagccttctttagggatccccagtgaaaactgctttttggcatattccccactgctgactttgaatctagctttcccaggactgctaagccaataatcacctatctgtatgctttctgacttctaaaattttattgttcttgtcacctttttcatgttatttgtcctcaggtttacatgtttaaaaaattctctttataattgttgtagcaggagagagcagaggctaacgtgttttcaatttgccaccttaactggaagtccttacatattataaggaatatacaaaaaattgtgtgtgtgtacacaacacacatttattttatggaaatctgtgactttatatattcatttaaaaccgatggtccttaaactttagcatccatcagaatcacctgaagagcttgttaaaccttagtaatttgcagttccattacgttctcaggtgatactaatactgctggtccaggagtatactttgagaaccactgatcttaaagttctatggacattgttttgtagtataccattgcatggaattacttaattaaacttctattcctggcatttaggttgttctaaatttttatattataaacagtgctgccacagcattccttgacccgaaacctttgcatggctttcaaatcatttcactgggatgaaatcttcaaagtagaactgttgggcctatttgcacatcaggtttctactctgtgctagagactgttctgggcactgggacataatggtggcaagactgtccgccttcagggtgtttatattgtagtaggaggagataggcaataaacgaccaaataaagaacattttagtcactgataagtgctatgaagaaaggacttacagaatttggagaaagggattttgaggagttattttgagactttgtgtttaagaaagtgtagcttctcagggtcattcctagtcctgctgcttttctacccttactccttatgtgacttcacctaataccatagctttaaccaaccaccaactatatgctgaaactaaaattcctatctctagtcccacctctccttcaaagtatagattcttatattcagctgctgactcaacatttctgttggtgtatttaataagattcacacttaacacacataattctaacattgatttcgctcatcaaactggattttttttttttttttttttggccatcttccttgtcttggtaaatggcaatgcattctacttgttgctcaggccaacaaccttataatcatacttgttttcttttctctcatgctttacatccaatctatcagcaaatcctttgactctgcctttaaaatctatctagaatgcaaccatttctcaccagctgcaatgctaccgctccagtccaagtaccagtcatggctttcctggaagagtggtcttctgtttctactcctgccctcccgtaactccattcttccctcagcagctggagtgacctttttaaatacataaatgaggtcctgttgcttccatgttttaaaactctccagaaacttcttagaataaaatccaaagtacaaataatgacctacaaaattctacataatgtagttcttaatctctcttcagtatcattcccaccactttccctcagaaatttctgttcttataaagagaaagaggttgaatggactcatcgttccacatggctggggaggcctcacaatcttggtagatttacgtagaaactatattatgttgcatcccatgatgctctcactacactggcctttttgctgttcctgcagttcactcctgctaatatacttggtattcttcccaacatccttaagacttactttctgaattaattcaggtctctgctcaaatatcaccttctcaatgaggtttctctgacacccatataaagtagcgcatctctcttcccttcccatcacttactatgactctacattgctatttttctatgtagcatcactatctgtcaaatgtaatttttttttttttagagaaagtctctccgtgttgcccaggctagtctcgcattcttgggctcaagtgatcctcctgtctcatcctccctagtagctgggattacaggtgcacaccatggcacctggctctgccaattgtatttcttgtttgtttgtttattggtctgtctcccattactagaatataagttctaagagagatgagacattattcacttgtcatttcctgagacatagaagagtggcacaaagaatgagatgaataagcatctggtgaatgaatgaagataccataatgtcatatggtagaggatacctgaaagatggggatagaagaaggtgctgctctagctaagttttggagttttggagaggccttgtagagaaggggacatgggagttgaggtcagagtcaaagcagttacacatcttttgttgtgcattgtaattgtgtatcctttcctttatttaaaaaattggtttatgttcactattaaaaaattcaaacgttcaaattctttttttttttttctttttggagacagagtcttgctctgttacccaggttggatggagtgcaatggcacgatctcggctcactgcaacctcccaggttcaagcaattatcctgtctcagcctcccaagtagctgggattacaggcgtccaccactacacccggctaattttttgtattttttagtaaagacaagatttcaccatgttgaccaggctggtttcgaactcctgacctcaagtgatccaccctccttggcctcccaaagtgctaggattacaggcgtgagccactgtgcctggctcaaatccgtctttagaatcctgtcccatcccactcctacagatatcccatgattacgtttttggctgattttattctagtcctttattactctttattgccaaattgctctttgtaaaggttttataactagttttaagataattgtattagtccattttcttactgctatgaagaaatacccaagactgggtcatttatacagaaaaagaggtttaatggactcacagttccacatggctgggagtgcctcacaatcacggtagaaggtgaaggagaagcaaaggcacgtcttacatggcagcaggcaagatgagcgtgtgcaggggaactaccctttataaaactatcagatctcgtgagatgtattcactctcatgagaacagcatggaaaaaacccgcccccatgattcaattactttccccaggtccctcccatgacacgtgggaattatgagaactacagttcaagatgagatttgggtgaggacacagccaaaccatgtcaatatttaaaatgcctgtttagattttttgctgtttttcttttgttatccaaatagttcactggatttttaaaaatctccatttatctcctaagaaacgtctgtctgctctggatctctggatggagttgaatactcacaacgaaaggagaagggaatcgtgaagatgaccatgccacagacacttgccttctgttatctgtccttactttggcagagagaagcaataacactttcagatcttttgaggttagctagacctcttgtatgataatatttttgctggttactacatgaactaagtagacaaacttcggatattttgatttttataagaaggcttaacttgaggaaggaactggaaaggttgagtagcctgaattctaattctgaaatgtaatcccccctgggctagtaa

SEQ ID NO: 238 - DNA, 8851 bp, Homo sapiens
  source 1..8851: mol_type = other DNA
aaatcgcgcgcggccccgcggccagcctgggtaggggcaaggcgcagccaatgggaagggtcggaggcatggcacagccaatgggaagggccggggcaccaaagccaatgggaagggccgggagcgcgcggcgcgggagatttaaaggctgctggagtgaggggtcgcccgtgcaccctgtcccagccgtcctgtcctggctgctcgctctgcttcgctgcgcctccactatgctctccctccgtgtcccgctcgcgcccatcacggacccgcagcagctgcagctctcgccgctgaaggggctcagcttggtcgacaaggagaacacggtgagcccgcggggagggcgctgcgggcaggggagggaggcagggaaagcgaagccgctcctcactcacacgcgtctccccgcagccgccggccctgagcgggacccgcgtcctggccagcaagaccgcgaggaggatcttccaggagcccacggagccggtgagtggcgggcgtggggcagaggggccagggacggccttgggcgtcttggcgccaaagccgcattgtttcctcagctgttcacactcccgccccggctcctttcccgcctaggcggcccctccccagggctgcctcccgcgcccctcggcccatttcccggttcgggcgtgcgctcctctgctgcgacccacggagtgcgacgggacagccacgttttcacatcgggccccgtgaaattgccgccaatggaaaggacttggtccagaaaaacgttagtttcatatggttcgcccggtacttaaatgttttattttctcccccaacagaaaactaaagcagctgcccccggcgtggaggatgagccgctgctgagagaaaacccccgccgctttgtcatcttccccatcgagtaccatgatatctggcagatgtataagaaggcagaggcttccttttggaccgccgaggaggtaatcggaggaccccagaagacccctgcaggggtgaccgtcacgcctcagacataaatgcacttggaggttcccgttggcaaggggggctaactgtggggcatagtaagtggtgccagcatacttaaagtttgagtgctcagtgtgagtcctgtaggctttactctcttccttttatgctaaaattgtgacttccgaacctcaggtggacctctccaaggacattcagcactgggaatccctgaaacccgaggagagatattttatatcccatgttctggctttctttgcagcaagcgatggcatagtaaatgaaaacttggtgagtttccaaaacatctttcattcatttgacgttgacgatctgaggtcgaactagttcgctttcctcgtcttgtatgtttttccatgctgagtgcatctgtgtgtgtaagctgggttttatattacatggcatttcctgttttgtaacactttgcagttctttcttatggtattttcccgactctagagaagctgagacaatattaagtggtagcaatgtgatgactctttgtggccaccacatctgccccctctttttttttttttttttgagacagagtctcactctggcccaggctggagtgcagtggtgtgatcttggctcactgcaacctccgcctcctgggttcaagcgattccccaacctcagcctcatgagtacctgggattacagacgtgcgccaccatgcctagctaatatctgtatttttagtagagacagggttttaccatgttggccaggctggtctcgaactgctgacctcaggtgatccacccaccttggcctcccaaagtgttgggattacaggcgtgagccaccacgcccggctctgctccctcctttttgtggctttgctgttttaataataatttggttgtatctcttattgcgaatggatctttcttgacataaattaattaggaaatcgagcgctcacaaatcctattttatatgtatctatttcctgatatgtaagttgagcatatgacataaaatatcaaagaattgtgacaaattggatgaaatatatatagaaataaaccttataatggtacaaagagtgcgatgctgccagtatccgttgacagttgctgctgttggttttttctcaagcttaactttgatgtgttttgccactaggtggagcgatttagccaagaagttcagattacagaagcccgctgtttctatggcttccaaattgccatggaaaacatacattctgaaatgtatagtcttcttattgacacttacataaaagatcccaaagaaaggtgagtattcaagtggtatgccaagatttttaggactcactaattgttgatttattacacatttttagttcacctagggataaaaatgactccagaatgactaagacagtcataggcattcccagcacccgtggtcatgtctgctcttagcaaggggcctaaatgcactttattattcacttagagttgtgaaggtactccttttaaagttggatgtctaccaatgtaaaaccttcttttgaaaaaattcctagatgttgggtaagacaaactaaaacctatgtctgaccatctttgctcatttggtaaagttgttgagaagctagaatgtggggctgcagtgggatggacggggaggacttgcctcctaagaagcctgcagtatagtataggcaaataagacttagtaggagttacataaggcagaggcagcagtgaaccctgagactgatttaggcatgcaggagtttggctgaataaaggtagcttaaggtctgttttgttttggagattggaggtggggggattagaaatgggctgctggagtagtctagatacaaaggtcagctttagggtggcgcgcggtggttctcgcctgtaatcccagcactttgggaggctgaagcgggcggacaatgaggtcaggagatcgagaccatcctggctaacacggtgaaaccccgtctctactaaaaataaaaaaagtggtggcgggcgcctgtagtcccagctgcttgggaggctgagacaggagaatggcgtgaacccgggaggcggagcttgcgctccagcctgggtgacagagcaagactccgtctcaaaaagcaaaaccaagcaaaaaaaacaaaggtcagctttggggaccagaaccttgtatggagtggaagtggtgaagctgcaacctaaagtagccgttgtagactttgaagtacatgaagaggaaaagtggtaacttgaaaggactgaggaaacattgggagtaaagagatttgaacatgtttataggtggaaattgagaaaagaaggcaaagattaggggtacgatcgggggcaaatgcccagaaggggaacaggaaggtctgctggggaagcctcaaaaacaagggagaggcagacccaggtctcagagagagggacagtgagatggaaagaatgaacgacagctgggcatggtagtctgagctagtagtcccagctacttggcaggctgaggcagaaggatggcttgagccctggagtttggttttaccgtgagctgtgatcatctcgctgcactctagcctgggcaacagagtgagaccctcatctctttaaaaaaaaaaaaaaaaaaaaaaaaaaaaaagctgcccaatgtctggtgcccttggcttcagaacacaaagtcatctgggtaggaacagtctgggaaatgagtagcctctcaaggtgggcaccagaataaagggaggcagaggagggtggtaagggagatccagttaactgtagtacccatggatttgctttcctgacctgggatcgacagtgtagcacagagtcctagtaggaagcaatcttagtttattggtttaattattttatgatataggtgtggcaactgaggccaaataatgcacctaatcatagtctgataatagcacagcagttaggattttatggttcttcaaatttaaattctatgattcttcaaattgaacaatgatctggacttgaaataattttaaaggcaacaaatgtccctgctgtactggactatgttttactgtctgtagaccctgaagctcaatatgaactacagaatacccaaacttgtattaatgtaaatcaagtgttgaggtttttaaaagaacactggagggaaaaactgaccagtaaaaataaaacatttcggtgtgagttcttcctttaggaagaggattggcaaatacttgaatttggcctttgtcccagagctcttatctagcagttggtaatcggaggtcttttactgtaatgcttcaattgctgataccgtatgtgcctactagggaatttctcttcaatgccattgaaacgatgccttgtgtcaagaagaaggcagactgggccttgcgctggattggggacaaagaggctacctatggtaaggagacccttgcccctacttaaacctgagcttcattttccaagtaatgttactggatttttggcccttgaataccaactcactagaatcatgttggtgttaactcctaaataggtgaacgtgttgtagcctttgctgcagtggaaggcattttcttttccggttcttttgcgtcgatattctggctcaagaaacgaggactgatgcctggcctcacattttctaatgaacttattagcagagatgaggtgagtctaagtcaaataatagggtgacctaaaccccaaacacaactcgggcatgctcttgtgttcactgacggggacctgagatgctagatggcatatatccacatttaatgtgtgagttcaaccatacacatacttgacaaaagaaggaaatactttcatttactgaaactgttttacttgcattctcaatatattgtaatacatttgtacatatgtattcccctataggctttgaatgcataaaactacaagttctttgttttttgaggtgacggaatcttgctctgtcgttccaggctggagtgcaatggcgtgatcttggctcactgcaacctctgcctcctaggttcaagtgattctcccgcctcagcctcccaagtagctgggattgtaggtgcctgccaccatgcccagctaattttcgtctttttatacagacggggtttcaccatgtttgccagactggggttgaactcctgacctcaggtgatcaggtgatccacccgcctcggcctcccagagtgctgggattataggcatgagccaccatgcccagccaaaactacaagttattgatgggattgggattttaagggatgttttattatttttgcctggtattaatatgttatccctttttccgtaaaaatgttcatagtagagccaggagcggtggctcatgcctgtaatcccagcactttggtaggccgaggcgggtggatcatgaggtcaggagattgagaccatcctggctaacacggtgaaaccccatctctactaaaaatacaaaaaattagccgggtatggtggacgtgcctattgtcccagctacttgagaggctgaggtaggagaatcgcctgaacctgggaggtggaggttgcagtgagtcaagatcacaccactgcactccagcctgggtgacagtccccccgaaaaagaatgttcatagtagccattatgtttctcctgtttgatctagaaattgcccctctacttcaatattaataagcatttcaatgaaatgagtatacattttggtctagtgtatgtctttgattaagtcacatttgaaaagccaggagcatgaactccatcttacttggagcccagtgggcaaatcaaatatggttaccttgtaggagggccttccttactggattgggagataagctgtgaagcttgatgtttaatgcagtaacttgcaaacttgatttacttgaaattgcatacaaatttcctgagcatctaaaaactagccttattactgagctttgcctttcctgctgggagtagtggcaaaattagcactcatggctgtagaaagatcactgagtgaagctctgactcctcctttgccaacacacagcagagcaagaaatacaccttgcctgtcttcatctaggtggcaactttgagggtcttgaatgggactgagcttgccttggtagtgacatcagcagagaagtcagtagttgaagtcatcttccctttgagagttcaagtgctctcagtatggctgagcatgttggataaggagaatgcagaaaaggacaaagtaatttcatattccatgttaatgacagaagtcttctggctttagtgatcttgaacttttttttctagggtttacactgtgattttgcttgcctgatgttcaaacacctggtacacaaaccatcggaggagagagtaagagaaataattatcaatgctgttcggatagaacaggtaaagtgggtgatgaaatgggtcactcaagcttgctagaaaatgcctgtgctttagttgtattcagaagctgtattttggttcctaggagttcctcactgaggccttgcctgtgaagctcattgggatgaattgcactctaatgaagcaatacattgagtttgtggcagacagacttatgctggaactgggttttagcaaggtaaagtattgtttacatagccttttgcttgttttgaagctggtgctctgtatttatatcttgatgtgaaccttttcaggttttcagagtagagaacccatttgactttatggagaatatttcactggaaggaaagactaacttctttgagaagagagtaggcgagtatcagaggatgggagtgatgtcaagtccaacagagaattcttttaccttggatgctgacttctaaatgaactgaagatgtgcccttacttggctgattttttttttccatctcataagaaaaatcagctgaagtgttaccaactagccacaccatgaattgtccgtaatgttcattaacagcatctttaaaactgtgtagctacctcacaaccagtcctgtctgtttatagtgctggtagtatcaccttttgccagaaggcctggctggctgtgacttaccatagcagtgacaatggcagtcttggctttaaagtgaggggtgaccctttagtgagcttagcacagcgggattaaacagtcctttaaccagcacagccagttaaaagatgcagcctcactgcttcaacgcagattttaatgtttacttaaatataaacctggcactttacaaacaaataaacattgtttgtactcacaaggcgataatagcttgatttatttggtttctacaccaaatacattctcctgaccactaatgggagccaattcacaattcactaagtgactaaagtaagttaaacttgtgtagactaagcatgtaatttttaagttttattttaatgaattaaaatatttgttaaccaactttaaagtcagtcctgtgtatacctagatattagtcagttggtgccagatagaagacaggttgtgtttttatcctgtggcttgtgtagtgtcctgggattctctgccccctctgagtagagtgttgtgggataaaggaatctctcagggcaaggagcttcttaagttaaatcactagaaatttaggggtgatctgggccttcatatgtgtgagaagccgtttcattttatttctcactgtattttcctcaacgtctggttgatgagaaaaaattcttgaagagttttcatatgtgggagctaaggtagtattgtaaaatttcaagtcatccttaaacaaaatgatccacctaagatcttgcccctgttaagtggtgaaatcaactagaggtggttcctacaagttgttcattctagttttgtttggtgtaagtaggttgtgtgagttaattcatttatatttactatgtctgttaaatcagaaattttttattatctatgttcttctagattttacctgtagttcatacttcagtcacccagtgtcttattctggcattgtctaaatctgagcattgtctagggggatcttaaactttagtaggaaaccatgagctgttaatacagtttccattcaaatattaatttcagaatgaaacataatttttttttttttttttgagatggagtctcgctctgttgcccaggctggagtgcagtggcgcgattttggctcactgtaacctccatctcctgggttcaagcaattctcctgtctcagcctccctagtagctgggactgcaggtatgtgctaccacacctggctaatttttgtatttttagtagagatggagtttcaccatattggtcaggctggtcttgaactcctgacctcaggtgatccacccacctcggcctcccaaagtgctgggattgcaggcgtgataaacaaatattcttaatagggctactttgaattaatctgcctttatgtttgggagaagaaagctgagacattgcatgaaagatgatgagagataaatgttgatcttttggccccatttgttaattgtattcagtatttgaacgtcgtcctgtttattgttagttttcttcatcatttattgtatagacaatttttaaatctctgtaatatgatacattttcctatcttttaagttattgttacctaaagttaatccagattatatggtccttatatgtgtacaacattaaaatgaaaggctttgtcttgcattgtgaggtacaggcggaagttggaatcaggttttaggattctgtctctcattagctgaataatgtgaggattaacttctgccagctcagaccatttcctaatcagttgaaagggaaacaagtatttcagtctcaaaattgaataatgcacaagtcttaagtgattaaaataaaactgttcttatgtcagtttc

SEQ ID NO: 239 - DNA, 8183 bp, Homo sapiens
  source 1..8183: mol_type = other DNA
gaagccgggggcgggggccacgcgtggggcaggcggtgctcggctcggctgacgtcggcccgccggcgccccaccagctccgcgcgggcccgggttggccaccgccgggcccccgcccctcccccggcggtgtcccggccggaaccgatcgtggctggtttgagctggtgcgtctccatggcgacccgccggtgctataagtagggagcggcgtgccgtggggctttgtcagtccctcctgtagccgccgccgccgccgcccgccgcccctctgccagcagctccggcgccacctcgggccggcgtctccggcgggcgggagccaggcgctgacgggcgcggcgggggcggccgagcgctcctgcggctgcgactcaggctccggcgtctgcgcttccccatggggctggcctgcggcgcctgggcgctctgaggtgagggactccccggccgcggaggaagggagggagcgagggcgggagccggggcgggctgcgggccccgggccccgggcacgtgtgcggcgcgcctcgccggcctgcggagacacgtggtcgccgagcgggccacgaccttgaggcgccgcttcctcccggcccggggttctcccgcggctggataagggtgatccgggcgcctcgttctgcccccgtcttcacagctcggggctggaggggcctaggggagacccacccggagaccctgcggccccgcgccggcctctttcccaacccttcggcggccgcgcgctggccggggagccgttggggaggccctggcggccgcgcagcaggtgcaggggcgcagagcccgggctcgccttggtacagacgagcgggccccggccttggcgccttcagtttccttccagtttttattttcgctgtgtctacagagcagatgacaccaatttggaaacccgcgagagtgggtagagctaagatagtcttgctgtagtagctgtgatattagatgctcggccatgacttagaggtgtttatttaaggactgtgaatgactcggtgatttcggaaaagcttggcttagatgaacggacatacacaggggagacagccctaaggtttgcagaaaaggctgattgtgctgtttgcgaagtcgaaataattggtgaaagtgtagaaggcagaacctctcaggaatgtctggggaggacaaagaatgtgttggctgactttgtttaaacataaaattgggcagactttaattgatttgtgaaatttttttcaaagtttgtttgaattagcccctatctcttctaacattatcctcttgtgctaattgattgaccattttaaataacttagctgttacagaaagaccgaaaggtgttcttcagtaaaatatattcaagtaagttacttaagtaacgccttaaaagatacagaaaagcaaaaaagtattggcgtattaaaaagaaatcaaaactttccaagtttaggcctgaacattgccttaaaaatatttaataaggcctcaaatgacccagtccgagactgcatgagcctatttattattaaattgtaaatattcttcatataaacaaaaatatataaccatgtctgtaacaaaaatggttttgctagcgttgttactctcttcccttctccgaggggtgatttaggcaacttcggaggttgacaatgccaagcagtcacaatagatagagctttaaagcaaattctatgcatgggtttggatttatgacaggcccgtcaccctgggcctgtcatagtaccccatgccagagcaaactgtgtccccgaaccattgcctggcctctgtgcccgtaggctgctggcactgaagtgggttgcacagtggaaaagaagaaagctctacctggcagaaatttttaaaggttaaaataaataattttaagaaagctggttcacaaggtgccacatttgatgaaagcaaaatacagtggcttttattgttactagagtgatgttcttgcttgtttttcttttttggtgaagttagccccaaattattctcatagctaagcaaatacgagagtgactgtaaggacagttggcattcccggaattgctaaacttggtaggcaacgctggtttaagaatactgagttctagccgggcgtggtggctcacgcctgtaatcccaacactttgggaggctgaggcaggcggatcacctgaggtcgggagttggagaccagcctgactaacatggagaaacgccatctccactaaaaatataaaattagccaggccccgggtgtggtggcacatgccggtaatcccagctactcgggagactgaggcaggagaatcgcttgaacccaggaggcggaggttgaggtgagccgagatcatgccattgcactccagcctgggcaacaagagtaaaactctgtctcaaaaaaaaaaaaaaaaaatactgaattctgatcaggtaacagcaactgtaatacaatgtgataagttgacttgaagattacagtttttaagaagtatatacccagctaatacatgaaaattaactcgtaaaatctcaaatgctccagacatttccatgatgcctgttggtcagtaaaaatcattctaagacttagtggaagtaggaaatgtttgtatggctgtgtataaaggctataatgtaatcccagcactttggaagaccgaggcgggtggatcacctggggtcaggagtttgagacccacctggacaacgtggtgaaatcctgtctctactaaaaacacaaaaattagccgggcatggtggcaggcgcctgtaatcccagctgctggggaggctgaggcaggagaatcgcttgaacccgggaggcagaggttgcagtgagccaagattgcaccgctgcactccagcctgggtgacagcgtgagactctgtctcaaaaaaaataaaaaagtctataatgctattttaagtttctaaggaactgaaactgctctgaaataaatcagaccattataagacttttttccatatcagtgagctaagtgcagataagcttctgaaacttgcatgctagatttttttggtacaaatatttgaaatgcttagtgtgctgccttggaaaaacctggtattttttgttgtgtccttatactgccaaggtttatggaatcatgtaccttatgcctagtaataattaggatgaccaggccagtgagtggttcatatccggggcatgattagctctgcgtgtgctcagccagtgccccatcttcaactcgatgtgttcctaaggtagacagcaaattccctattttatttctcagattgtcactgctgttccaagggcacacgcagagggatttggaattcctggagagttgcctttgtgagaagctggaaatatttctttcaattccatctcttagttttccatgtaagtattcagtttacatttatgttgcaggttaatcttaagaattgtattgctaaggcttctaagtgaatttctccactctatttgcattttgttgcatttcagaggaacatcaagaaatcatgaacaactttggtaatgaagagtttgactgccacttcctcgatgaaggttttactgccaaggacattctggaccagaaaattaatgaagtttcttcttctgtaagtatatgaggcccatgctggcagtgcagctgagagtgccaggcaagtggaaaactttggcaaggtctaaggaagagcaatgaggcttacatgtcttgttatggaatgtagaaattaattcactggtggtaaattaatagtgataatggtgatactcatatcagtggctagactcaaaagagcaggattcattgtgactgatgggaatgaaggtcgctggctattggtgtggtgtgtggtgaggctgctagtgagtcacctgtgaccactcttgtttcaggatgataaggatgccttctatgtggcagacctgggagacattctaaagaaacatctgaggtggttaaaagctctccctcgtgtcacccccttttatgcagtcaaatgtaatgatagcaaagccatcgtgaagacccttgctgctaccgggacaggatttgactgtgctagcaaggtaagcgatagcagcaggcctcaaaagcgttgtataaaatgggcctggtattccccacgaggcagatacaagttgtgttttttgggcaataaatgctcactaaaggcaaatggggcgggggggtacatgacaacttcccatgcttttctgtttattccacgtgttaagccacatatggatagcatgacaccactcttctttttcagactgaaatacagttggtgcagagtctgggggtgcctccagagaggattatctatgcaaatccttgtaaacaagtatctcaaattaagtatgctgctaataatggagtccagatgatgacttttgatagtgaagttgagttgatgaaagttgccagagcacatcccaaagcaaagtgagttattcccccatctgagggcaagatcgggagcataagatatgtggattcttatcaaacaaacttaaatttctgattattatatttctatactttagtagaaagtagttgaaacccccattgagtcatgaagcctgggactcaaactacagaatatatcagcgacagtatttagaacaggattgtttttattttaattgtggctataagtgaacatctatcatgagacatttgctgcactttccttgcttgtaggttggttttgcggattgccactgatgattccaaagcagtctgtcgtctcagtgtgaaattcggtgccacgctcagaaccagcaggctccttttggaacgggcgaaagagctaaatatcgatgttgttggtgtcaggtgagattttggtgggatagctagaggtcaagacattgaacagtttgagttttacaggctttctcctagtgtttgctattattttaagaaatactaagacacagtgtctcgtctctttattttaccccagcttccatgtaggaagcggctgtaccgatcctgagaccttcgtgcaggcaatctctgatgcccgctgtgtttttgacatgggggtgagtatacgtgaccctgttagggaagggcgggacacaactgacaataactagtcttaattctagagttaactttttatggcagttggttctgtattacatgggtttcagcctatctgctgcatacatttttgttattagctgtggatctggctgacttattttcttgattctaggctgaggttggtttcagcatgtatctgcttgatattggcggtggctttcctggatctgaggatgtgaaacttaaatttgaagaggtaatttagaacaaaactgtaatactcagtagccgttctaataaattcctttttggaatatttcaaaatttaagtgtcttaactaataccacaatgggctgaagtgtcttggtgtgatattttgagtgatttctttgtgctgtctgacattacacttgataccatttggttttctaaagtgtgaatcagctttcccagaagtcttggataattggttacattggaaatcatggctcacacctgtaatccagcacttggggaggccaaggtggtaggatcacttgagcccaggagtttgagaccagcctgggcaacacagtgagaccccatctctacaaaaaaaattttaaaattagcctggtgtggtggcgggcacctgtaatcccagctacttggaaggctgaggtgggaggatcacttgagcccaggaggttgaggctgcagtgagccatgatcatgccactgcactcagcctgggctacagagtgagaccctgtctcaaaaaaaaaaaagaaaaagcatgttgctgtgggcttcctagagaatatgctgactgtagcacatcatcaccccaaatgtgctttgctagacctatgcttcctctccttaaaatacttgaaatgtttagtcacttaggaagttaagccattatattggtgcttgaatttataaaatatatccacatggtttgttaaaatcatgacgtaggcagaataggatttttatcctgttggcatgtatttgttaaaatgttttgacatcttgatgccttcctaggtagtagttagttgcgtactgttctttgataaaaatcatacccataacatcctaaaggagatagggtgcctggaggggaatgaaaacgagccacctgggatatgtagcctggttttcagggagatgttgatgtttttttgcttttgttactttaatgataaacctgtctgttgatgcctggtctcatgatgtcatgtcacaaggccctgtgatgttactcccccatgtgaatttcccacaatgaaggctgctctttcttttctgtttcactctcttagatcaccggcgtaatcaacccagcgttggacaaatactttccgtcagactctggagtgagaatcatagctgagcccggcagatactatgttgcatcagctttcacgcttgcagttaatatcattgccaagaaaattgtattaaaggaacagacgggctctgatggtatgtataaaggacgaatcacttcatgtataactgaaagctgatgcaaaaagtcattaagattgttgatctgcctttctagacgaagatgagtcgagtgagcagacctttatgtattatgtgaatgatggcgtctatggatcatttaattgcatactctatgaccacgcacatgtaaagccccttctgcaaaaggtaatttctgagcatactgtataaaacaattaagaggactggtcacaacacgtgtaattaagtagtacttcctctctccgtctctttatatagagacctaaaccagatgagaagtattattcatccagcatatggggaccaacatgtgatggcctcgatcggattgttgagcgctgtgacctgcctgaaatgcatgtgggtgattggatgctctttgaaaacatgggcgcttacactgttgctgctgcctctacgttcaatggcttccagaggccgacgatctactatgtgatgtcagggcctgcgtggtaagtaagccatgcatgttgatggtgctgccaagaataggcaccttcttggatgtgtgcttcttgtctagacgaataagaaattgtcttgcctaagattaaatatatatggatatttttcctaagaaaagttttagaaaagactgatgagtgtatttctatgtaattggaatatatttaagttcatgccatgtgtcttgtggtttccttattaccaaaacggtgactgaagaaacgcttgctttagaaatacattgaattggccaggtgtgctggctcacacctgaaatcacaacacattgggaggccaaggcagaaggatcacttgagcccaggagttcgagcctgggcaacatagtgagaccctgtctctacaaaaaattaaaaaattagttggccatggtagtgggcgcctgtagtcccagctgcttggctaaggtgagaggtttgcttgagcctgggaggttgaggctgcggtgagctatgatagcaccattgtattccagcctgagtaacagagaaagaccctgtctcagaaaaaaaaaaaatacattgaattgtttcctgatgggaagtaaatactctcatgcccagttaggagtgagtcagggtttttaatatgccactttttctttctcaggcaactcatgcagcaattccagaaccccgacttcccacccgaagtagaggaacaggatgccagcaccctgcctgtgtcttgtgcctgggagagtgggatgaaacgccacagagcagcctgtgcttcggctagtattaatgtgtagatagcactctggtagctgttaactgcaagtttagcttgaattaagggatttggggggaccatgtaacttaattactgctagttttgaaatgtctttgtaagagtagggtcgccatgatgcagccatatggaagactaggatatgggtcacacttatctgtgttcctatggaaactatttgaatatttgttttatatggatttttattcactcttcagacacgctactcaagagtgcccctcagctgctgaacaagcatttgtagcttgtacaatggcagaatgggccaaaagcttagtgttgtgacctgtttttaaaataaagtatcttgaaataattaggcattgggacgt

SEQ ID NO: 240 - DNA, 32744 bp, Homo sapiens
  source 1..32744: mol_type = other DNA
agaacccctcagggcctcagctgaagctcagacagagtgcctgcgtgcgcgcgcacacacacacacacacacacacacaacctaattttcaacacacttgcacaaatatagaaacatcatggggaaaaatgcaaaatacctatgatttctggaacaagatccaagatgacaaagatattccctgcttattctgctcatgcccgggctcccctgcccacccccagtgcgttcatgtgatatcatgaaaaagcagcaggggtggcatgaacttgcacaccaggctgcccaggcttgagacccagctctgccacctagaagcttggagcccctgaacaagctgcaattctgtgcctgggcttttctgactgcaaaatgaggataatcacagcccctgcctccaaagtgtcccgaggatcaaatgagttgatgatacttgcacggcgctcggatcgtggtaagtgtgctgcataagtgctccttaaatcaccatctggagtttccataccaacctctccctggcttcatcttatttttttctccccctcatttttattcctctctgatttcctcacgtatgttttttaatcttgtcatattgagtgcatctttgcaaactgcttctaattcttcagggaactaaatgctgtgtttcgtgctctcttttccccgtcgcctccttgaatatttagtaagtctttgtgaggacgtcagcccctccctgctgggctggtggtgtcctgggtaagggggccgtggccgccatgggagcagcacacaggcccagcttgctgggggccgcactcatgggaaacagagaggggtgacagtgagaacagaggcagggacagagccagctccttgatcctgctgcccctggaagcttctcctcccagcatcaagcccaggcagatttggggttctgttgtttaggagacgtgggatttccttgctgtaagtgggacaagtatcatcactgttaaccatcatgaatgagaatgaaacagaatgagaagacaaaaagccagaaagatgttctcattcctctgtgctcacacagctcatcagagagggttgaggcatgggaccccacgttctaaccccaaggagtccccataaccctgtctgctaccctgagacacaggtcccttcttgctcacatgaagtaagccatctatttttttttaatccccatagaacacaagcggcaatgaaaagacacaatataaagaaaaggttaagtagatcagtggttgccaggggtaagcgaaggggaagattggcacaggtttctttttgaggtgactgatgaagtgttctggaattgctgggggggttacacaaacttgtgaatacgctaaaaacaaccaaattggacaatttaaaagagtgaattctatggcatgcgaatgatctcttaattaaaaaaaaaaaaaagcctgcaaaagtttcatttaaaaccacagaaggccgggcacagtggctcatgcctttaatctcagcactttgagaggccacagcgggctgactgcttgagttcaggaattcgagatcagcctgggcaactttgtgagactccgtctctaaaaatagatacataaataaataaataaataataaaataacaccacagagcccaaagccccagacccatcctagacaaggatgctccaggcctgacgttgccagtgtctgcagcaggccatcgtaggacctgagtgtgccttaagggagtgtgggatctgtggctgaatttcaggaagattcagcttgtatttcttacatgggaaagaccctcggaaaagtaggggttgatctcccttccccttcatcactggtggtggcacccccacgggcacctagtgaggccaataggatcatctcaggcaccaaggtactccacggtctgaaagtatttttttttttttgagacagagtcttgccctgttgtccaggatggagtgcagtgtggctcgatcttggctcactacaaactctgcttcccgggttcaagtgattctcttgactcagcctcccgagtagctgggattacaggcgcccgccaccacgcccagctaattattgtatttttagtagagacgggatttcactatgttgcccaggcaggtctcgaactcctgacctcaaatgatccgcccgcctcggtctcctaaagtgctgggttacaggcgtgagccaccgcgcccggccccctctctaagtattgtgatttcataggatcccctggcggtcccatgagggagacagggccacagccactgtccccatttggcagctgagtgaaggtggagctcagaggtggatccaaacccaggctgggtttcctcgtgggtcggagatgtctgctttacttttattaaaacatcgtcccgatctggcacacctaaagctgtgtatccgagtgtgccgggccggctccctgggccccacctgccttcaggcctccagctcttgcctgcagcgacccctggtgggtgcgccggcctcgtcacctccaggctggggactgggcttccccggaggccgcacctggaaggaatacgccccggataaggcccgcgatggaaacggaacccggctggctcactgccagcggcctggtcaagaaggcgggctccggagcccgactgccgggggtacttgcccacctcacccgcctgccagccctgtgtccctggagtccccagcctttccaccatctcaggcctgggatggaaacagcacttcctgcagatggcttgggaggcctggaaggacggttcaggtaaagtgcaccgcccggggccgagcagcggccacagtacacacacaggcgctggtgctgctccttgctgtaggcccgccccacctgttcatgttcatcaacccacgctatgaaattagttcactctacgccaggcacagtggctcatgcctgtaatcccagcactttgggaggctgaggcaggtggatcgcttgagatcaggagttcgagaccagcctggccaacatggtgaaaccctgtctctactaaaaatacaaaaaattagccggacatggtggtgcgtgcctgtaatcccagctactaaggaggctgaggcaagagaatctcttgaacttgggaggcggaggttgcggtgagctaagatcacaccactgcactccatcctgggcaacagagcagactctgtcaaaagaaagaacggaaggaaggaaggaaggaaggaaggaaggaaggaaggaaggagggaaggaagggagggagggagggagggagggagagaaattagttcactccacaaacacatcaagtgtcccttgtgtgtctgaggcagggaagggaggagacctgcctcttagtgttcataacaaagaaggacctggaccctcccaggccacaggagcctcggcctgcatccaggccacaagggtttactaagcaccctgtcagtcctgccaggcgctcagggaccaatgagatcccacctctgggagtcactgcagcccagaggggtgaggggcagtgccacagagaggccaggcctccgtggaaggagggagggagggtggccagccccagggagggagggaagcctcacaggagaagggcacacgtgtccagaatgttccctctccacagagagggtctttctctccaaagcacactgctgcaggcagcatccgtggcccacatagaaagaggctcgcctttgatccagcctgagaggttcccttttttgtctctgctcagaagcgcagcctgaaaggagagtgaggcactgcctccttttgaaatcatgcaattgctgctgagaccccaaagaaagatacaaattcactgggatctttccccagatctgcgttgctctcactgtagaagctgttgggactttgcaacagtatttagaaaacacctaatgcccagtttaaatcttcttcagaagtctggggatgggggaagggagaggaaattattttagaattccgcttccgtgtggcaacatccaaagataagagaaacacagagagcactggtgggacctgggaggaggcaaagatttctctaaacaagcgtctggggcttccaataaccagacactggctgccacttcagggtcttggcacctcgagctccaagctccacttccagacacttgatggcttccagccctggggatgtcatttaacctttccaggctcgatgtccacatccacttaacttcatacatctccctgcagagcccactatacagcaagtacatgccctggaatccaggccctgcctccgggagttccaatctgtgtatgggtataagagggatgtgtctctattcataggggcttacaaggctggtgccaaccatactggcactctggaaacttctgagaaggggctcaaacatgttctgaggagagggcccagccgcctctacctggcagaagtcagggaatgagcccgctgtgggtttttgaggttctgggggccactccccttggctgtgaggcttattaccccactgtggtgatggactgaaaacccccagagggggtggggacacaccaagctcagagacacagcagcaaagtgggggcctgagaaagctgcctcccaggcctgctgatcgggaaattccaaacgggaaaggatgattaacaactgcgggagccggaggaggggagaggagagggaccggacagggaaaaagaccccagatcctgggcctgcccgagggcaggagccagcctggccaaagtgagactagaggccacacagacatgggccccttccgcggaactggcctgtcgagggagcggggctgtccctgacacagagcctgggctctacatggacacctgtccaggcaggggaggggatgctttctgactgctctgcctctgggaaatggggactcctggcctttctccatgccccaatatcatctgtgagctccctcccacccatcacttggccttttaaggagagtgaccccagagggctggagttctgggagcctccagagtcccggcttctgcgggtctcagtggctgggggggcggggggtgggaccagcgctggcctcgaccttgccttttctgcgtccgccaaatgtccctgggggcccaggtgatcctcaccgcctccttaccctgttcctgtggcaagccacagcctggcctccaagccagctgcccctcccctcaggagatgcctcatctggggtcgccctcttctgccctggacccgacctcctggaaggaagaccgaggcgggagatgctgactgcaggattcagccagcccagggcctgagcctgggcccttcggtccaccacagccccgattttttagtgtaaatattgtatctaagtacagcacatacagagaaaagcgcacgagtcctgagcgcacagctcaaatcccacacgcatccccgcagcagcctgcgcagagcaagggcagagcgcccccttgcggtcacttcctgtcactactcaaccgagggtgcccgctgcaaggttaggtctcctggcctcgtgcttcaaacaggaattaatagaatcccaccaggtggtgtttgtgaggcgtagatggcgaggatatctgcagctgcagtttgctcattctcacggctgcactgcattgcactgtgtgagcagaacacaatttatccttccactgctgatgggcatttgggcggtttgcagtttgggatctggccagttctgctgttgtgagcattcttaagcctgcctttcggtgaattcacacgcccgtggggtgagtatgtgcctggggttgggatgctgggtgggtgtgttccagttcaacattgctggcaggattgttgtctatttcactccccgccatattccaccacctcgaattgtgcctggaatatcataggtgctcagtaaatatctgttgaaatgaattctctcctctttttttttttttttttttttgagacagggtcttgctctgtcacccaggctggagtgcagtggcaccatcatagctccaggggaccctggcttgcccgcctctgccctcagcgcccagcagagagcctggcacatgaggagagagaggtttgaggggagaggaaggagaggacattcacaccccatgactggctgcccaaggcaggacagcaggggtccaggaaggtggctgggaggaggaggatgactacggccgggagctgggttccgcttggaaactgcatcctgtcaggccctagaatctgtcagacacacaatcacgcgatgaaggagacgttggtatcaattaactcgtgttcagtgaaggccaatcctgtccagtgagcagattacttgtgtctgccaggcagggtgtggaggcgaggggcacatcgtagctggatctgaaagctgcttattgcacccaaatcagcagctgacgacacctcccattcaggctacccagaggtctgaccgatgacctgcccctgccccaggatgtggggctgccgggtgaaacgcagtcttagcagctgcaagggagggctccagccaccatgccagaagaggcttacagggagaaggagccggagaagtaatgtgaccagtgccgctgattcttagtgagctgagcagttttgtcaggtgggggccaccctcagaaacaagccagcctgcgtttccccgagtcaagagagtgccgtagactacaatgtgcacgggcccgggaggagggcagcgccacagccctggccacggggtcaaggggaaggctaagtaggtgggggcaagtggtcacagcgctcatcaacgcccgccctatcacagtagactcatctgcggctccaagtgccaagggtgaggccaacccaaacccactgcagtcaaggaatcccggaaagagagaaggggggtctcaccagcggctggaagcagagcggagtccgctgcgctcccacaagggccctccccgccagcccctgtggctcagggacagtgaggggctgggccggtgcaggagggagctcatttctccctaggagggagacagagaggctaagtggggaggaactgaatgttctgaaaagctgacgtggccaagcgcccaaggagaccacagaagtgccccgtgtgcctcctgagccaccagccggcgggggtggcaccaggcagacctcagctccagcccactctgcgcaggtggagtccccgtgtgtccaggggcacagccacgcccgcgcagggggtgacccgagggcctggaggggcagttcagttcagctctaagtctgaggccacattctccctatttccttgaactaatttctcactttaactgaagacttaagtatctcctacaaaattgctttgccctcatgggctgggttttggattttatttttgagagagtgagctccagaaaacaacttagaatcctcttttgtcccttggctgcactccccaggccgccagggaggaaaggccctgctgcttcctgcaaaggctctgggtgccaccccatgtccctgcagacgcactcctgccccatagctgtgcccgcaggaaaaggtgcccgagagaaccttgaccctctggccagaaccaggcaggcttgcaaactcactgagttccaccagttcaaacacaagcattcagccaaaacaaatggagaactgataggcacggaggtccacagcatattattcacggatgcgttcattcattccaacattcattcattcattttcccaggccgtgctaggagctgggacacagcccagtcctggcccctgtcttgaagctgcgcacccacactggaggggcagacacaggcactgcttctacatgcgggtgcaaggaggcagtgtggagcaggagcggcccctctacctcccagggcctggggtgaggaagcttcctagaagggctgccatggcttaagggttgagtgtcagccaaggtagtggggggcagagaagcatcctaggcagagacagccagagagcaaagtcttccatgcaacacgcttgaagaacttgggcatggcgggagcacagaggacaagccctgccacctcgcgaaggcatgtggacttcacagtgccgccacggagaagctgaggtttgatttatgccacttttaggtggtcagagggactgtttgacccgacttctcatccttagaggaatccagggatggacttcagagctcacctccaaaagagattggaaatgtaatcacgtacagtgtcaatatgtacacctactatgtacccacaaaaaattaaaaataataattaaaaaaagaggctgttgcaatagcccaggccagaaattctgggacctgaactaggatttgtgtggagaggagaacatgccacttaggtttcaaatttggcaggatttggtgattgactcagtgaaaggcagaaaaattgtttctaatctccaccccccaacaccgtgccttctaacaagggcagttcctggtaaggacaggatcttttgattggagagcaaaaagtcaacacccttggttattatggcttttggccaaattataggcaatagcaggcaatggaaggaggaaaatgagagtctggagaagcagggcagagcccacctgctcaactaagagaggggacagggctgtgaggcacgggtgctcctgaagctgaagaagccaacagcgctgggagctgcctgggggcgggaggtgtccatgagccaggattctgggtatgagtggcccaaaagagaccctgggagagaggacatcaggggaacaaacagctgaggaggtgggcatgacacaaacccttctcccagcccagagcctctccaaaagctcaggccagatatcgcccttttcacaacaccgggtaagcagattctctcttggggaatgagaagggcacgaagacctgttgaagccagtgcaatcctggaaagtgcctggacagcaccccagaagagagggtgacctgggtcactgaagacggggtgggggataacactgttaacgtgatgatacatcagctgtccccagaccacaccagcatctggagtgaatgaagcgggcaccctagcaggcaaggaggaagccctgctttgctggtcatgcatcccaggcttccggagtgcccctgggaatttccgaacacatccatgcacttgtgacccgggggccagagccaggggtcatttggctttgtgccccctccaaagcaggggtttccagtgtagcacatttgtgccccaaattctcagaggtgttttattcgcagcgcctgtcctcagaagaatcagacatgatccaaagggggctggtaggggacactgagacagcaaggctgcaccatgcccagtgtcgcctgccccgcacaggctagcaggagactggcactgtgctgccccttcgtcccagctgccatctgcatgggcggaagagtgccctgggccctggtggtgcaaggagggcgggagacagaccctcgcattcctctggtctcagggtcgtgggcctgggtggagggggcacacaccctactggaacagggtgctccaggctgtgcccatggcctcgacactctgcacttcttaaaggggaaatgacaaacggcagcctgttatttctcttcctcaccctctgaaactacttcctgcccattgaatttctgatacattttaattgaaaaattgatatacagataaagcaaattgggggtaggttggaatgaatagttggagcacagaggatttttaggacagtgaaactactgtgtctgatactataagagtagatgtgtgtcatctccatctgtccagacccatagaatgcacaacaccaagtgtgaaccctaatgtaaactgtgggctctgggggataatgaggtgtcaatgtaggttcattgtaacaaacatgcgggctgctgcggtgtgggatgttgatagtggggaaggctgtgtgtgtggcagggggaggggttttatggggaattcactgtccccctcaactttgctgtaaacctaaaactgctctaatagactaaatgaagtctattaattttattacattgcattaaaaaaataaaaataaaaagattaaactttcacaaactttttttttactctagttctaaagaattgcaagaaaaaaaaaatttttttttttttgagacagagtcgtactctgtcacccaggctggagtgcagtggcgtgatctcggctcactgcaacctgtgcctcccagattcaagtaattctcctgcctcagccacctgagtagctgggattacaggtgtgtgcctccatatcccactaatttttgtatttttagtagagacgaggtttcaccatgttggccaggctggtcttgaactcctggcctcaagtgatctgctcacctcagcctcccaaagtgctggaattacaagtgtgagccaccacatccagcccttatatttcttctgaaaacctacactttcattaaattttcaatcactaaactttattagtatgtggcagacactgttgtagacagatgttgccagcacataggaaggttctcctctgttccctcatggaggcttcatcctagtgaagacagatgataaacaaataaatatgtaaataaggctgggtgcggtggctcacacctgtaatcccagcactttgggaggctgaggagggcggatcatctgaggtcagaagtttgagaccagcctggccaacatagtgaaaccccgtctctactgaaaatacaaaaattagccaggtgtggtggtgcataactgtagtcccagctactcaggaggttgaggcaggaaattgcttaaacccgggaggcggaggttgcagtgagccgagactgtgccattgcactccagcctgggcagtagaccaagacttcatctcaatcaatcaatcaatcagacacatatgaattctgatcagttctgaggagaaactaaacaccaagtttgatgaactgctcacccgggggcactgtcacttcagatcacctggtgtgagaagagcctgaagaggtggtacataagctgagactgcagtgatggaggcagcaggtcgtgccaaggcccgaaggcaggaaccagcctgttgtgtctgaggaaatgaaagaatactgccatgaacagagggaaagagggaggggtttgaggtgacgtcagaggcaggctcttaaaggtctgctcaggagggcagatttttcttctatgtcttataagaagccactgggaaaggttctgtctgtttaacagttttattgagatataatccacacaccatatgattcacccaattaaagcgtataattcgacctggcacagcggctcacgcctgtaatcccagcactttgggaggctgaggcaagcagatcacctgaggtcaggggtttgagaccagcctggccaacatggcaaaacctcctctctactaaaaatacaaaaattagccgggtgtggtggcaggcgcctgtaattccagctactcgggaggctgaggcaggagaatggcttgaatccaggaggcagaagttgcagtgagccaagactgcgccattgcactccagcctaggcaacaagagcgagactccataaaaaaaaaaatccattattcaatggtttttagtaaattcatagatatgtgcaactgtcctctcccaactcccagccctagacagccacaaacctactttctgtctctatagacttcctagttccgaacttgaatatgaaagtaatcatgtggttattttgagtctggcttcttccacttagcataatgtcatcaaggtcaatccatatcgtggcatgccactgcgcttccttccttttaatagctgaataatatttccgttgtatagcatggcacttttcgttcatccattcgtcaggtgatgaacatttgagttatttcagccttttgattatgatgaataatgttgctaaaacatacctgtatgtgttttgtgtggacatgtgtttcattttcttgggtagatgcctaggagtggaatttctggatcacatggtaactgttgaattatttgaggagctgttggactgttctctaaagtggttgcaccattttacattcccaaaagccggtgttggagggttccaatttctccacctcttcaccaacacttgttattctctgactttgattctagccaagccagtgggtatgaagttatttctcattgtggttttgatggacatttctctggtaactaatgacgctgagcatcttttcatgtgctttattggccgtttctatgtcttccttggagaaatgtctactcagatcctttgggcatttttaaattggttcttttgtcttcttattattgagttgtaatcattccttatacattctagatactagttcattaccagacatatcattgcaaatattttatcccacactgtgtgttgtcacttccttgatggtgccctttgaagcacaaaaggttttaatttgatgaattccaaattgtctatttctcttctgttgtccattggaaagttttaagtaggggagaggagtgtgaactaatttaaactttttcaagaatccataagagtctgctttgtggaaaaagaattttaagataccgtattagtcaggattctctagagggacagaactaataggatatatatatacagagagagagagagacagagagagagacagagagagagacagagagagacagagagagagaggagtttttaaaatattaactcacatgatcgcaaggtccaaaaataggccatctgcaggctgaggagtaaggagagccagtccaagtcccaaaactgaagaacttggagtctgatgtttgagggcaggaagcatccagcatgggagaaagatgtaggctaggaggctaggccagcctggccttttcacgtttttttccacctgcttcatattctagctgtattggcagctgattagctggtgcccacccagattaagggtgggtctgcctttcccaacccactgactcaaatgttaatctcctttggcaacaccctcacagacacacccaggatcaatactttgcatcctccaatccaatcaagttgacactctatattaaccatcacagataccaagagtgaaaatagaaagaccaattagaaacccaaatcaaacttgcttaaacaataaagatgatttcatatttcaataactggaatgttcagctgaaggacagtcttcagacactgatcaggtattgtctccatttctccgtgactgtttcagctctgccccgcttcagcttcatccccacgtgggttttcctcatcttgtggggtagtttccagggacaacagggatccatgcttctgcccaagcaaatgccactcttctagccattgaccaaagtccagagcttcactctgattggtttatgtcacatgctcaccctggaacaatcactgtggccatgtgaatgccactggccacttggcttagtggctattgtggtgacaaaccccttcctgagccaataactgtggcaagggggatagagttctgccagctggacaacgctgctagaatccacccagggttgctacacaatggggaggggcagcagaacactcgacaggtgtcatcggccacagacatgtaatcacggaatgtaagctgcccccagggatggggcataaccttgggcacagcagctctttttagccaatggaaggacacagccatgaagcaacagcagtcaacactccccatgactggaggtgtgagtgtctcctcctgaagcagagtctgggctacataccacagcatccactacagtatggaaccaacatttttgactctgagatggctatctgcctacaggaggtttactggagtgtgctcttggcaatgacaccaacaaggaggtggcaaaaataaggttgggtaagagaagctaaatcataaagctgaatcatgatgtgggtgcttacaagggcctcagtggacccccatgggaagcttaaagctgggaagggccttcagggttgtcccgaattgagaaaaggagggcagtcctttgtatccccaaatctatcagtcatggaatgtaagctgcccccagggagggagtataaccttgggcacagcagctctttttagccaatggaaggacagagccatgaagcaacagcagtcaacactccctatgactggaggtgtgagtgtcccctcctgaagtgggtctgggctacacaccacaacatccactacagtacagcactaacattgttgactctaaggggctactgcaaaagtccacatagccatttggaaccaaggtggtggcaattgtgagaaagtgggaaaaatgtcagcagattttgaatatgttttggtgctcgaattatcagaaattgccaaagaatgttgggagctggtgatggaaagagaacccaatgagatttggggcttgagcaattggattggtggtgtcattgatacagatgacaaagtgttcgctgagcacctaggcactgaatagagatttatttccttcttcttaaccctctcccactttattcagaagttcatatgagccataacaaggattggaagaagttttagaagtaacctcctgggagtccatgaattagcagcagtgagaggctagaggcctgacaaagaattgagaagcagctgctatatcccaagtggcaaatgccagtgtggatggagaagagagagcttcattctgtggcaggaaagcttggctgctgacaatgagactgcacccttgggatttgtcccttggattctttagcatctgagctctaacctctgaaacacaagaaaaaatgagcaaggtgatttgtccaggccacctctacttctggagaaaggagtcatagcaaatgatccaccactatctagtccctgagtggatttatacaaaccaccccgaagacactggggtactctaagattggccccagataagccatggggatacagcacagaaaaactgtccatggccaatatcaaagatgcagctggagaccaggcatcatgggaggttcacaaaggggaggccttgtcttgtccgcaggaagctgcgctcacagcttgtctcctcagacttgctagagaggcaacagccataacaaaggctcagacctcacttttggagtggccaccatatgttttggttttagctttgccttgcaaattgtttagtaaagccaggccagaacatatacccaaatgctactgcaccgatcccaagctacctgtttgacttattagatggtatagagggtgaagatattatcactctactaagtgcctccttatcaatgagtcccactaaggagcacgagcccacttatccctgtttgcagtgctacattaaaaatcatttatgaggccaggcacggtggctcacgcctgtaatcctagcactttgggaggctgaggcgggtggatcacgaggtcaggagatcgagaccatcctggctaacagggtgaaactccatctctactaaaaatacaaaaaattagccaggcatcgtggcgggcgcctgtagtctcagctactcgggaggctgaggaaggagaatggcatgaacccgggaggcggagcttgcagtgagcctagatcgcgccactgcactccagcctgggcaacacagcgagactctgtctcaaaaaaacaaaataaataaataaataaataaaaatcatttatggctgggtgcagtagctcatgcctgtaatctcaacactctagcaggccgaggtaggctgatcacttgagcccaagagttcaagacaagcctggacaacatggtgaaaccccatctctacaaaaatacaaaaattagccaggcatggtggtgcatgcttgcagtcccagctactcgggaggctgaggtgtgaggatcacttgagcccaggaggttgaggctgtagtaagccgtgatcataccactgcactccagcctgggcaacagactctgtctcaaaaaaattttttttttaattttaaaaatcgtttatataaggctgggtgtggtggctcaagcctgtaatcccaaaactttgagaggctgaggcgggaggatcacttgagcccaggagttcaagaccagcctgggtaacatagtgaggtcctgtctctacaaaaaataaaacattagccgggcatagcagcatgtgcctgtggtcacaattacttgggagcctgaggcagggggatcacttgagcctagggggtcaaggctgcagcaagccataactgcgtcactgcactccagtctgggtgacagaatgagaccctgtctcaaaaaaaaaaatcatttattattgcccttggatagaatctttaaattcacagaaacacttacaaccctatagaaggagaagtgctgaattgtcgaattctccaacaatgcttcctctttctagatgtttgctcagcatcaattcagataccgctgaatagaaggcaacacccaaccacacagccagaggcctcctgggtaaatcggggactgctctcctctgacccctctttctcctgcctctaccccttggcttcacagcaattattcattttttaacactcaaatgctgggtacctgttgcctatgtcggggcacgctgttactccctacacacaggtaaaattgattaaccgaatcttgccctccactggcttactgtgcaacggtagagactggaagcaacagacgagggtgagctttggaagagctgatgaggccatgattaatttcaactgagaggtaagagagggggaaggaaggaggtggatttcagctgggccataaaggatgggcaatatttcaacaacagaaaagtgagaagagggcattccaaatctccgaaggctgttttaaaacacgacctgaaaattctgtggccatctcctcactgggaggtagaatccacccccctccccttcgtcctgggcccaacgacctgcttaaccagggtcagtttccaaacccaggtcctgaagtggcagcttcctcttcctgactcttaggacgctcactctcagagcacagcttccagaggagagaagatacccccagcatccatgagaagagacctccgggagaagcttgtgtgggtgtgccgaccactggccccagttgaggtcccagccaacatcagctccgacttccagccatgtgagtgaactggcccagctccctggcttcgggccaccccagctggtgccgctgatacaggaggtagaaagaaattatttagacagatagtgaggacaaaagagtcctcgacagaacttcccttctaacaaaaaacagctcaagaaattatttttttcctaacgaagaatagcctgaaaaatcaaactacagacacagataaacaaagacaactagaaaaactagaaacttacacaggggaatgccaacgatgacatctatagaaacgaggctacctgggggctggacatgtccaccatggaagctccatcttccccttctttgttaacacgtgtacagtaaaaaagaaatgggcaacatgacaatttagactgaaaacacacctgtaataaaatactggggtgggggttgccagaaatgtacaccttatacaaatgacacacctggtcctaatcaatttttcatgccctctgtagatcagacaccacctccccagcgactcatctataaaacaccccacatttaaccacagatcaacaacccatttttccgggacccccttctataacagagagctattctctctctttcatctattaaacttccgctcttaacctaactcttcgtgggtccacgtctttaatctccatgaccatgagacaacgaaccacaggtattaccccagacaatgaggccacttcactatgccaagaacacctctggacttcagtgtctccctcggtaaagtgagactagtcatatctaactgcagggctgctgtgaggattaaacgaaacacaacacatggtggccccatctaatagagaccagcaggacaaacctgcagaccagcagaggcgggcttctcggatcactgcaacaagagagggcacctcagaggacccatggggcaactctaaccaagcaagccaacaggattaccatagggtgttggagaagggaaagttgtaggtaagatttaaataaagcagtgtttaataggctcaaagcaaaacacaactgtgtataaaggaattacggtcagacctgggctacgaagtggatggaggttcctctttccttggaaatgatgaagttaagacaaatgtgcaatgttgtgtccagaaggccctgggttggaaatcaaggcagcttctcagtgttaagatgacccaggtccttcagacaaaagaaggatgttccattcttactctatttatctcaaatagcacagtttataacagtctgtgctttttcaggaataagatttttcagcactataacttttcgttgattaacaaaagcagttttagcaggttcacagatgtaaatacgtggagcctggcatatggtgaacattcggtaatagtttccccatccccacctcactcatctcctcttctctctcactttcaggctcaccaacttctcctgcccactccctatcaaggaaaagtcccataatgtatccatcaaccaccatggctaatgcacccggtaagtagaggaaactcccagagtaggagcctccatctgttcacaacagccaaaaggtgaaaacaacccaagtgtccactaacagacggatggataaacaaaatgaggtctagtcatatgatggaatgtgactctgctttaagaaggaaggaaattgacacatgccacagcatgaatggaccttgaagacgttaggctaagtaaaatcaatcactcacaaaaggacagtactataggattctacttacatgagatgtctagagtagttaaatttataaagacagaaagtaggatgacagttgccaggggtcagggggagggggaatgaggatttggcatttaatggggatagagtttcagtttggggtgataaaaagctctggagatgaaggttgtacaacgatgtgagcgcatttaatgccatggaactgtacacttaaaaatggttaaaggccaggtatggtggctcacgcctataatcccagcactttgggaggctgaggtgggtggatcacctgaggtcaggagtttgagaccagcctgaccaacatggcaaacccctatctctactaaaaaaaatacaaaattagctaggcatggtggcataagactgtaatcccagctactcaagaggctgaggaaggagaatcgcttgaacccagaggcagaggttgtagtgagtcgagatagtgcaattgcactccagcctgggcaacaagagcaaaactccatctcaaaataaataaataaataaataaataaataaataaataaataaataaataaataaattaaatggttaaagtgagctgggcacagtggctcacgcctgtaatcccaacactttgggaggctgaggtgggcagatcacttgaggccaggagttgagaccagcctgggcaaaatagtaaaaccccatctctacaaaaaaaaaatacagaaattagtcaggtgtgttgtggctttcatctgtagtccagctgtttgggaggctgaggtggtaagattgcttgacactaggaggttgaggctgcagtgagctatgatcacaccactgtactccagcctgggtgacagagtgagaccctgtctcaaaaaaaaaaaaaagttaaagtggtaaattttattttatgttatgtgcgttttatcagtatttttaaaaggcttcatctgcctatccccactgaaaataagactcgactctacctatgatctgaacctcagaatgaatgagaaagtccagagaggagcactgtgtgtctcctgagcacccctaggaagaggtacatgtcccctgtcggatctaccctgttcattctgtgggtacgttagcccagattcttcaccctgagaacattaagccctgtattagtcaaagtcaagctaaactcctgtggcaagttattccaaaatacaatggctaaaactatagaatcttctctctaaagtaacagctacatggtgagccatccaggttggagggtggcactgatcttcccggtcattctagacttgggttccttccctgtcactgctccagtggccccaaggtccctgtgggggtctgcatggtagaagctggggtgccccaagtccaacaattccgcctggtggaagaggaacaggacctggctaagcagttgggattatcacctcctctcccattccattggcaaggccttgggcgcccaccgggggagctgtgtggtgaagtgtggcaggcagtatatacctggctgcagttctgcgactgtggaggaatttccagaatctgcaactttgattttcattgcttgcagtctcttccacaagccctaaaacaagagtcactctcaactctggtgcttggggacagttctttattctaacccagaaagatgacctgagtgactagaactcagaataggcacctgggagtcccttaattagacacagggggtttgcagccatagttctacctgccgtgttgtaacagcgtcaccatcagctgctgaggcagggcaagtgacttgctgctaataacataaagtactcatgtctgcaaaccacttactcttttaactaaattagagagtaatcaaggttagccttttaataacatcactttcacttatgaaaaaccatacaagcttcctgagtggaataaaaagggagagtgatcctagcgggctggagcagccacgggtgtgtgtgtgtgcgtcggcaaagaacggcaaaggtgaaggattgcagtagtcaaagaaatctcacaggaggcagtaggttttaggggaaagagcttgaatgtgggcatcaaggaacttgggttctggcttttgatatgtcattaactaagttgaatgaggacattccttgaaagcctatagtgtgccaagcacatgcccagtgtgggtcttgggcaggccacatgacatctctcccttgcccatcgcctccaccctccgcccccaacaaaacagaatgttgaattcatgtcctctgagactttcttcagctctgctacaacatgattctaggaagtagaagctcaccttctgatcttgggaagcaaaataactgcggaaaaaaggaaggctgtacaaagaaaaaaatcccagtcacatatgtggtcttcctggcaagagggcatgacttgagtccaatcgcaagaaaatttcagataaacctaaatgaaaaatgctgtatttttaaaagtggggaggtggaattgtgtgcttccaaagtgtcaatgccaaaaaaaaaaaaaagaaagcacaaaaagggcatgaaaatgttgcaaatgaatagaggctgaagagacaagataatttaacccaacacctgactctaggctggagcctgtaaaaaagagaggaaaatggtgttttgaaaaaaaaaaaaatgatacaggccgggcatggtggcccacgcctataatcccagcactttgggaggtcgagacgggtggatcaccctgaggctgggagttcgagaccagcctctccaacatgatgaaaaccctctctactaaaaaaattttaaaaattagccggacatggtggtgggtgcctgtaatcccagctacttgggaggctgaggcaggagaatagcttgaacccgggaggcaaaggttgcagtgagcccagattgcaccactgcactccagcctgggcaacaagagtgaaactccatctcaaaaaaaaaaaaaaaaaaaaaagacaaatgatttctcttatatgaagtacctatattagccaaattcataaagaaagaaagttgaatagaggtgaccagggctggggacagcagggaagggggagttactgcttaatgggtacagaggttctgtttaaggtgacaaaaaaggtctagagatgattagtggggatggttctacaacattgtgaatgtatttaatgccactcaattgtacacttaaaaatggatgctgaccaggcgcagtagctcatgcctgtaatctcggcaccttgggaggccgaggcaggcggatcacatgaggtcaggagttcgagaccagcctggccaatgtggtgaaaccccgtctctactaaaaatacaaaattagctgggcaatggtgatgtgcacctgtagtcccagctactcgggaggctgaagcaggagaatcgcttgagcccaagaggtggaggttgcagtgagccgagattgcgccactgcactccagcctgggcaacagagcaagactgtctcaaaaaaaaaagtaaaagggggtgttacagcttatttagaatttgtctagcagattttccagcttttactggaagccccctcacccccaaaaatgtgtgaaatggaaaactgcatgtatattttaccacagtgaagaaacaaaaaaaagaagttattcctctgggctccactgtaccaggggcttctctttgtcagagcatgaggaataccgcagtgtaacgtgcctctctgttggctgtgtgctccctggggccagtgactgtgcctgagacagttgctcgtataattaggttgttaatgtgcatttggttttaatgaaaaaagaaatgagcaacacgccctggtgcatttccggaagcctgtgcatttccagaaggctgtgcatttccagaagcctgtgcatttccggaggcctgtgcatttccagaagcctgtgcatttccagaagcctgtgcatttccagaagcctgtgcatttcccgaagcctgtgcctgtacagtgggcttcacaggggtgtgtgcctcgtgcagctgcgcattcagcccacggtccagagcagccagtgacctgggatatttagcagggagttatgatctggcctctgttttctccacgaggatcagccctgaggccaactgggacagagaccacacagcacacaaagggcactggcagtgtgggccaccgcagttcgagggttctgttccaagcaggattgctacccaaacacagcaggcctggagaggctgcgatcaactcacaaccctgagaaaacaaactcgatcgtgagtgcgttgtggaagctgtgatgtctgtggcccatggggacaaagttaactgtcttaatgtaaagacaaatgaaggggccctcttctggtaagagaattaaattcctccatccagggaggaaaagcatgactttccaggctgagaggaaaaggaaggacttcgctgtaatccagtcagcaacagcagcaaatttaaggggggaaatgtgtcaaatgcaggaaaggggtcagaaaaacaaacagcattcattgcccctcaggcgcccttcagggaaagcagacaggcctggaggaacaggctcgcagtccactgccctttgctgtgaatcccaaacagccctgcgatcaccggttgggcttcccacgcaccttcacattcaggaggagctgcccggggtaccaagctgaggatttctgtcccgggacaagcagcctccctggggaaaatcaatgctggcatgtggcttccaggagaggcccccgtgacttcagagggctgctgtgcctctgagttcagtttgcctgaaaaatcttccaaacgcagctctagtgccacttcctccaggaagcccaccagccggcccccaccactcctggacccctgcctaagaatacttatgccttacacactacaatatggagaaattactaatacaaaaacaaaatgtccgagtccactccaaacataggagggagaatcaaggcggaaagatacagtggtcttaacttgtgcttgaaagattttacttttaggtcgggcgtggtggctcacaactgtaatcctagcattttgggaggccgaagcaggcggatcacctgaggtcgggagttcgagaccagcctggccaatatggagaaaccctgtctctgctaaaaatacaaaaattagccgggcgtggtgacatgcacctgtcatcccagcttctcgggaagctgaggcaagagaaaccctgtctctgctaaaaatacaaaaattagccgggcgtggtgacatgcacctgtcatcccagcttctcgggaagctgaggcaagagaatcgcttgaacccgggaggcagaggttgcagtgagccaagaccccgcctttgcactccagcctgggcaacaagggcaaaactccatctcaaaaaaaagcaaaaaaatttttacttttgccgggcgtggtggcccatgcctgtgatcccagcactttgggaggccgaggcaggaggctcactgcagcccaggagttcaaggctgcagtgaactgtatcatgccactgctcgccagcctgccccacaaacatattttttttcacttttgcatattttacaaagcacacacccacgtgagcgcattgccagccccctcgccccccaggacaaagtggagaccctgtcagcgaggaggctaccgcttaagtccctggggttctccagagaaggaggagaaggctctgcagagccatgcgccctggacggaagaactttcaaaagtaattcaacaaaatagaaacttgtcgaattacattgcagacagcgcgtgcggagcaaatgtgtgtccacggaatattcgtcgggcacaagaggaattccctgtcagctcccaggaccgtgggtgccctgaggccgagtcacgctcccccgggataaagagggtgggggcgcacacaggcaaggaggaggcggggtgggggggtgcagaataaggaactaaggtaaaaacgcccagtactggactcccctccgagcagcaccccgagagggcccggaggagctgaggcggtgcgagccgagactgccagccccgcccccagcaggccccgccttccgctgctcgccaccgcccccgtgaaaaaaaaccaaaccggtaacctctacccggccgcctcccattggatatgtgagtgagcgatgtccgcccggaccaatgagccgcagccacggcttggcgagcgccttccggcccgcccccgcgcggccgcccctcggaccaccggactggcctggggcgggacgtgggcgcgggggcgcggcgtgcggcacgctgcagggctgaagcggcggcggcggtggggactgcacgtagcccggcgctcggcatggctctcctggtgctcggtaggtgcgggccagcggagggaggcgggcgagctggggtcggcctgaaaggtttcgaatctctaggccgttccccggcgggccgcggccgcaggcggccggaagtgggcctggcgggcgggaggcgcgggcctcggcgtccggaggagctgctaggttgccccggcggaggtgcgggtgcgcgggagactcgggcgcccgtggggaggggcttccgcagccgcggggggcgggagcctcgtgcgctggagccgggcgcggggtccagggccgggcgggagagccgcggagcccagccccggccggatcccggggagggggtctgtattcccggagagtcgcaggggagcttgttccgggctcttctcgaactcgtgcgtggggacggaggttggcgggcgtcctgcactgctgcttgtttctgccacctgctttatgcagctcctacttttaaaaactgaaatgttaagccgggcgcggtggctcacacctgtaatcccagcactttggaaggccgaagcgggtggatcatctgaggtcaggagttcgagaccagcctgaccaacatggcgaaaccccgtctctactaaaaatacaaaattagtcgggcgtggtgtcgcgcgccagtgatcccagctactcagaaggctgaggcaggagaatctcctgaacccccaggaggcggaggttgcagtgagccgagatcgcgccactccagcctgggcaacaagagtgaaactctgtctcagaaacgaaaaactgaaatgttaaatctcagtcctgaaataaggacccatagttcccttagaaagggacagtgccttccaaaagctgggcttaagacgcaggggcgcttcgcatgtgatcggactccttaaaaacgaaatggaacgcggcgtcttaggaattctgtaaatgtctgcttcttagtgggcgaggccgagggtcctgtccttgccgggctcgccttggtcacagccttggctctgacagtccttaacctcggctctggcctcagaccaccttccccctatttactggctctgtgacttggagcaagttacttaaccactctgtgccagtgccttttcaacggtgttcaccattttagggactgataatagtactcccttagggttgtcctgaggattaatgagttagtacatgtctttctgttttttgagacacggtcttgctctgtctcctaggctggagtgcagggtttccatcatagttcactgcagcctggaactcctggtctcaagggatccaggcacatgccaccacacctggctaatttttaaattttttgtagagtcagggtctcattgtattgctcaggttggtctcaaactcctggcctcgagtgatcctccttcctcaacctcccaaaatcctgggattacaagtgtcagtcacctggcccagctagtacatgttttaaagagatgtaaatatttgccatattactgtggagagagtagatgaggggaaaagagtttagtctgtttagtttcctgtgagtgaattcagactagaccctgaaagagtccgtgagtctattaattaactcattttaataaatggcagcctttctgggaaacctcatggtttctagatgactgctctgggactgtagactcctcctagcagatgtgggacagagatgttactgatgtgaatttatagcatccttaactgccatggaggaatggaaaaccacagatggcagagccatctgctcacagagattctagacactcactcggatggtccaatttcccattggtgttcattatcactgagtggaatggtgatgtgaattttagaaacagaacgtcattggtcagcattgacctactttgtcatcttaagtgagcccagggttttttgtgttcttgggggttggaggtagttgttggctacttttatgcattcagaatgtccacatcttttgtctgttctttctcagtagtatgttaggtttccttgtaaccctgctaggtcacattgcctttttaggaattttagtctcaaaccttaatcaacacagcattttcattgggtagccgtgtacaagcagaggaggctcttgtgagaactaggcaaaatttaaagacaaacaaaggtccctcaccattactagaaaaaagaataacccaagtctatcttaatactgtcagtaaagagcgtctttatacggaaagggaaggacattcctaaggtgaaaaaccctggtctgttctggtgactgcagcctgcttgtaacagcatgaagaggagaggactgacgttattgctgtccttgattggcaaagagaagtgaaagtacctaattctgccacagtctacctaatgatgctctgtggattatacccctgcattctccagcccttcggttagaaatttgggtctatctaattatatgatcttaggtaagttatcctttctgtgttaaagtttcctggtctgtgaaataatgggcaccatgacacataccacatagggttcttaaatgacttaatatatgcaaaatgtttagaaaaatgcctgatacagagtcacgcaagtgttactgttttgtctcgccagaaataaagaccccagtttctggagcatagtgtgacaggtatctcagaatgttagccatactcccagatctctcttataagaatttctcttgaaacagtcatactagtttgaggggaggaggaaaatataagaattttccctgctgggctgttagtgaaaaactggaaacaatcaaaattcagtcagtagtggattgactaaatggttcagccattaaaaatggttacattggagtaattttaaaattcttaagtagaaaatatctgtaacttactcttttgcttttccatttttgaaaatttcacaataggctcagtgtactgagcaagtaccaaattcatatcgattttacaaaaaagataaagttctttaaaagtagtacatctctgtagaagattatcctattttttgggtttttttttttttttttttttttttttgagaccgggtcttgctctgcctcccaggctcaagcaatcctcccacatcagcctctggagtagctgcggctacagatgcaccctaccataccgagctaatttttgcatttttgtatttcatattttttctctacaagagatggagttttgccatgttgcccaggctggtctcaaactcctggctcaggttatccacccgcctcatcctcccaaagttctgggattacaggcctaagccaccacacccagccttagtcttactttcaagcttattcagagttaggactgtcagtgcttatgttcttgatttacttggctttgttaaacgtgtcaaactctacttcaccttttctgcagcagtgaaaagattaatgagcagtgccatccaatagaaatataatgcaaacatatatgtaattttaaattttctagtagctacatttaaaatggccaaaagaaacaggtgaaattaatatatttactgagtatatctaagatcatttaaacatgtgttttcaaaatgaaaaataatattgaggccgggcacggtggctcacgcctgtaatcctcgcactttgggaggccaaggtgggcggatcacctgaggtcaggagttcaagaccagcctggccaacatggtgaaaccccatctctactaaaatacaaaaattagccgggcatgatggctgatgcctgtaatcctgagacgggagaatcgcttgaacccaggagacagtggttgcagtgagccaagattgcaccactgcactccagcctgggcagctgagtgagacgccgtctcaaaaaaaaagaaaaataatgagattacatttttccctccattaagtcttcagaattcagtgtgtttttaccagcatatcttagtttggggtagccacatgtagctagtggctatcatgctggataacctgttactgagagagcagccccgctttggttagcctggcatccattcacaggcatcctttcccacctcttgaaatggaaaaggagatcatcctatcaaaggctactccatcactgactgggttcccgctcctcttctgactctgggcattttattcagatactccctgtattttatctttggcctctcccactgcatatgtcttcctctcctagatcactcccatcttcaaagaaaaccttccttgttttctacatttgcctgcctctggtctctataatgaaacctgcttaaagagttacctatattctctccaaccttctgcagactgcatgcctgttattttcactccaccacaactgccagggctcccagtgacttctttgtcactaaatccaatcagtagatggttttaagtctttgctactttatctcccagtagcatttgttagtgtggccccttccacatgtatcttggtttatgtgacaccactctggataattctcccaatccaccttccacatggcaactggaatactccttctagaaagcataaatctattctttcctctgaatgataaccctttagtggcttcactattagtaaaattaacagttttataagttcttacagtattggctatatctgtgattcaaatgcagtgtaaatcttgaataccataattgttcattcatacctatagcgtacagaaccactttatcttgagcactaaaaagacagcatggtgtaataggaaaagcttggaaatggagagctgccctgccccttatatgtatgaccatagatgggccatttggtctagacctttatttacaaaatggggataagtcctactttctagttagtaatgctgtcaaaaattaagtgatctaacatttgatagtgatttgaaaaattgaacgtgttgtatgatggaggatttagcagtaaaacaatgaacaatggtgtacactccttccagaaaaagtgtaccatttagttattccaaaaaggtccatttgaaatcttccaaattctaattgtgaagcaagcatgtgaaaatgtaactaagatggcatgtacacacactacttgagaacacaggccagtctcacttataatttgctatatcaacaaattaaaaggaagaaatgatatgatcaacttcagagatgctgaaaagacaggaatagatagaaatttcgttaacattgtaagtacattttggcctggcgtggtcactcatacctgtaatcccagcactttgggaggcagaggcaggaggatcacttgagaccagcctgggcaacacagggagaccctgtctctacaaaaaatttaaaagttagccagggatgcacctgtagtcccagctactgggggtgctgaggtgggaggatcacttgagcccaggaggtcagggctgctgcagggagctgtgtttgcaccattgcactccagtctgggtgacagatcaagaccctctctcaaaaaaaattaaaaagtgtatttatttcaatccaaaagccagcatgatgcaaataggaaaaccttgttgaagtcaagaatagtctgaggatattccattatttaccttgttctagaggtaatcagcaaatttttgtatattgtcatgtgttgcttaacattagagacgtgatctgaattatgatcaacttcagagatgctgaaaagacaggaatagaaatttctttaattgctattgtatcagacgatttcttcattgtgaataacatcagtgtgtacttaatacaaacctagatggcataacttactaaaaacctaggctacatggtatagcttatttctcttaggttataaatctgttcggcatgttactgtactgaatattgtatgcagttgtaacacaatggcaagcatttgtgtatctaaacatagaaagggtgcagtaaaaatatgatataaaagattaaaatagtacacctgtacaggacatttaccgtgaatgcagcttgcatgactgggggttgctctaaaaattttatttcttggataatagattaaccttaatttactgtaacgtttttctttctttctttctttctgtctttattttttaggagatgtggttttgctattctgtgttggccagcctggttttgaactgctggcctcaagcagtcctcccactttggcctccaaagtgttgggattataggtgtgagccatggcatctggtcaacattttactttctaaacttaattttttttttttaactttttggctcttgtaaaaacacttaccttaaaacgcattatacaaaacagcagtacaaaaatattttctctcttttttttttttttttgagacaaggtcttgccctatcaggctggagtgagtggtgcatcacagcccactgcacccgtagcctcgacctccctgggctcagtgatcctcccacctcagcctctcgagtagctaggactataggcatgcaccaccatgcctggctaatttttgtactttttttagagagggggtctcactatgttgcccaggctggtcttgaattcctgagctcaagcgatctgcctgccttggcctcccaaagtgctgggattacaagcatgacccatagcacctggccagtattttcttttatatccgtattctgtaaggtttttttcgtttttttttttttttttttaattatactttaagttttagggtacatgtgccatgctggtgcactgcacccactaactcctcatctagcattaggtatatctcccgatgctatccctcccccctccccccaccccacaacagtccccagagtgtgatattccccttcctgtgtccatgtgatctcattgttcaattcccacctatgagtgagaatatgcggtgtttggttttttgttcttgcaatagtttactgagaatgatgatttccaatttcatccatgtccctacaaaggacatgaactcatcattttttatggctgcatagtattccatgctgtatatgtgccacattttcttaatccagtctatcattgttggacatttgggttggttccaagtctttgctattgtgaataatgccgcaataaacatacatgtgcatgtgtctttatagcagcatgatttatagtcctttgggtatatacccagtaatgggatggttgggtcaaatggtatttccagttctagatccctgaggaatcgccacactgacttccacaatggttgaactagtttacagtcccaccaacagtgtaaaagtgttcctatttctccacatcctctccagcacctgttgtttcctgactttttaatgattgccattctaactggtgtgagatggtatctcattgtggttttgatttgcatttctctgatggccagtgatgatgagcattttttcatgtgttttttggctgcataaatgtcttcttttgagaagtgtctgttcatgtccttcgcccactttttg

SEQ ID NO: 241 - DNA, 32744 bp, Homo sapiens
  source 1..32744: mol_type = other DNA
taatcaccaaacatctgcttccttctctgtagctgtgaccctgataccgcgtggtgtgctccgaacacatggtgcccagaacgaaggcggcgtccagaagccctaggtcccagaggtccgctcagcggcaggcgcataaggcggggccggcgcgggcctttccttccatcggaaccgttctcccggggctgagtccctgcccggactccgaacgccgaagaccaggggccggaagcgcgcgccgccactgccacgccgtgtcagtcgggagggagggagcgagcaggcgaagccgcggaggacggggtgaagatggcggccttctccggtgcgtttgtggaaactctgggggtggtggggcggcttgttgcacgcctcagccctggggccgcccgcggagagctaaaggggcgggagcggacaggggtcagggagacagaagggcgctgtccgctgcagtccctgatggacccgcgttgcgggatcaggggcggccgcggctcgggttcggaggacgattcttcccaggagcgggccggaacgtccctccccctgccctttcccttctaccagtctccacttggctttcctgccagtgcaccttcggctgcaaaatctaggcggcggcgttgctctggcggctcccagacgcctgggcctcctgcctcttaacgtggcagtgaccctttgggaacccttttctgcccgcggctcatctgggcttggccaggcagagaggcgagacggcgtggggaggagtcattggggaaaaatgacgatcctgcctctgtccagttttttcaggcccttccaaaacgtcccaggcataaacctgatctttatttgttcttaaacgttgttatatcaacattaatgttcagtgttgaagctaaagggaaagcattttcattaacgtacgcaccagtccaacataagtttggaaaattcatatttatttgccgtctgctaccctcctttattccaaatatgatttgatatggcttatcgaaccctacagttgatattttcgcctcttgctttatcatcctcctgttaggcatccagttttaggaagctgtaatcagccttaaatgcgctaaacgtgatacatttatgtagcacttatgtaacgtttattgctatataaatgtatcacgttaggcctaatgtcctttaatgttattaactttttaagatgacttcagatgtagtattttatattttttagttttcttctgtaagaatattaggaattccatatctccagtcatgtaagatattttttttcttttttgggggggagaatgggggggtggggggatgtagtctccttctgtcgccccagctggagtgcaatggtgtgatcttggctcactgcagcctccacctcccaggttcaagcaattctcctgcctcagcctcctgagtagctgggattacaggcgcctaccaccatgccctgctcatttttgtattattagtagagacgggggtttcaccatgttggccaggctggtctcgaactcctgacctcaggtgatccgctcacctcggcttcccaaagtgcaacagtcatgtaagatttctgactgtttcagttacatcttctaataggattcaattggaaactgctcagagttgttgctgtttttcttttcccaacattctcctaaaacgattttagagccaaggtctgtaggatagttctaggtagtcattttataggttcacatctttgggagtcatacacaaatttcatgaatgttagaggtaaaggactggaaaaagtctgtgatatgaaataagacaaaactggaatttcacgaatgtttctaatttttccttaactgttaaaagtattatacttaaggtccgctttcaaagaaaacttgcagggaacatgaccagaatggtacaagagattgtctggaatttactgaaaatgatatgttgtttcttgtataacaattttgcaaagagcttcagcttgcagtattccgtatgcagtaagaacacaccactcctttgtttcaagcagtttgcattttaggagagagaacatagactgtaatacaggttaattcttaggaaggtctgcctggatattcaactttagatcttcattagtttatctgtggcttttttttttcctgagattaagagctaggaaagtcgccaggtgcagtggcttatgcctgtaatcccagcactttgggagtccaaggtgggcagatcacgaggtcaggagattgagaccatcctggctaacacagtgaaaccccgtctctactaaaaatatgaaaaaaaattagcgggcgtggtggcatgcgcctgtagccccagctcctcgggaggctgaggcaggagaattgcttgaatctgggagacggagtttgcagtgagtggagatcatgcccctacactccagcctgggtgacagagtgagactgtctcaaaaaaaaacaaaagaaaagaaaaaaaagaaaaagagttaggagagccttctttgaaaatgatgatccttctcatctgatgcaaagaaaaagctacataattttatgaagaatattttcagtttgtatgtttgctttatgccttttcacaatggcaagaaatacagaatttcagaattggttatttctggggcttgggaatgtttgattcttgttcttttttttataggaatatatatttttatgataaagctatattttataaatacagacttaaaataaaaatcacttgtcttttggaaggaaagtttaagtaatccaactaactactccatatataattaccctctacagttcatatgagaaatgataaaatgacaaaacccggttaggagcaactcatctctattcatttaggatgggccttgaagtagaattattgagatatgtatacagttaagaactcagcagttcttcagctgacatttccaggtgcccacgttttcaccactgacccctccctcttcagttattcagaattttgattatggctgccaataaatgtgggtgctcgccacttgtctattcatttttttccaattgctgagggtattcacatggtcctagaatagccaaggcacataactgccacattgtctctaaatgcaacaaccctgtctattcttggcagacttttcacgagtcatgagaggtaaacaggcactgtagtggctacagtttattaggtgacaaccatgctccagttgcattacatgattatctctggtcttcatatagccctgcaaggtaggcaatatcagccccattttgtgtggagaaaacagatttatagctttgcctaaggtcacttgctaataagtgagaacttagatttgaactcaggtctttctccagaacttgtgctctttcaacagtgccacgctcagtagatttgatgtaactgagctatccttcaaaatctttaccctgttttatgaatagtaattttgagagcaatgcaatttatcatttcagtttatgtggtttttaaaattaatttttactttcagagatgggtgtaatgcctgagattgcacaagctgtggaagagatggattggctgtaagtacataaagcctaaatgtacctgggagaggatgttttataatttaaacagttgttagtgattttatcaaatatttttgtgtctagttgggtaagtgaaaatcaggttttttttgtgattttctaaattatggaaagtttcctttttttaaccttgacatatttctagtggaataagatggatcgtatttaccacgtaaaattttcttttaggcaaattaacgtgacttaatttgcttaggcgatttttttccccagtaactaaaattcttcaaatatgattcttttagcctcccaactgatatccaggctgaatctatcccattgatcttaggaggaggtgatgtacttatggtaagtttaaatttggtgaggtgattggtagctggggacacactctaagaattgcataggcttacaaatgctactttacctttattcacaaacatttatgatacatatactgtattcagactattaggtaaaagcttcaaacaggtaagtatttactcctgagaagcttaaacccactagggcaataagacatgtataagaatgaatctcgtatcagagagaatgtggcttcttcgtaagagatgcagagtagtatagaattcaagtgggaatccagttgtccttttgcttgaaggatcatagggactgcttaaaggaagtagatttctttttttttgtttttgttttttggaaaaggccaagctctgttgcccaagctggagtgcagtggtgtgtttatagttcactgcagcctcaaactcctcggttcaagcaatcttcctatttcagcctcccaattaggtgggactacaggtacacaccaccacatccagctaatttattgtatttttttgtagagacagggtctcactatgctgcccagtctggtctccaactcccagcctcaagcgatcctcctgtcttggcctcccaaagtgctggagttataagtgtgggccagatttttcgcaagggaagataaaagagaaatgctttttaggtagagagaatatcagcaaaacagcgaatagtagaatgtaggatatgaccctggaatatttcagttggttggtagcataaaatatgtgtctgaggggggataaacttgaaataaaattgtagagagataatgggtcagattatttgggctctttctcaagtgtcttgttaaagaatttgagtgttagtcttctatgaagactaatctgagtagcagattgtagtatagctctgggattagatgttgttcggatacttttataataatctagattagaatgatgagagcttccgtttgaatggtagcaatgggaaagggaagagaagattcttaagggtatgggaaaggtaacaagatgggctgtagttggagttgacagaggaaccctggatatctggaggcactgtgaaaataaaggtagccagtcaaatgttaaagatttctacatactatggtgttagtttgatttctttaatagacaacttaatctgtaaaatcaacttttttcccctcattcaggctgcagaaacaggaagtggcaaaactggtgtaagtaataaattatatttactttctctctaaaagttgaattttaaaataactttgaacagtagtttttactttgaaatatttaataaaatagcaacctccaaaaggtaaggaattaattacttgctactgaaaatgatatttttgttgccagctaattatgaagagctaaaaaaagtatgaccttaagaacatagttttaaatgggcgttagagagttacaatagctttagtgtttatactcacttctgaattttaatatgatgactcttaaaataaaaaggttacatacagaagttgatctcctactggcctggactagagaaataatttgtcggactggatggtatttttcctctttagtgtaggttcattctaccagtctccattgttctatctttttgtgatgttagctgcgtcctatttccttcattcagtccactctgtgttgtctgatgggtatttttggtttgggtaaatgaaattgtagtagcaatctggaatatgtatgattagttgatgtgtgtgcataacttttgtcatttatattggttattaaattgtcgttaatatgtgaatactaatatagataccttttgtttctttgataggcttttagtattccagttatccagatagtttatgaaactctgaaagaccaacaggaaggcaaaaaaggaaaaacaacaattaaaactggtgcttcaggtaatttttgtaaattgatatttccttttatataaatcattggttctcatcactgacagttaggaaagtgagatttgggtatgcatttttaaaatcttgtcagtatctggggggtggtattgggatctggaaccctggaaaccagggatgctaaatgttgttgagagcctaaacactgcaaggttgtccctcctaaaatactaatagtgttccctttgagaaaacactagcattttggagattacatttcaatattatagtgtttttcttaaccttataactttctatgcttaatgctaaaggaaaataggtacattttacaaaaatattaaggaaggattttacaaataatttatggagtaaaaacccatgctggtgggaagtattgccttacagggaacagaggcattttttttcctctaagataagaagggaaccacctaggaagttaaaatataaattttaaagttgtttcttatgtgcagtcctatctacatggaaattggtctttttattaggtttctgatactgtctctaccgtaatcaatcttaccgcagtttcttcatctttaaattgtgttgcttctgttgaatgttttctaaatttcattctatcttaattaatcttttgttttgttatattttaataatattttttccacattttaagtcactcttgtttcattatacaaaacaggattgttacaaaacagcaagttgaagaccagtgaacctgtcatattaacatattcttttcagttgtttgaaagtaatgttatacataaaatgtataatgtagaatctgtgaactcatgtaaattagagatagataattgatgtaactatttacactattggcctattctaaaatagtttcagaatttgtaacaactgtgccgtcatttatgagaaatggtggtaaaagaaaacactcctaaaggagaataaccatagtgataatggttctgaaagtcacatcctatgaggaataaagaaagtagaaatttaaacatggagaagaagtaaaaatggagatgggataattgttaaattattgaagagaactagagagaaagtaattattctagaaagtaggaccaggaccaattagaaatagtttagatgaagatttctgtttaacttaaagtacttcctaatagctacattgagccacaatgcaagggaaaacctcaaagttatttctacaatgttcaaagtgtttaagctgatgatggatatcttttgaccagaaataatctagaaaggatttctaccgtgagtggaaagttggtctagaaagcacgtagagctctctttattacaattcttagtttatacgtatacatacatcttaacaaactatcaagatgtgtcagaaaaggaaaatgccaatcttataaaaaggcggatgaaaaaaatgtgtgacttttgaatgtggtattgaattaagataaaggacttgctttttttttgatagttacaagataattagactctgaaatgttgatcagttatttcctttataattgaagtcaacttgtttggttacttaaacttctttttaatagtgacctaggagtaaggacagagatcagtatcatctgatagagagcacactgaagcaagcaagtgaggagaaaaggttttaggtccagatagaccagtgatgattatcttcaacatgtctgatttttcagttgcgtttttgcttttaataaaaacaagttttacttgtgtattctaaataatatataaaaccatattgaatctagaggaattaaggtacataaaatacttgtttttttttttaatagagcgttttattttatttatttatttatttatttatttttgagatggagtctcgctctgtcgcccaggctggagtgcagtggctcgatctctgctcactgcagtctccacctcctgggctcaagcgattctcctgcctcagcctcccgagtagctgggattacagtcacacgccaccatgcctggctaatttttgtatttttttttttagtagagatgaggtttcaccacgttggccaggctggtcttgaactcctgacctcaagtgaaccacccacgtcagcttcccaaagtgctgagattacagtcgtgagtcaccgcacccggccaagcattttaaattttatatatctgtgggtaacttttcttattttaatttgtttagtgctgaacaaatggcagatgaacccatatgacagaggatctgcttttggtaagtggatagactttccatcagctcatttgtaattcagaaactttaaaaaataatacatgagaacaccaagtaaataagattaagatttaatttaccagatattagaatttagtcactatcattaaacagtatagaactgacataggaatagacagtggaacataatggaaataaatctcagcacatatgagaagttatatgcaggaaaaataattatatttcatttcagtgagacaaaaggatggtttattaagtaaagggtgctgacacgatccatctggagcaatataaaattgacttctatctcatatcataattagaaataaattccatgtgtatttaggacttaaatatatatgtatgaatttgaatacagaaaactacatgtataatttagcagtggcaaaactttcctaacccaaatagaaaatgcagaaattataaaagaaagtatttataggtggagttggacagtcctccttcttggggttaacagaccttacagtggcttttatccaattcaccaggctggctgttcacttgggaataacctccatcatgcatagagccatctgtgattgttccatagtgagcagcgagacctgcatcaactcaaatatgcccttctattctgctgcatttaaaactaaggatactttcctaaagcagttactctcagaatgcattttagtaaagactcctcaggaagcttatgatactgatctacaaaatgtaacagttccttcacactataccctccagtttcagagtgttttggttttgctcttccccacatttactgccttcttggagaccacaggtcttagaagtactttttgttggccctgcataatttttcccttgggggtcagctttgaagctggtgaccaaagctcagatggactgaaatctgaatgtagtctcacatcaagggctgacccagcactcttttacttcattttagctattacagataatagtaaccaaaggactgtatactttttttcttatttgcattttcttttttttttttttttttttttttttgagacagagtctcgctctgttgcccaggctggagtgcagtggcgcgatctcagctcactgcaagctccacctcacgggttcttatttgtgttttcttatgcatccagtgaaccagctccccaggagttggatccaactctaaattccactgataatttttatcattagtaactgtgtgtagcacagctgtggctctgtaccataggtgatcttgtggccaccaagaaacctaaagttcctcatcccctacccttttatcctttttctttccaaaccacagttctgtgagccaaggcagttctagcaaaccctgattctgacaccaattctgagaatatagagaaataaataaactccattttccctgtatactctctcagcatgcttctgacagcagatgtgtggggttttttcccacaagtcaagcaagcagtcagttctcagcatttacgagttgagaactgatggagtaagtaacagacacatgtttgtttattcttggtttcccatactttcccattatggtttcttccagctgagaactgtaattcaattcaattctgacaccgtcttcatgaagatagcatcatatcccacaggttgagggttcaatcacacaagactgtcccccacatctgatgcccaggttgtggcttatgcttctaacctattggctataaatcagggttcctacaattccttcctcaggttcaattaatttgctagagtggctcacagaactcggggaaatatgtttactggtttatttttaaagctattataaagaatactgatgaagagatgcataagctgaagtacaggaaggggcttggagcttctcccctccctgggcatgacacccttcaggaaccgtcatgtgttcagctatcctggaagctcctagataactttttaaaagttcagttctacataattcagtacccatatgggtaagaattcatactttgaataattaaatttctgaaaagtgtaggaagatgtgtgttgaggtgcttaacagtttgttctactttcaagtacagaatacgagttggaaagatgaaccaggacagaaattatagtttttttccagtacagacaaaaagctgaatctttacttaaaaccatttagtatgtggacatcactgagactgatcatgatgtatagtatagaatatacctcatcttttagagcccttataatattagcaagtaacaaatacatgcttatttattcatgctttctcctagtttcccatatggtttcttccatggattgaggaacaagctagagacagttctgttatcttttagttatatagtcactcaagctctaatttaagtataaaatcaggacgaatattgatgagcgagttgtgcatcatccttgagtacgtttctttaaagggctccagagaatagttatctaaacacatttgtattgatggtgcaactactattagtgcaagtcaggttaagagctgtgttgaatcctttctagacttgttgctgtaaaatcttaccttagttaacagatggcagcatagaaaatagcccccaacatagccaaggacacccagggaatgaaatggttaattacacttgggaaatactactatcactcaggaatcagtaagtctcagtctctggaacattgcaacaaatgaaggaattatcttgttagtgagactgaatgattttttttggtggtagggggtgggaatgtatgatttataaaacctgtactgacgtgtttttctgtgttttcttctcaaatccagcaattgggtcagatggtctttgttgtcaaagcagagaagtaaaggaatggcatgggtgtagagctactaaaggattaatgaaaggtatttgaacagcatctgcacttgtataaacttttgaggcaaggtattaatacgtgagggtttttttgttgttgtttgtttgtttttgagatggagtctcgcacgtcgcccgggctggagggcccgggctggagggcagtggtgccatctcggctcactgcaacctccacctcccgggttcaagcaattctcctaccgcagcttcccgagtagctgggattacaggcgcccaccaccatgcctggctaatttttgtacttttagtagagatgggtttcaccatgttggccaggctggttttgaactcctaacctcaggtgatctgcttgccttagcctcctaaagtgctgcctgcaggcgtgagccactatgcctggcccatgagtttttaaaaatagctttaagtcgaggatctgggaaggtgtttgatggtacaaatatacctataattcttcatttggtacatacctgtgtaattcagaaacaatgggaagatgacttcatggtaaatgaatcgtgtgtgtgatttatataaatctcaatgtattttacccttgtagggaaacactactatgaagtatcctgtcatgaccaagggttatgcagggtcgggtggtctaccatgcaggcctctttggacctaggtaagtgtttctaaaataactgaattgattgatttacatttgggggataacattttattatttggggaagcaaaataataaatttaaccataaaaaggttttattttaaagacatggaaacaatatttatctgtaccccaccctgttccaaaaaggatttgaaggaacttacaaaaagtacagatattatagcagtatgaaatgagggataagaatatgaatggagtcagggtaaagttagtgtgtgtgaatctgtaccacacagtaccatatagatgcttcatgttattgtaaacttgcatctgaatttcttagtggacaaagcagagagggatgcagtatcactggtgtccctagtctcacacacgctctgtggcctaagcactgtttagttttttgcaggattcagaaacttagggaatagttttcctgtgggtttatgaaatggacatactatgtgaataaaattacttcttttagaggtcttttaattttatattttctcttaccagaaaagtaaaatattttttaaatctaggtactgacaagtttggatttggctttggtggaacaggaaagaaatcccataacaaacaatttgataattatggagaggtaagcgattatgttatgacttcaacatagcataagtaagttttcttgcatacttaatcactcatgacagaatgagggtatacaaatgattctcaaaatgagcagattttctgtatattttccacagaaagtttggatttggactttagtgaagaaatattgtcaagctagataaatatgtagtagttataatttttcttttatgccatttgtcatcccctccaaaatacattacgttgtcttctcttttcacctcattttgattttggctttgatacatgttattctcatttcttattattgatcatgatgagtctaaatatagttcgtctggtgagctgaaatctacagtagtgtgaatgagcctaaatatgttgattctaacaagcctgtcaaatgcttgtactattgtatatgtcatatgctctaataggcatttttgatttaaataattattttgaaacacatacttttgatgcagctatattttaactttatttaagaatttactttctattaatagcatttgactttctggtgttctaggaattcactatgcatgataccattggatgttacctggatatagataagggacatgtcaagttctccaaaaatggtaagctctatatggatcttagtagtgaaaagatacatgatattcaataattgtggtttttaaaaatccccccaccctgtttttcaaatccccgtccctccctccctgcctttacttgaactaatatttattgagcattgactatgtgtaaggtaccctggtaagtactggaggcacagaagaaaatggaatagacatttggggcttacacactagtggtgaaagacagacatataataccatgttaggtggtagtaagtgctgtgaaggagggtataaagcaggggaaggaagtggagagtcatagcggtttgggggtttgtgcttttgtgtagggcagtcaaaaggcttgataagggacatttaggtagagatccaaatgagttgggtggtaggccatgcagatttctgcaaagggaatagtaaatgtggatgccctgagatggaagcgtgcttgaggtgtctgagtcacagcgaggaagccactagatctggagtgctctggggataaaggacggtggtagaatgttagatgagtgaggtggtgaggccaggccatggagagccatatgggccatgatctaaactttggtttttattttgagtgaaatggaaagccatgagggttttgagcagaggggtggcatcatctgtctttagtttaacagtaccattctggctgctttgttgaagacacattggagggtggggtgagattgcctagggattgagggtagttaaagagaagaagagatctgaggcctgggttcctgtggttaggggtcagcaaattgaggagaatccagcagaggggaatgaggaggaaggccaggaggagaaccaagaaagcatgggtcctacagtcctggtgaaggaagtgtttgaaggatcagggagcaatcactgttcagtgctgcggatgggtctagtctagcaagatgaagaatgtgcattaactgctgcatttgacaagtggaaagcattagagagctgttttggtggagcaaaggggtgagggtggggagcctcctaataaggagccagttcaatagagaatgagatgaaagaaagtggatacagtgtaaatggaaatcggagtttcactacaaaagggaggagaaaaatggaaggtaaatggagggagaggtgagttcaagggaggttttcttgtgtgttttactgtgagagtatgtttatatgctttgaaatgtctaatggaaatgaacttgtagacagggagtaatgaaaaatgtagaggggtagaagtgacagtttcaggagtaaagtaaaaaaatgaagaagctggccttaggcagcacagtttatccatagtgacaggagagaggcatgaatgcaggtaagctggtagatttgacattgtcagcatgaggaaggtcttttctgattgttttaatctctctctctctcttgttttttaaggaaaagatcttggtctggcatttgaaataccaccacatatgaaaaaccaagccctctttcctgcctgtgttttgaaggtaattaggaatctagttagaaaaaatttgctgtggttgtaagctgcttactcttcattattttgtatacgatggttttcaattagggtaggaattttaattttctgttttattcaatgctagaatgctgaactgaaatttaacttcggtgaagaggaatttaagtttccaccaaaagatggctttgttgctctttccaaggcaccggatggttacattgtcaaatcacagcactcaggtattatacctgcaagggtaaggatttctagaatagtgagaataattgatgagaactccagtaagtaaggcgtctcatagtgagttacatatactttccttgctggtttagtcacacatctttttttaacacagcagtaaaattcatttttaaaacctaattcataaactcttaagtatttggtttcagtgtaggcattttgggatcgcaatcataacggtaatgatatctaatatttatagaatgtgtgcttattcagtgccagggcaccacattaagtgctttacatggtttagtcttcacaacaaccctataaggtagtagttttcccattttacagacaacctaacgaatagggactttaagtgatttgcccaaggtcacagagcaaataagtggtagaactgaattcaaatctaagcagtctgacttccaagtttatactcttatccattgtatatctaatatttaaagtatatttcataacttgtttgtcacaaaacaagtgagtcatttttgtagacatatcaatcaattagaattattccaagtagatttttattgttgttttaagagaggggatctcactgtgtcacccaggctgctggagtgcagtggcgccatcatagctcactgcagccttgaatacctggactcaagtgatcgtcccaccttgggccgcccaaagtgctaggattgcaggtgtcagtcaccccaccagcccaaatagttttaatttaaagtagcctttgttttagaaatctaaggtttattctgtttgactgtcttctctactttttgacaattattatgtaaaatgttgatattagaatatttgtcctaatgttttataagtaacagtattataaagtgtgctttgaatgtgttctcatcttttttattccctaaggtaatgcacaggtgacacaaacaaagtttctccccaatgctccgaaagctctcattgttgaaccttcccgggagttagctgaacaaactttgaacaacatcaagcagtttaagaaatacattgataatcctaaattaaggtaaatcttccttttgtgctgaaatgcttattgtcttttggtttgaagttttttggaagaagaataaggtagagaaaaatgaagtagaaattcagtgtgtatacataatacacgtgtgtgagtatgtaaatatactttaataatttccatatacaactcctgtttgtttgctaaatggtaagtatgatttttttaaaattgagattttttttttcctgtgtctcttacatgaaaagtcatggttagtcaaacagcattggagtaaaaatctaatttttggttttttttctgagaccgggatctcaatctgtcgcccaggctggagtgtagtgatatgattgtagctcactgcaaccttgacctcctggactcaagcagtcctcccacttgagtagttgggactgcaggcacatgccaccttagtagagatagggtttcactatgttgcttaggctagtctcaaactcctgggtgcaaatgatcctcctgcttcagcctcccagagtgctggaattacaggcatgagccactgtgcctggccctaacaattttttgaagagagcatttcattcactgttaaatttatttcttccctaaatctctatagaaaatgtgccactctatttctagcatgttagtaaacttggcgaggtttattctagactgcatcacggtggtggctttcttccatttggacattcagattggtcactgtctagttataagactctttccaccattggaaggataccataaattaaagtgaccttgctcagtagcaatccctttgactttgaagaaggctataccatataagtaatacactctgttagtcaatttgacacttgatttttgttaattttgtctttaattactttttaaacttgaaacattcacacaccataaaactcattatttgaaagtgcacaattcagccaggtgtggtgactcacgcctgtattcccagtactttggggggccgaggtgggcggtcacctgaggtcaggagttcaagaccagcccagccaacacggtgaaaccccatctctactaaaatacaaaaattagctgggcttcgtggcagagacctgtaatcccagctactcgggaggccaaggcatgagaattgcttgaacccaggaggtggaggttgcattgaggccaagattgcgccattgcactccagcctgggcaacagagtaagactccgtctcaaaaaaaaaaaaaaaagcaagtgtttcttggttcattggtttttagtatattcacaaggtgtgtaactgtcaccactatcaaatttcagaagctttgaatattttgacatcacaaaagcctgtgtttttttttaggttttttttttttttttttttttatgaagtctcgctatgttgcccaggctgaagtaagtggctgttcacaggttcagtcttcctacactgtagccttgaactcctagactcaaggaattctctctcttgcctcagcctcccgagtagctgagaatacaggcacatgccactgtttcaggcaggcctgtctttttaatattgatcttatttacaggttgaacaaacttatttagggataaattatgtaaaataattactaattttgttttgaagattgatgcatgttccttattcagcaaatgttcatctaccttccatatgtgaagttttaggctgggagccagggcttcaacaatgaaaattaatcttcctttcacagaattaagtgtgaaagtgtggggatagtgtggaggggagagaaacaaaacaaatacaataaatgccttgagcataccatgtaaccagggcatctgcttagtgtaagaaactcagggacgtctttataaaaggatttgggaagaatgtaaaatgctagtgtgaattgatttttgtgctgtgattatgtataaaaatgaacatgattatagacaaaagttagaggggaagatgaataataaaatcaatttattggttaagatggtaaagtcatgggccacttgtttggtattcggtacaaatggacattttctttcttaaaacccagctgaagtcatgatctttgaatgaagctaagctggctgtcccagcccagccatctgcccctcctctgatacactgactgtacatgcctttccctgatccttacatactgtcatgtgttacttttccttactttttaattttcttaatttttatttcctttttagagctatacttgctttaagtttcttgctttgaatatgcaaagcttttatctaactcagttttacattccttagtgcaggggtggttcttttatattcttcaaccctacagtgctttgcgtataagcatcaattatcatgtgtatgtgtgtttaccttctgccaagtttatagggataaatatatctgattataaatgtggataaaagtaaaagtattgttggaaaaaaaaatgatagtttaggacaatagtccaaacctaggaacttgaggacctcatttaaaaatataaaatgtattggttccctcccctggatatactgaatcagaatttccagagaataggaattagaatctttttttatttgtttgttttttaagaaaagcagctcctccaggtgattctttttggttttggttttatttttgagatgaggtctcactctgtcacctaggctggagtacagtggtgcctcatagctcactgcagtctcaaactctagggctcaagcaatcctcccacctaagcctccagagtagctgggactgcaagcaagtgccacagtgcttggctaattttattttttgtggagacatggtcttgctatgttgtgcaggctggtctcgaactcctggcctcaagcaatccttgtgtctccgcctccgaaagtgctggattataggtgtgagctactgcatctggcctttactctcctgatactgtcctttggaagtcttaattttgatgaaatccaatttatctgtttttctcttttgtcatggtgttttgatgttgtagttaagatagactatgcctaacccaaggtcatgaaaattttatttgtgttgtcttctgagttttatgtttaggttctacatttaggtctgtgatacatttagagttaatttctgtgtatggcatgagaaagggttttaacttcagtcttttgcatgtgcatatccatgtgtcccagtgccagttggccagtcattgaaatgagaaacattcaaacacaaaagggtactgtgaaaagtgagtcttctttcactcctttccccaatttctagttatcctttctggaggcaacgttttaaattgatttttgtatattccttcagggcattttatatacatacaagtatatatgtctgaaaacatagattgaaaccaggttttaaagaaccttgaattatcctaatgtagaagaatatgtagatgagaataattttttccatgttacaagctcacgcattctctttcgtgactttaccgcacttcagcaatagatacagctacggggatttaactgctttgtttcccaccttccccagacttgtttttttttttattttttattttttaatttatttattttttattgatcattcttgggtgtttctcacagagggggatttggcagggtcacaggacaatagtggagggaaggtcagcagataaacaagtgaacaaaggtctctggttttcctaggcagaggaccctgcggccttccgcagtgtttgtgtccctgggtacttgagattagggagtggtgatgactcttaacgagcatgctgccttcaagcatctgtttaacaaagcacatcttgcaccgcccttaatccatttaaccctgagtggacacagcacatgtttcagagagcacagggttgggggtaaggtcacagatcaacaggatcccaaggcagaagaatttttcttagtacagaacaaaatgaaaagtctcccatgtctacctcctactacacaaacacggcaaccatccgatttcccactcttttccccacctctccccactttctactccacaaaaccgccattgtcatcatggcccgttctcaatgagctgccgggcacacctcccagacggggtggtggccgggcagaggggctcctcacctcccagtagggacggccgggcagaggctccccccacctcccggacggggcggctggccgggcagggggctgacccccccacctccctcccggacggggcggctggccgggcggggggctgaccccccgacctccctcccggacggggcggctggccgggcagaggggctcctcacttcccagtaggggtggccgggcagaggcaccccccacctcccggacggggcggctggccgggcggggggctgacccccccacctccctcccggacggggcgactggccgggcggggggctgacccccccacctccctcccggacggggtggctggccgggcggggggctgacccccccacctccctcccggacggggcggctggccgggcagaggggctcctcacttcccagtaggggcggctgggcagaggcgcccctcacctcccggacggggcggctggccgggcggggagctgacccccccaccttcctcccggacgaggcggctggccgggcggggggctgaccccaccacctccctcccggacagggcggctggccgggcagaggggctcctcacttcccagtaggggcggctgggtagaggctcccctctcctcccggagggggcggctggctggcggggcctgacccccccacctccctcccggacggggcggctggccgggcggggggctgaccccccccacctccctcctggacggggcggctggcctggcggtgggtgacccccacctccttcctggacggggtggctgccgggcggtgacgctcctcacttctcagacggggcggccgggcagagacgctcctcacctcccagacggggtcgcggccgggtagaggcgctcctcacatcccagacggggcggcggggcagaggcgccccccacatctcagacgatgggcagctgggcagagacgctcctcacttcctagatgggatggcggccgggaagaggcgctcctcacttcctagatgggatggtggccgggaagaggtgctcctcacttcctagatgggatggcggccgggcagagacgctcctcactttccagactgggcagccaggcagaggggctcctcacgtcccagatgatgggcggccaggcagagacgctcctcacttcccagacggggtggcggccgggcagaggctgcaatctcggcactttgggaggccaaggcaggcggctgggaggtggaggttgtagcgagccgagatcacgccactgcactccagcctgggcaacattgagcactgagtgagggagactccgtctgcaatcccggcacctcgggaggccgaggctggcggatcactcgcggttaggagctggagaccagcccggccaacacagcgaaaccccgtctccaccaaaaaaatacgaaaaccagtcaggcgtggtggcgcgtgcctgcaatcgcaggcactcggcaagctgaggcaggagaatcaggctgggaggttgcagtgagccgagatggcagcagtacagtccagcttcggctcggtatcagagggagaccgtggaaagagagggagagggagaccgtggggagagggagagggggagggggagggagagggcagcgtgtaacctttgtaacttcccccagacttgttttattgtaggcttttttcctcaattactttctcaaccttaatttccacctaaaataaatggatgcagatcaaacaatgtaaagcagactttaatttttttttttttatattatcatcttgatatttatttcagggagcttctgataattggaggtgttgcagcccgggatcagctctctgttttggaaaatggagtaagttgtagttttaatttttaaaacataatgtcatgggctgtcgttttagcaatacagctctgttttgtttcaagaaaatttaagtgaggctgaaattagagcaaggtcagaggagtatgtttgttcaaagacatcttgcaagtgcgccttttcttctcctggaagtatacaaagtctctcccagacctctcaagcaaaattccagcatacatgattttttgttgtttaccctctgaacatttgagaatttccttctggccttcatgggtaaagagtcattctttttggggagataagtgaaaaagaagaaactggagttaagaacaaaagtagaggtaaaatagattgcagagaaggatagaagttcctgcagtgactcttgggaaggatgaataatgataagacagtgggtaatagttccagtgaggagagacatgagttcaattatgtgtaaggggaagtcgcaaaggctgtgctcagccatgccattacgaaggacaaagctaagaggatctgatctccactgttggagaagaagtttaggaattttttttttttttttttttgagaaggagtttcactcttgtcgcccaggctggagtgccatgacatgttctcggctcattgcaacctctgcctcttgggttcaagcagttctcctgcctcagcctcctcagtagctgggattacaggcacccgccaccatgttggctgatttttttgtattttcaccatgttggccaggctggtcttgaactcctgacctcaggtgatccacccgccctggcctcccaaagtgctgggattacaggagtgaactactgcgcctggccgaagtttaggaaatttttaactgtttatcagttctgtgaaggtaggacttcatgaaatatttttcgtgtgtgaaataacttacagcttataaatttctcttttatttcctttcctaaatatttaatcattaaagctaaaccatccgatattgagtcatgacaagcaattgtgtcctttctccaattccattggtgctcttgtcaaactaaattttgtgccacacagactttacatttgacctggtatgccatattaagagcaaggaatcatattaccatacttgttaatactattctaagatgagtaatattgctttgatatgtttttatttagtgctatggttttaatgtccccaccaaaactcatgttgaaatttaattgcccatataatggtattggaaggcgggggcttttaacagatgattagatcgcgagggctttgtcctcatgaatgggttaatgcctttgctgtaggagcgggttagttattgcaggagtttcggcccgttttcctctctttgttgctcctttctgccatgagatgaccctcactagttgctgctggcactatgctcttgaacttccccaaacctccagaaatgtgacaaatattcttttctttataaattatctactttgtgatattctgttaaaacagcagaaaatgagctgaaacatttagtgtgttttattttattttagtggttgtaagagagatttaataagtttattcccaatcttgcttcctcaaacccatttttcccataagataatatgtttctcaattcctattttcctaaagcttatagagcttttagggaattaaatctgctttcatcaggatgtctcaaaatttggtactaacttgaagcaattggaaaggtagtgttataccagagcattctttgcagaattcaattctactctacttcttaggggatctaatatgatctttatctgttcttctctctgtcttacattctctgcttctgttatcttccaccacactctggttcagccttagccctgtgttgggtcttatgctggggcagaagtcagcttggcaatgagagtagaagaattttagttttctaatcttttagtcttacggtattatgcaacatgtgccactgaggtcatataaataaagatgtctcacaggcttttctgatctaactgacttaaaaaaacaaaacaaaaccctgagaggccttgtgtctgtcttcatgcccactttacctgctgaaattcggaaggaggaaactcacgtggttagaatactgtactaaactgatgtcatagaaccagatggtattttgttcactgctgtgtacagcacctgtctcagtgtttggcacatagtagattcttaatacattggacagattttatcttcacattttcagacaatattttctaggttgaacttgctgtaattatcagtgcagatgaaacaatagcttcagaaatgtctgctttatttttcatgggataataagtgcctcatattggatcaagttaaaagttctgtttattcgaggggtgagatattgaagtaatggaactagaggaataactttgctaatagaaaactatatttttagtacagggtggagaaaacaggtaaaaaagaatggaagtgttgttttttaatgcctgccaattaaggagtagaggttttgaattgtctgatttactgaatgatcttatgtaataccttatttgtgctcacataaatacatcatatacacactttatatatttttatttatttatttatttatttttggagatggagtctcgttctgttgcccaggctggagtgcagtggtgtgatctcagctcactgcaacgtctgcctcccaggttcaagcagttctcctccctcagcctcctgagtagctgggactagatgtgcacgccgccatgcccggctaattttgtgtgtgtgtgtgtgtgtgtgtgtattttagtagagacggggtttcaccattttgcccaggctggtcttgaactcctgagctcaggcaatctgcctgcctcggcctcccaaagtgctaggattacaggcgtgagccaccgcgccggcccatatacacactttaaaaatacctcatctttattgactgctttctagaaatgggtcaggcactgtactaaaaacataacatgttcttactcagtacttacaataatcctctgagatggtactcttccccatttttacagattaagaagagggcttatatcaaatattaagtaacttacctaagatcatacaactcataggtagaactttactctgaaacctgtgtgtctaatcaccatacctatggacttgactacaagatatgtgtgggagaatgcaaaatgttaactgtttgtactggcaccgaggctcactgttctcttctatgtatgtttgaaaagttttatttagtattctaaacttccgttttctcattgaatagggatgattatagtagtatttaccttagtggtaacatgaaataaaacatgtacttgtaaaacattttgcagagtgcctgttcattataagtacttgacaaatagtaactattactgttttcctggacagtctgatcaccattactattaactataaccaaatttattgagcacctgggacactctgcgtctagtgctttacgcatcttatctcttaattatcacaaccatcttgaaaaagagaaggtattcccccaattcaaaaatgggaaaattggtactagaggagattaaataaattaaggtcacagagcagagtagtggtggaactgggacttgaactctaggttccgttgagttccagtgaattcatcagatttttgcttggaaaatataaattttatgcattagaatgtatatcagttaaggatgtcaaaatcaattttggtcaaaatcttcacattaatttcaaaccaagtatcagttgaacatatggcattatctgtaactccttttttttttttataaatttagagttgactgactacttcaatatgcatgtttttattaaaaagacagttattggttgctattttaacgtaattatactgtttctttagttttcattaagtggttggtttgctttttttcaggtagatatagttgtaggtactccgggaagactagatgacttggtgtcaactggaaagctgaacttatctcaagttagattcctggtcctggatgaagctgtatgttgaaatataatcatactttttaaaaagtttacttatattttttgagataaaatatataaaatgaagaagaaatataattcagtcatgatcctactacctagagataatcattgttatcagtttggtatattttcatatactttttatttatatattattttatgtagttgaaatcaagatatgaggaatctgggaaaaattttaaaaatgtaatgtcataagtatttcctgtaattgtacataatttataaatgctgtctagtggtctattatatggctacttcatggtatatttaattactcttatttctaggtatgtaggcagatttgatttttgctccaaataaccagctttgtttgtacatacattttctacatactataaatttgttccttgtgtcagagatacaaaatgtagaccatctggaaggacataaatgtgtttgagtctcttagacatacttccaaatcattttcaggttgggttacctagttcctcagcactgagggtttttaattttttatatgaaaagtctgttgaaggatatatgttagaagctgttgactgaaattttcattctagattattagattatggttttggattgcttattgtcactttttcatattttagtcacaagaaacttaaaattgaatttataaattatctttatccaacaaaataattttgaaaatataggactatgtatatgcatgaattagtttccttatattttgtttgatttagaaaaaagatttttgatactgattaaaacttacgtttttttccatactgattaaaaacttaatttattctttgtttctcatgcaggatgggcttctttctcaaggttattctgattttataaataggatgcacaatcagattcctcaggttacctctgatggaaaaagacttcaggtataaaatttatcaatgcatcttaaaatgcatgtaaacaattgttatgtataatgttacgggatcccagggggtgttgcttttctggctggaaacctctgcggctagtgatgcccttgcccgggttttgctcagttccacccacttggcctggcaggctgtgctcagctctcactaccagcctggaccccatgcctcccaagggtgagccaggcgcggagtggtgaggcgtgtatgagcgaacgtggggtctggccatggcacacagccaggcacattggctgcggcagggcgggtagctccaggcactggcatgggcaccggctctctgtgaggctggtggccaggccccgaggcttcaggtcttccccagttgaaggtggggcttcaccggggactagcccccttccgcccaggagcctgtctgcctcctgctgctgttcatggtgcccagactgttcatgccaagggacacgtgcaggccagcactgggccgtcctcagcctgccttggccctccttccgtgttcgctggcgcccaaaggctggaaggggccaaagtggcagtgggttggtgtatcaatgctacctcaagtgtgcacacccagctggcccaagcttgagacagtgcccaacctcggccttaactttgttctgtgatcagagtgggtgttgacagcagggagaggccaggcagtggaagcagacatctccgaacctgtgggggcaagggagggccttttagggccccccgagtgcagagatgtctgggtccgcagccataacttgggcagctgcagccatgcctgggatggtggagctcctgcctgccctggctcccaccaccaccctgggcccagctccatctcagggctcctctctctctgcccctctgtgcccaacctcactgctccccctctggcaggcgactcggcccagccccattgaggtggctcccagggcagtgggctccagggtcctcccaggggtggactctagagactgtccgcctcctctctgtgccctccccgcagcagtggcgggcaagagcggcaacacggggccagggtccagagtggtggagactctgggcctgggagcgggtcctgcccagcttcgcgaaggttggggtggcccagtcagctgccttggggatgcggggcacagggaacccaccaccaccactgcagctcctgcagcctctcttgctgccgctgctcatgtctccccgctgcagccagcttgatggcagcagctgctcctgacggcctgttgctgccatcattaatgcttatgagcagggtcaaagggtttttgtttggtcccctctcattaaatttattactatgtaaaatgtttgctttacgttactggacgaaatagtatactcaaaggtaacagtcttaaaagctgcttttagaaatagaaggaaatttgaggaaattacttgggtgttgcagaaaactacaagtaaaaattcttagttactttgtcctgtagaccgtttagggtgtgtattccagattattagtactgttgcctgttcgaaggaaaaataacttcagctattgaaaaattgttgtcttctctgtagttatatccttctttcttaggaagcatttaagaaggacaagcttttgagagaaggggacagacagtaatacaggatttttggcttacaaaaatgactcattttacttagtttttgtagggacgtgaggaagagatggcatgatttctatgtgacagtgagggaactgaacctcagagaggttaacctgcccaaagtcataactctagttgtcgctacatagagtaaggtgttgaacttatctttggagtctaggctagcacactttgtgtttcatatcagtgtttgtgtgatttattaattattattataaaagttcatctcaatttggggtttcctcttcttaggtgattgtttgctctgccactttgcattctttcgatgtaaagaaactgtccgagaagataatgcattttcctacatgggttgacttaaaaggagaagactctgttccagatactgtacaccatgttgttgtcccagtaaatcccaaaactgacagactctgggaaaggcttggaaagagccacattagagtaagtggtttataatattaacatttatgtagaataaagcaatttataaactaggtcagccttgggctcttagtgatgcttaaggcaatcagttattgtatcaaagaaaagtccaatacatcgtaaacccttagacctttaaaaagcactgaataagtgatggactccatcttttgtttttctgtcttcgtaatattacttttgtgatcagcttccttgatacagtctttataagtaaataacatatatttatctaatttcagatacaatgatttccatttttagtagtattttagtaggagccctcatctgtgtcctcttgatgtactttgttctaaaaatcaatttcatgtggtcatcttgtcactttcttcactgtgattagatttgcctttatatagtaaggttatatttattataaatatacaatattttagaaaccacattttcattattattattacctttaaaagtggtcttagacctatagttaatgaaaggtttttctgaatctgaagaatgattttgcctacagattatattatgaagacatatatctgaaatacagtctaaagacaaatataaatctcccttttaaaacatgacatatattctgaatcattatttaaccactcctctatcctgtttttattccttgcttttgatagactgatgatgtacatgcaaaagataacacaagacctggtgctaatagtccaggtgagttaaaagagtcaaatgtgttgaaagattttgaaaatgaaatttataccttacctattctcatgaaggatgtgaggtgacctgcaaaattaaaacaggaaatttggaaataaaggcaacaaaaataataaaaaagaaatggggaaaagctgatactagtcaacttagaggaatatgaatcattgaatttatttttaattttttgagacagagtcatgttcttgtcacccaagctggagtgcaatggcacagtctcagctcaaggcaacctcggccacccgggttcaagcagttctcttcttgcctcagcctcccaagtagctgggatcgcccgccaccatgcctggctaatttttttatatttttagtagagatggggtttcaccatgttggccaggctggtcttaaactcctgacctcaggtgatcctcccacctcgacctcccaaagttctgggattacaggcatgagccaccatgcctggccttaatcattgaatttagatgttagtctcctggcatctaaatcactttttttttttttgtttttttgagacacggtctcactctgtcacccagactagagtgcactggtgcgattttggctcaccacaacctctgcctcccaggctcaagcagttctcctgcctcagcctcccgggtagctgggattacaggcacgtgccactaccacctggctaatttttgtgttttcagtagagatgaggtttcaccatgtgggccaggctggtcttgaactcctgacctcaaatgatccacccgccttggcttcacaaagtgctgggattataggcgtgagccactgcacccagccacaaatatttttgattatctaattctcatcataggaaaacagcgaatttttctagagagattattttatattgaccctgaattccataagaaatatcatgtaagtttctcatatcaggaatattgcataagaaagaaaactttctttagctatagctttgcaaaagatactgaaattgttttgaaatagttgttgacttttttgtgtgtggtagaatatacataacataaaacttagcattttaactattagtgtacagttcattggcattaagtacattcatattgttgtacaatcatcaccactgtccatctccagaactttttcatcttcttaaactgaaaatctgtatcattaaatatttatcaatttttaaaaagcctaacattaaattccgcctcaatgaagattcttctttgcagagctgagactctttgtttcaggttaaatagtgttttgaaaatataggaaggtacatcatgatacaaggttggtgcttagaaaacctagaagaatggatcttaaacccattaggctgcatgtctgacatgagatgtttcaggtggatcattcattggtgagggtcggactctgcttgcttcatggttgaatttcaactatatcaaaatggtgaattatctgaaatcttgattaaagatttgaactcagttttatatgtaggtctaaattaacaagacacatacttagttatccttattgttggagaagagcagagacactgtttgaaaatctgtcatcccaaatgcattttataaaattccagtttttattgcttcttatatttttcttgcataagttttgcttagtttagactaacaattagagatgatcagagagaccttagaaatatgttgggtcacagaattaaagtcttacattcagtggttgaggaataacaattatagcacagcttcacactgaaaaatagagagttggaggatggtgactaaaaaattactagagttttgtgttaaggtttttactgcgtagagtgaagtatgaactttctggtatttagattgatttagaaagtacattaattatttttaaaaggagttaaaataattgtataaagcatttattgagcatttagggaagttcatgcaaggcagaatatgatttgttcttcatgagagataacagttttgctgtatgtatttctgttaatttgtacgtgtgtatgtgtgtgttccctcataaggggtacggttatgggtgtttatataccccataaagtagcataaaaaatattaacagaaacaaaaataaatgaatgaatggtttaactcactgttttactctatctttacttcttgtccttatctatatataatacttttattaaaacaagtattcttttttaggaaaattaagcagtcagtctgtgactataattatgtgtattcatgacaagttcagattgaaattctgttggtttttgttgttgttatgatattcaagagatgtggtctgaagctattaaaatcctgaaaggggagtatgctgtccgggcaatcaaggaacataagatggatcaagcaattatcttctgtagaaccaaaattgactgtgataacttggagcagtactttatacaacaaggaggaggtaattttttctcacttgaaataaattgtgtttatatcctcttgtaatagattattaatctcatgttgatgcaatctagaacacatgcacagaatttaaagcagttgatggcatattttaagtatctatgcttattcagtacttttccatatgataagccctaggaaaaacaagagagaattttccacgtaggtacattttcattacagtaaacttgaatcacagcatcctaagagttttatattatatggaagaaggataaagtaatttattagtcttaaaatttaaaatatgatcactgaaataatagaatgtatgtcttttaaaccagtagatggggaaaggggaatgaggaaaaaaaacctaaacaagagcaagaaaggaaggggaataaaatgagaaaaattatggttagaaattatagaataagatcaatgttggaaaaatctgaatgtatgagtaaacactgtaagtatcagtggacacggtcttctgttataaagcatggattgttggactggatgaaatctagcaatacgctgtttacatggagcatacccaaaatctgaggacatagaaagatggaaaaggaatgaaaaaatattatgcatgtgtcagctaaaatattaaccaaaagaaagccagtctagctatattaataagagttgcagtagactttaagacaaatattactagaaataaagagtcactatgtaataaaatatccaagctacaatggaagtataagggttcagattttatgcttcttataacttcgagaat

SEQ ID NO: 242 - DNA, 29070 bp, Homo sapiens
  source 1..29070: mol_type = other DNA
acctgcggctccgccccagaggccgccatcttcctgaccacccgaaaggccggacctactccccggtgcatcttgggatcagggcggggccctgagcgccgccatgcttttgtacggcaggatcgcaaagcacgccgggaccggttggtttggttttgaagacgtggatggcgggaattctcgcttctggcctgggtgagctagaagggagaaggtaggggaaagacccattgtcggaccggaccgtggccagggtggcgggctgaacggccttcttaaaactccttccgtggccgggaagcccgctggaccagagtagccgtggcctcgggagcgcgccggggccgcgggatgggcgcgggggtgggcatggactctgctggctcggacgatgggagagggcgggcggctcaggaaaggggatcctagccgtgacatttgtgtcatccgcggcccaggggttgtgcctgagtggtgtgtgccctgccgtctgggtttgaatgggactagatgtgatgtgactgttgccatttttcttttattagcaaggacattggagtccctatcaccggttgcctagacaacttcatgggaaggcccttgggaatctgagatggagcaggcgaaccctttacgtccagatggcgagtccaaaggaggtattcagagggtcgccgcctccttcctgctgctgcccaaagatgacccgcaggctgagagagccctttcctcctggaactgacgtgggacctggcctgtttgggagcagaatagtgaaaggaactaacattgaagacaaagggacaggcagccaagattattcgaggaggaaaaatggcttcgtttctaggctcccaccccttttgaaacggataagttgcatccatcatatgctcagtgtttatattctgaactgcggttctagccagggaggtccctttcctctccccggattttttgggccatgtatgcattactcttgagggagggccagtgtagggcagtgactttagtgttggctagaactggttttgagtgttggctctgccatgataaatattgtgaccttaggcaagtcactttattctctgcctctgtttcttcatctggaaaatggaggtgaaaatagcactgtagttgtggttgtggaaaaagtatttcttttgtggtggaaaagtattgaactcagacttttcaagtgaagcatttagcacatgtctaatatataggaaatattcaatgaaaggcttaattctttacatactttgtgtcttaaaatgtagaaggtgtttaaagaatgcttgttagagttgcttagaattacgaaactattacttttacttagtccttagtcaatcctttggaaactgagatttgcgtttgaatttctgtccaggagtaagttgctttcttctttagtgcctagtaatatttgtggacagttctggttttgtgtgactttatgttctttgctactaatactttttagaactttgaaatacttactcaagcctgatgcctaaatccaaagggttctacgttagtactttgggaaagcttgccataaaacctaacttaaattacagttttaaaaagaatttctgagcgcgtcagtgaatttggttatcctatttttctctgggtcatcattatcattgataacagagaagtaactatattcagcctaagatgacttaagctgagactttagataataaaagtatatggggtaagatttattgttactttaagactaaaaataagtttggtgactttatgtagtggaaacatgctacactcaggagtaacctgttctctagtccaggccttatttcatttctgttaaagtaagtgatgaggtggaagttttggattatcaagagacttagaccagtctccttattctctacccaaaacaatatttaaacacttagctgttacccatactggttttatccctctgcttgtttgatttcagttttttgcttattatttgaattctccccactcatttgagaaggaaggacatggagttgtagttgcaaccagatgatttattcaaataggcagggattttgactttttttgggacaaagctgactggctaggatgagatgcaatcataacttccaaggtaaagcaggcccagcagatacactccctcttttctgtagtagcaacgctaaacaacaacgctacccccttggtgtagagggaatcaggtcggtaaagaagctgggcaggtttgagagcctgagaagagggctgtgtggaagtgcctagagaaggagcagcatgatactgttttgaacacctacttatctcagaaactttgggaatattgatatctactgttttagtaatatagaatttccataaagtagaatttggtgaggcgtctcctctaccaccctaaattattctatgtgtgcgtgcttttcagatcacctcctggttggacattaatttttgtaagctccgtgaggacagggacttcgttttgccaccacagtatgaataacttccagcacggtccttggtccatagtaaattctcaatgcatagttgttggataaatagagattggtgaataaagcagttaatcacgtgctaattattaggactaatttatttaattagaattttggtttctcacgattattattgcggtaatgtgggtttttctgtggacatgagccaagtgaatgtaatctccaagagtgtcatgcctggttgtccgtgtttcggtaaacatttccggagtgttggccgggcgcggtggctcacacctgtaatcccagcactttgggaggccaaagcgggtggatcacaaggtcaggagttcaagaccagtctggctaacatagtgaaaccccatctctactaaaaatacaaaaattagccgggcatcgtggtgcatgcctgtagtcccagctaattgggaggctgaagcaggagaattgcttgaacctgggaggtagaggttgcagtgagctgagatcgcgccactgcactccagcttgggcaacagagtgagatttcgtctcagaaaaaaataaccatttccggagtgtttaccatgtgtaaacactttgtgctagggttaagggatccatgggtgaacacaaatgcacacggtccctgattttggaactttaaggttcagtggaaaagataagcaaatcaaataatcacactaatgaatatacaattaaaactatagtggccgggtgcggtggctcacgcctgtaatcctagcactttgggaagccgaggtgggaggatcgcttgagcttaggagtttgagaccagcctgggaaacatagtgagaccccatctctttatttaaaaaacaaaaacaaaaaaactatagtattgtctcagaaggatctttgagagcttatgagctggcacctgaccttgttctgaaggtgctacaaaggtttccctgaggaaatgctgcttgcattgagtgctaacgagctagagtagctgcaggtgaaggtggataaggggcggctgtggaagagcctttggtgtgtgtgttgggggtggggggatcaggtcagtaaagacgctgggcgggtttgagagcctgagaggaggcctgtgtggaaatgcctagagaaggagcagcatgatactgatgagggtaagagagatccagaggccagtaggcctcgtaggcagtgtgaagtcatcgaaaggctttagccagctggatgacacgatccagtttagattttgaaatatggcttcagtgtatgggccacctaggaaacttgtaataggccagaaatggtagtagcttgaactacaatggtggcattgcagatggggaaaatggaaatattttagagatactaggaatgtatattcaataggatctggtaatggattgggactgggtcagggagaaggtgtgaggaagaaagtactggtttacacagctatagatggataatggttccagtcatggaggggtttagaaggggagatgatgaattcagtcttggacatgttgattgtcaggttcctgtaagtcttccaagtagatacactgagaaggcaggtggatattctgctttctcaagaagcaggagagaggtataagctagagatacatatttgtgtggcatcgacatgtatggccattaaggctgtgggtactgatgagatttcttctggaaagaagaggtcttaggactgagctctggaaaatttcagcatttaatggtcaaggaggagagtaggagccttcaaagcagaaagtggggtcagagaggtaaaatgtaagtgtcacaaaaacaggttgtctgttgttcatcactatgttcccagtgcctgaaatagtacttggcacaaaatagatgcttaataaacatctgttgaacaaggcataccaacaggccgctatgctaagattcagaggaaaagagggtttcgtgaaggtggtgatcagtaggagcatatagtgctgggaggtgagataagggagcttgaaaaatgtcctttgggttcagcaacatggatatcactgttgatcttagagtggttttgtaaaataatgggaacagaagtgagtttcaagtgggttgaggtatgagtcacaggcaagaaaatggagaaagtgagtacaagttgagcactgaagatccaaaatctgaaatactccaaaatctgaagctttttgagcactgacatgatggtcaaaggaaatgcttatttccagttttggattttcagatatgggatgttcagccagtaagtgtaatgcaaatactcccaattccgaaatctgaaacacctctagtcccaaaacgttcggatactcaacttgcatggacaactcttttaagtagttttcctggaaaggaaaggggagaaaagggagatagtagctgaaggggatttgtgggcaagaataggcctgtgagtgtatgaaattgtgtgtgtgtgtatgtgtgtgtatatatatatatatatatgagtgtgtgtttgaagacagttgagacttgagcgtgtgtggaagggaaatgaacacagcagagaaaagggtaactgatcatttagggtttctgagaaagcaaggggataggcctcaatgagtaaaataggataattctgcatatagtgcgtgtctgtttctatttgatctcacacaaattttttttttttgagacggagtctgtcacctaggctggagtgcagtggcacgatcttggctcactgcaagctccgcctcctgggttcacgccattcttctgcctcagcctcctgagtagctgggactacaggtgcccgccaccacacccggctaattttttgtgtttttggtagagacggggtttcactgtgttagccaggatggtcttgatgtcccgacctcgtgatccacccgcctcggcctcccaaagtgctgggattacaggcgtgagccaccgtacccggcccgatctcacatacttttttttaatggttttattagccataaaaaccataagaggtttctagtcttaattggataggtgaatgagataagtttttggattccgtcccaaggcaaggagagaagattaaggttttcatatatgttcatccatatgaaccctacaaaatagatgctgggtgtacttaagaagctcgattaaataaagtctggggcttcctttttttttttttttttttttttttttggagacagtcttgctctgtcccccaggctggagtgcaatggcactccaatggagtgcagtgatcttggctcactgcaacctccgcctcctggattcaaacaattctgcctcagcctcccgagtagctgggattacaggcatgcgccaccatgcccggctaattttttgtatttttagtaaagatggggttttgccatgttggccaggctggtctcgaactcctgacctcaggtgatccacccgccttggccccccagagtgctaagattacaagtgtgagccaccgccctcggctgtgagagggcttctctccggcctgtggtaaagctagagaatcatcctttacacactagagatgtggatttgcgataaactgcagacctagataagacactgctgcctaatcagcgtgtgatagttcatatcctctctcgggctgtctttgaggaggatcctgttttacatcactctccaacctaggaggttgatgatctttgatttcaattgttagctcccctggttttataaattgacagatatctaacaattcagctggccacaaagttctggtaaaaaaaaaaaaagagtcacctgttcttccctgagatgcttcctgttgccacagtgagaaatcctcagcttcttgtaaaattctccttttactctccttaggtgttttagctcacttggaaaggctagagacccaagtgagcagatcccgtaaacagtctgaagagctgcagagcgtgcaggcccaggaaggtgctcttggaaccaagattcataaactaaggcgtctgcgagatgagctgagggctgtggtgcggcaccggcgagccagcgtgagtagaagggtggtatcagcagttcctttagagtataatgaacaaacgtgatttgggaattggtgaattggccattttttataatgtgttttacttgtgatcttactggattgattgcagtccttgatccctcaaatgatcaaacctgtagagtttggccaggcacggtggctcatgcctgtaatcccagcactttgaaaggcgaggcaggcctatcgcctgtggtcaggcgtttgagaccagcctggccaacatggtgaaaccccatctctaccagaaatacaaaaattagccaggcatggaggcaggcgcctataatcccagctactcaggaggctgaggcacgaattgcacctgggaggcggaggttgcagtgagctgagatcgagccactgcactccagcctgggaaacagagtgagactccgtctcaaaaaaacaaaaatccggtagagttacagtgaatatcacctaacattttttaatttttttattatactttaagttttagggtacatgcgcacaacgtgtaggtttgttacatatgtatacatgtgccatgttggtgtgctgcgcccattaactcttcatttaacattaggtgtatctcctaatgctatccctcccccctccccccaccccacaacaggccccggtgtgtgatgttccccttcctgtgtccatgtgttctcagtgttcaattcccacctatgagtgagaacatgcggtgtttggttttttgtccttgcgatagtttgctgagaatgatggtttccagcttcatccatgtccccacaaaggatgtgaactcatccttttttatggctgcgtaatattccatggtgtatatgtgccacattttcttaatccagtctatcattgtaggacatttgggttggttccaagtctttgctattgtgaatagtgccgcagtaaacatacatgtgcatgtgtctttatagcagcatgttttataatcctttggatatatacccagtaatgggatggctgggtcaaatggtatttctagttctagatccctgaggaatcgccacactgacttccacaatggtggaactagtttacagtcccaccaacagtgtaaaagtgttcctatttctccacagcctctccagcacctgttgtttcctgactttttaatgatcgccattctaactggtatgagatggtatctcattgtggctttgatttgcatgtctctgatggccagtgatgatgagcattttttcatgtgtcttttggctgcagaaatgtcttcttttgagaagtgtctgttcatgtcctttgcccactttttgatggggttgtttgtttttttcttgtacatttgtttgagttcattgtagattctggatattagccctttgtcagatgagtagattggaaaaattttctcccattctgtaggttgcctgttcactctgatggtagtttcttttgctgtgcagaagctctttagtttaattagatcccgtttgtcaattttggcttttgttgccattgcttttggtgttttagacatgaagtccttgcccatgcctatgtcctgaatggtattgcctaggttttcttctaggatttgtatggttttaggtctaacttttaagtctttaatccatcttgaattaatttttgtataaggtgtaaggaagggatccagtttcagctttctacatatggctagccagttttcccagcaccatttattaaatagggaatccttccccatttcttgtttttgtcaggtttgtcaaagatcagatagttgtagatatgtggcattatttctgaggcttctgttctgttccattggtctatatctctgttttggtaccagtaccatgctgttttggttactgtagccttgtagtatagtttgaagtcaggtagggtgatgcctccagctttgttcttttggcatgggattgtcttggcaatgggggctcttttttggttccatatgaattttaaagtagttttttccaattctgtgaagaaagtcattggtagcttgatggggatggcattgaatccataaattagcttgggcagtatggccattttcacaatattgattcttcctatccatgagcatggaatgttctcccatttgtttgtgtcctcttttatttcgttgattagtggtttgtagttctccttgaagaggtccttcacatcccttgtaagttggattcctgggtattttattctctttgtagcaattgtgagtgggagttcactcatgatttggctctctgtttgtctgttattggtgtataagaatgcttgtgatttttgcacattgattttgtatcctgagactttgctgaagttgcctatcagcttaaggagattttgggctgagacaatggggttttctagatatacaatcatgtcatctgcaaacagggacaatttgacttcctcttttcctaattgaataccctttatttccttctcctgcctcattgccctggccagaacttccaacactatgttgaataggagtggtgagagagggcatccctgtcttgtgccagttttcaaagggaatgcttccagtttttgcccattcagtgtgatattggctgtgggtttgtcatagatagctcttattattttgagatacgtcccatcaataactaatttattgagagtttttagcatgaagcgttgttgaattttgtcaaaggccttttctgcatctatcgagataatcatgtggtttttgtctttggttctgtttatatgctggattacgtttattgatttgcatatgttgaaccagccttgcatcccagggatgaagcccacttgatcatggtggataagctttttgatgtgctgctggatttgggttgccagtattttattgaggatttttgcatcgacgttcatcagggatattggtctaaaattctcttttttggttgtgtctctgccaggctttggtatcaggatgatgctggcctcataaaatgagttagggaggattccctctttttctattgattggaatagtttcagaaggaatggtaccagctcctccttgtacctctggtagaattcggctgtgaatctatctggtcttggactttttttggttggtaggctattaattattgcctcaatttcagagcctgttattggtctattcagaggttcaacttcttcctggtttagtcttgggagaatgtatgtgtccaggaatttatccatttcttctagattttctagtttatttgcgtagaggtgtttatagtattctctgatggtagtttgtatttctgtgggatcggtggtgatatcccttttatcattttttattgcgtctacttgattcttctctcttttcttctttattagtcttgctagcggtctatcaattttgttgatcttttcaaaaaaccagctcctggattcattgattttttgaagggttttttgtgtctctatttccttcagttctgctctgatcttagttatttcttgccttctgctagcttttgaatgtgtttgcttttgcttctctagttcttttaattgtgatgttagggtgtcaattttagatctttcctgctttctcttgtaggcatttagtgctataaatttccgtctacacactgctttgaatgtgtcccaaagattctggtatgttgtgtctttgttctcgttggtttcaaagaacatctttatttctgccttcatttcgttatgtacccagtagtcattcaggaacaggttgttcagtttccatgtagttgagtggttttgaatgaatttcttaatcctgagttgtagtttgattgcactgtcgtctgagagacagtttgttataatttctgttcttttacatttgctgaggagtgttttacttccaactatgtggtcaattttggaataggtgtggtgtggtgctgaaaaaaatgtatattctgttgatttggggtggagagttctgtagatgtctattaggtccgcttggtgcagagctgagttcagttcctggatatccttgttaactttctgtctcgttgatctgtctaatgttgatggtggggtgttaaagtctcccattattactgtgtgggagtctaagtctctttgtaggtctctaaggacttgctttatgagtctgggtgctcctgtattgggtgcatatatatttaggatagttagctcttcgtgttgaattgatccctttaccattatgtaatggtcttctttgtctcttttgatctttgttggttgaaagtctgttttatcagagactaggattgcaacccctgctttttttttgttttccatttgcttggtagatcttcctccatccctttattttgagcctaagtgtgtctctgcacatgagatgggtctcctgaatacagcacactgatgggtcttgactatccagtttgccagtctgtgtcttttaattggagcatttagtctatttacatttaaggttaatattgttatgtgtgaatttgatcctgtcattatgatgttagctggttattttgcccattaattcatgcagtttcttcatagcattgctggtctttacaatttggcatgtttttgcagtggctggtaccggttgttcctttccacgtttagtgcttccttcaggagctcttttagggcaggcctggtggtgacaaaatctctcagcatttgcttgtctgtaaaggattttatttctccttcacttatgaagcttagtttggctggatatgaaattctgggatgagaattcttttctttaagaatgttgaacattggcccccactctcttctgacttgtagagtttgtgccgagagatcagctgttagtctgatgggcttccctttgtgggtagcccgacctttctctctggctgcccttacattttttccttcatttcaactttggtgaatctgacaattatgtgtcttggggttgctcttctcaaggagtatctttgtggcgttctctgtagttcctgaatatgaatattggcctgccttgctagtttggggaagttctcctggataatatcctgcagagtgttttccaacttggttccattctccccatcactttcaggtacacctatcagacgtagatttggtcttttcacatagtcccatatttcttggaggctttgttcgtttctttttattcttttttctctaaacttctcttcttgcttcatttcattcatttcatcttccatcactgatgccctttcttccagttgatcgaatcggctactgaggcttgtgcattcgtcacgtgggtctcacgccatggttttcagctccatcaggtcctttaaggacttctctgcattggttattctagttagccattcgtgtaatttttttcaaggtttttaacttctttgccatgggttcgaacttcctcctgtagctcggagtagtttgatcgtctgaagctgtcttctctcaactcgtcaaagtcattctccgtccagctttgttccattgctggtgaggagctgcgttcctttggaggaggagaggcgctctgatttttagagtttccagtttttctgctctgttttttccccatctttgtggttttatctacctttggtctttgatgatagtgacgtacagatggggttttggtgtggatgtcctttctgtttgttagttttccttctaacagtcgggaccctcagctgcaggtctgttggattttgctggaggtccactccagacgctgtttgcctgggtatcagcagcggaggttgcagagcagcgaatgttggtgaacagcaaatgctgctgcctgatcgttcctctggaagttttgtctcagaggagtacccagctgtgtgaggtgtcagtctgcctctactgggggatgcctcccagttaggctactcgggggtcagggacccacttgaggaggcagtctgtctgttctcagacctccagctgcgtgctgggagaaccactactctcttcaaactatcagacagggacatttaagtctgcagagttttctgctgccttttgttttgctatgccctgcccccagaggtggagtctacagaggcaggcaggcctccttgagctgcagtgggctccacccagttcgagcttccaggctgctttgtttacctatccaagcctcggcaagggcgggcgcccctcccccagccttgctgctgccttgcagtttgatctcagcctgttgtgctagcaatgagcaggctctgtgggcgtaggaccctctgagccaggcgcgggatataatctcctggtgtgccgtttgctaagaccgttggaaaagcgcagtattggggtgggagtgacccgattttccaggtgccgtctgtcacccctttctttgactaggaaagggaactccctgaccccttgcgcttcctgggtgaggcgatgcctcgccctgctttggctcacactcggtgtgctgcaaccactgtcctgcacccacggtccgacacttcccagagagatgaacctggtacctcagttggaaatgcggaaatcacccgtcttctgcgttgctcacgctgggagctgtagactggggctgttcctattcggccatcttggctccaccccctcacctaacatttgtcaggcactactggtaagccaggcaagttcttcctgacaggttcttaacctgccctaataaacacctaagtttgttacctcaatcatatacatattgggtatatgcctggtagaattgctgagtcataggatatgcatattcggtttagtaaatactgccagtttttgaaagtgattgtactagttttacattcccagcaatagttgtataagatttcccttgttttgcatttttaccaatacttaaagtggcctgccttgagttgttgatacttgtgtcatttttgacatctgtcatccagactcaacctcctagggagcttgacccttcccttttttcagttttctctctagcctaggttcagtcagcaagacctatcagatttttcttttatattgcctttgtccttcctccattgccacagctcaaatattagtcatatatggagtaaatatcaggtgatttggatatcaggattatgacagtagtctgccagttggtgcatcttctagtatttctgcttttccaataaatcctgcacagccaagaaaatgcttcatgaaacaccgcaccattgctctgctcaaaagccgtcaacaacccttcattgcccattggatatcagccttcctccccctcttccttttccacctgtacctctcttccttcctcccttcttccgttctttttttttaattaaagtgtaatatatatgaagtgcactatgacagagattaaagtatagagcattaccaacacccagaagcctccagtttgcctcttcctagtcttctcttaagtcttctcttaaggtacccactattctgatttctgtcaccatacataggttttacctgattttgaactttatataaatgttaaaaagctaatttatagcttaaaaagtacaaactcttatgtctggcttcttttgctgaatgttctgactgtgagattcacctacactctgcttatagtgctcattttttttattgctgaatagcaattctattttatgagtatactacatttatttacccattctactgtgatgacatttgggttattggggttatttcactttgggacaattatgaatgctgctgctgttaacattttgggtgtttctgtcctttgatataaaaatatacacttatatattgggtatatgcctagtagaattgttggttcataggatatgcatgttaggtttagtaaattctggcagtttttgaaagtgattgtaccagttttacattcccagcaatagtgttaaattccattgtcctgcatttttaccaatacttgctattgtcagttttaaaaatttgtcattctggtgggagtgtaataatatgtcattttggattgaatttgcatttgcttcataaccagtgatggtgaatccctgtattgaacatttgaaaatcttctgttgcaaagtgtgctttattcaaggcctttgtgaaatttttattaggttgtccatctattaaattgtagaaatctttacatattttgagtgagttcttttttgggtatctgtattagagtcttccttagactgtggcttgtattttcactctctaatggtgtcttgtgatgaaaatctttgttttaatgaagtttgatttagtaattaaactttattcttattgcccttgtttcttgtttaataaatctttgtctaacttaagatcatgctgatcttttccaggtattttattttttttattttttttgtttttgagacagagtctcactttgttgcccaggcaggagtgcagtggcacgatccggcaccctccacctcctgggttcaagagattcttctgcctcagcctcccgagtagctgggattacaggcatgcgcccagctaatttttgtatttttagtagagacggggtttctctattgttggccaggctagtctcgaactcctgacctcaggttatccacccgcctcagcctcccaaagtgctgggattacaggcgtgagccgccgtgcctggccaggtaataaaagagccacctggctcttttatttatagtttgtgaagagttttaatcatgatattatgatattaaattttctcaaatatttttactgcatatattaagggaatcatatgttttctcccttattttattaatttgtggtatatattgattgctgtttaaatgataaattgccctcacattctcatagtaaacctaatttggtttgatgtatcatctttttaatataatgctaaatctgacttgctgatattagttattagaacttttgcatctaaattcatgagagagactgccctattatttttttgtggtaactttgtcaggttttggcatcaagttttatgttgctctcagaaagcaggttgagacattttccttttttttttttctattctttgaaagactttagataaaattggtgttattttttcttacattttgatgaggaattccccggtgaagctctttgggccttctctgtgggaaggttttaatttccgatccaatttctttgatcagcataagctgttcagatttcctgttttttcttgggtcacttttggtatgttgcattttgcagtttgttcattttatgtaaactctcacatttaaagtttgaaatttttttaaaacaacctactgtcttgtgactaggatggatcagtgatgatgtctcattttttattctgatattggtcatttgtgcttgctttcactccatttctgtctcctcgatcagtcttggtgtgttttatcacttttgtgccttttttcaaagaaccaacttttggctttgctgattttctctcgttcatttgttttgtattttcattgatttctgctcattattattttcttccattactctctgaattttagttgttcctttagcttcttgagatgaatactttattgatattttttagtcttcttttctcttaaatacatttaaagttaaaaattttccctctaaccacaggtttaaatgtgtcccacaagtttttctttttctttttctttttttgtttgtattttttcttttttgttttttgtattgttttttccttttataccccacaagttttgatatattttcattatcatttcaattcaaatattgttaatttccattgtgttatcttctttggcccgtgggtttgttttataagtgtaccaattaatttccaaaaatttgagtatttggttttttttttaagttactaatttatagcttaattccatatggtcagtgaatgactcagcatgtggtcagtttttgtaaatattccatgtgcattaaatgtggactttgcatttgttggctcttatattctacatatatcaaataggcctagtgtgttcatcatgttgtttaaatatcttacatccttagctgagtgtggtggcacatacctgtaatcccagctagttgggaggctgaggcaggagaatcacttgaacctgggaggcgggggttacagtgagccgagatcatgtcactctactccagcctgggcaacagagtgaaactatgtctcaaaaaaaaaaaaaaacttacattcttattgatttacttgtctacttgttttattactgaaatagattttttaaaatctcccactgtgattgtagatgaatttttccccttttattctatgtttctatatatattgggtggcaacaaatttaggactactgtatcttcctgatttagttgacttttttttattatgaaatattccttttaattttaattaaacttcttgccttaaaatctattttgatattggccgggtgtggtggctcacgcctgtaatcccagccgtttgtgagactagggtgagaggatctcttgagcctaggagtttgagatcagcctgggcagcatagtgagagcccctcatctttaaaacaaaattaaaaattaaaaaaaagtttactttgatgaatcctagtacaatagtaacttttttggttaacgtttgcaggttaaggttttttttttttttttttttgagatggagttttgctcttgtcgcccaggctggagtgcaatggtgccatcttggctcactggaacctctgcctcccgggttcaagcaattctcgtgcctcagcctcccaagtagctgggactagaggtgctcgccaccatgctcagctaatttttgtatttttagtagaggtggggtttcaccacgttggccaggctggtctcgaactcctgacctcaggtgatctgcccacctcggcctcccacagtgctgggattacaggtgtgaaccaccgcacccggcctgcagggtaagttttttctgtctttctgcttccaatctttaaatgaccttacgtttaaggtattcttcttgtaaatagcatagagctagatatttttaatccatcttgacaattgttgtctattgttattatttattattgttattttttttttgagacagagtctcactctgtcgcccaggctggagtgcagtggcgagatctcagctcactgcaatttctgcctcctggcttcaagtgattctcatgcctcagcgtcccaagtaggtgggattacagacgtgcaccaccacgcctggctaatttttgtatttttagtagagacaagggtttcaccatgttggccaggctggtcttgaactcctggcctcaagtgatctgccggtcctggcctgccaaagtgctgggattataggtgtgagccactatgcctggccaatgtttgtcttttaattggagtatttagtccatgaactttttttttttttttttgagacggagcctcgctctgtcacccaggctggagtgcagtggcactatctcagctcactgcaacctccgcctcctgattcaagcgattctcctgcctcagcctcctgagtagctgggattacagatgcccgccaccacacccagctaattttttgttttttgttttttgtttttttttttgagacggagtctcgctctgtcgcccaggctggagtgcagtggtgcggtctcggctcactgcaagttccacctcctgggttcatgccattctcctgcctcagcctcccgagtagctgggactacaggcgcccgccaccacgcccagctagttttttgtatttttagtagagacggggttttaccacgttagccaggatggtcttgatctcctgacctcgtgatccacctgcctcggcctcctaaaatgctgggattacaggcgtgagccactgcgcccggccaatttttttgtatttttagtagagacggggtttcaccatgttggccagtctggtcttgaactcctgacctcatgatctgcccgctttggcctcccaaagtgctggaattacaggtgtgagccaccgcgcctggcaagtccatgaacttttaatgtgattactgatctatttggatctcaatctaccatagtattttattgtcttatttgtcacgtatagtcaacattcctttagtgttagacacatatttacccttttcagtgctcttcattttcacatttccatctgcgattattttctttcagttaagtagctccttttggtacttcttttggtatcgctggcagtaaaatctccatatttgtttgactgaagacatctttatttcactatgttttttattttttaagagtatatttggtgagtatataattagatattagaatttattttctttcaaactttatatcattctgttgtcttctagggccatagtatcttgtcaggtgtgaagttttggccttattagtcaggtgttaatcttatgtttgtgaatataatatgtctttttcttcgggcttaagattttctttgtctttggtttttagcaattttagatcaatgtggctaagcatgatttttttttttatcctgtttggtgcttgtaaagcttctttaattgatgtttttcatctgttttacaacattggccaatatctctttaaatagtgcatcttctcagtttttctctatttctggggctcccatgtatgggtgtttttgtttttgttttctgtgacctatgtcttagtaattttctaatcttatttttttctctgtactttaatctggatatggaaaatatgcctactttccactccacgtaagatcttatttgtctagttggcttttaaatctattaaaattctaatttgagttactgtatttttttggttctaagatttccgtctcattcttttctgtatagattccagctctttggtctgggtttccatcttttagcctgttttaatggccatgccccattattgaaatagctgaatcccttggcatctgttctgttgtcttctttttcctcttggctttcagtcatctgtttctctttcctggtatgcctgtagttttttttttttttttttttttaattcaatgatgagtattgtgtatgaaaaaatatacggaggtcaggtgctgtggctcacgcctgtaatcccagcactttgggaggccaaggcgggtggatcatctaacgtcaggagttcaagaccagcctggccaacatggtgaaaccctgtctctactaaaaatacaaaaattagcgaggcgtggtggcgcacacctgtaatcccagctactcgggaggctgagggaggagaatggcttgaacccgggaggcggaggttgcagtgagccgagattgtgccattgcactccagcctgggtaacagcaaaactctgtctggaaaaaagaaagaaagaaggaaaaatatatgggttctgagtatgttatcttcctccagaggaaattttagtgtttttctggcaagtagatcgtgtatgggcacatcacctttattcagttgaggtggtctatttccggtttcccttactcctagggcttagctttttttaggaccttcagttgaaagtttgggagtgtgttggagatgggtctattaaggctcctgttccctggcaggccctgaaatccacattttgttctagcaaaatctctgcttggctttttcccctttagcagcttctttccgtttggtttctcagtccccagtcacacctgtgcagcttaggaattagcaaatgccgggagggaagattgcaagcagaacgttgagttcctgtttctatggaatcttggcccgtagaaagtctgctttgataccattaatgtccagtgtttgttccggatgagactgctgcggagtctagtttatgcctttctatgtggcccagtgtgccttgcatatgaataaggaaatgctctgaggccagaggctgcagggaagccagctcagagcatttgtcagtactctccaatcctggctatttggatccttctggaatgccttcaaaccatttgctctctttgcttgcttgtttctttttggtattttatccagcttgcatagttgttctcagagggcgggtcagcctggtaccttctgctgggccatagctagcagcgtaagccttggagccctggcacttgaaaccccacactgtccaagcacaacttacccagccttgcctcttcacagccacctgttgtgtccaccctgtgcttagcctagactttccacacaaccttttcttgctgctctctcagtcctgtccattcccatcaaaaatcgaattgttcttcagacctgtacagtctccacttctgattcctggcattgtgacccatgagattcttcctctgcagtgaattcatagcaataactgaccggccactgtagcatttcttgatgtattatatcatgtgccttgtatttagctttcatccagttgggggagggcggggatgttgtagtgtacctctttgtaccaagattgatttgctgcatatcttgcaggtgaaagcatgtattgccaatgtagaacccaaccaaacagtggagatcaatgagcaagaagcattggaagagaaattggaaaatgtgaaagccattctgcaggcatatcattttacaggttttgtttgtttttttaacctaatttagtctgggtctgcctctagtgagttagtttgctagatgtgttatcagtcctggaattatttcataatttatagtattttacaccctctgccctcatcactcacacacacacacacacacagacacacacacagctgacgtgctatttgtaggcctatcttcacctacaagattgactggcccctttgtacagcagctcagttggtggctggcttattccactcatcttaacagttcgtcatgtgccagaccttgtactagaactgtctttactgctggcttgttttctgccactagtgaaatagtttgaactttccaagtctccgtttcaccgtaaatagggatttattctcccatctatgccacaagatagttgtgggaagaactggggactctgacaaattacttcacactcagaaataaagaatagctataaattaaatttttggccttgcttatgcctgtaatcccatcactttgggaggctgaggcaggattacttgagtccaggagttcgagaccagcctgggcaacatagcaagacctcatctctactaaaaatttaaaaatgagccaggtgaggtggcatgcgcttgtggtcccagctgtttgggaggctgagatgggaggatcatttaagcccaggaagttgaggttgcagtgagctgagatcgtgccaccgcactccagcctgggtgacagagtgaaaccctatctcaaaaaaaaaaaaaaaaaaatttctcaatagtttgacatttaggttgttttttcatttttaccattcttccatggttttaacaactcagtctcaaagtgagccggagccaaggggaagaatgagcctatgatactcattgaacaaacatttgtgtacaaagtgtacatattctaggcactgtggaagctactggaggcacagatgagtaagacatcaccttggcctgctgtctattgaggtgtcttcttgtttgcctcaggcctcagtggtaaactgaccagccgaggagtttgtgtctgcatcagtactgcttttgaggggaacctattggattcctattttgtggaccttgtcatacagaaaccactccggatacatcaccattcagtcccagtcttcattcccctggaagagatagctgcaaaatatttacagaccaacatccagcacttcctgttcagtctctgcgagtacctgaatgcttactctgggaggaagtaccaggcagaccggcttcaggtatctctctgggatgttatatgcctcatccgtgggcccaagatcaacttaaaagggggatgttttttgtattttcagtgtttcctaactgtgagttagaagtttgaccgttacctttccgatgcttgtttcttatttatataaaagcactatcccaccctcttttcttttgaaactctggatggcgttgaagcctgggtactggttaaaggattatgcacccctgaatggtggtcttcaagcttttatcgtaagattgtacagagtgcagttgctatacttttgatccatcagggatttatggcgtgcctactatgtaccataccgagtgccttgctgaaccttgggtatagatctcattagagaagaaaggtttctgcagtgccatggaacaatgctgtccatcttcccctaaactctagcctacctttttgggttgcagttgagctaaggttgggtgaaaaaagtagataggaaattaatgcaaataggctgtaagtgcctcctacaagcttagcatttccccctctatggatttggagtaactctgaagctctcagctgtagatttaacttaaattgaaatgtggatgcagtcatgaagcatcttagccgtgtaacgtcagtgaagtttctgcagaaacagtctcttgcgaagctgtacccctggccatttaggcctataggcctttccaggctgccagtgactcttagttatcttaggcatctttttcattagtccttttttcagacctttttctgtccctcatttatttctctgaaatgtaatcgatgggcctctttttggttgacgtaattgaagggtcagtaaacaccacctttggaactgcagtcatcctctacttcgttttgttcctcacccctcttagagtgactttgcagccctcctgactgggcccttgcagagaaacccactgtgtaacttgctgtcatttacttacaaactggatccagggggtcagtccttcccgttctgtgctagattgctgtataaggacctcacagcaactcttcccactgacgtcaccgtgacatgtcaaggtaagaagggtgcctcagtgcagaaattctcatatcccagtttatttgagtgaaacagggaaaataggtagaatccatgaagtagacctcttgagacactttctctgtttatatactgtacattactcagaccggtaagatagaacattcttgtttctaccagtcttttccttcctctttgtaaatggtaaacatgattgtccccattttcccttctcctttgcccacccacctcagcagtgttctcgcagcctatgatttgttttcactgggggccctgcttcaggaaagacacctaatgataaggctgagtcatgggtcagttatggtggatggagccagaagactcatttcactgtgaagacaaatggacatgacacgtcagcacacacttactcctccctacggagcagtctctaaatggaaatccttccagactggctgagagagagattttttggtgaacctgtttcagttaaatgtgacatgggcaataatgaaaaattgggtgaaatgtttttaggaggcagaaattttgaagctgccccagatttcacaccatcggtctttgatttctctgcgcagttagattccagtccccagtctctagattgcattggtccagtaaggggcagccttagtccagaccaaaaaaaaaagctgtatgggtccagtgggtccagaatatcagtgatccaggttccgattcccccagctgcactgagtgagattgaatgtcagtgatccaggctccgattcccccagctgcactgaatgagattgaatatcagtgatccaggctccgattcccccagctgcactgaatgagattgatggaatctttctttttaggagtggaagtattatccacttcatgggaggagcaacgagcatctcatgaaactctgttctgtacgaagcccttgcatcaagtgtttgcctcatttacaagaaaaggagaaaagttggatatgagtctggtctcctaatagattgttttcactgcactgggagcacatcagaggtaagtaaccagtactgaagacagtaccaggtgggtagtactgtctgatgaagggtacatcacccttctgatgaaaacagacacctacctgttcatctggatggaagagcaggtttgagtatagacactggcatttttgaacaattcccatgatcacctggtcccttcttaaaatgctcaagatgttttttaaaggtattagttgatcatacattttagttgaaaatcatttgtggggcaataaaagccattttttgaaaaaggtgtatcactcaagaagtacttatggaaaaatatcaaattattgagggcattaactctgggaaagaccaggcaattaagttgtcacagtaactgctactaatttaatgccaggaatagagatgccaaaaatcctaaaattttcagaaagggctctcacagaaatgtagcactccactcaaactgcaatagcttgattctgttgagaaacactgatctaaataaatggaaaaataacccacattcactaatgaagataataaggaagacccaatatttttttttttttaaaaggaaagtatttttagcttttatgaaagctttaagtaatttttcctcattttcctgtttgaaacttttgaaaaggaagttcttcagtgtttgtttggttaggcgcagtgtattctaggccactgctttataaatatggtgtgagaaagcagtaggataaaataatcagagttcagtgtgtctcatattttgtttcctaaaagtttagtagagctgtgaatgtactaggaagtcccctctgaaaaagcacagttagttagttagaaatctgcccattaactcagggggactcaggcgccccccgggtcttccctctcctgcaggctctccggttagtgtcctgatttgccgtaaccacgggcctctgacctgctggcacctctggttccttggcgtgtgggtcactcacagatatgaaaacctgtgtctggctgaccaggttctcctgtagccctcccttgcccaggcacagataggagtcatgactggcccaaggccacgttcagacttaaccctgcaatggccacgaagtaacctccgtgtgggagagctccaggaacagtgcaggggattaaagccagcttggagtaccctttagaagaaagtttaagaataaaagagacagggccaggcagcaggcgttccggggtacagtgagctatgatgagaccttcaagctcttgccttccaggcctgtggtggggaccagtggcatgagtcagcaaagtaccagcactcctcagataagtgatattaacagaatttccacaatcactttcaagttgaataaagcttttaataaaacagtcttgttctttatcaatacctgtaaattctcttaaagcagtagcaaaggcgactgtagcaagagctcaaaaggcaaggcaatatcggaaagtgtatttaacagaagattaaaaatataaatgtagaagatctgtttatatatttttctttcagaaataaatcccccctcccctgccaggtgaaaggaaatattgcactttctgttctcatgactaaggggacaggagttccagaagaacctttcaagatgatcaggaacaccaggacgagggccgtctcacctcactcggaccacatggagacctcccttcaaaatgggagccatgtcctgccccaccaagccctgtctgaagtggagcttccccgcctgtgctccctccacagtcccggaaagcccagcggcaaaggcagctttgtcccagctctgccaccctcctgctcacagtggtcagggcccctcaggggcaaggacggcagggattggaacgagggctctggaaggactgttcagccctatgcctaagacccctatgctggggacactacaggcacacacaggaatagcagggccaccctcagagctcacacatccacgaacaaatgaaggctgaggaggtttctaaacctaaagtccatgagtgtgcacttcaatccaggaaggtcgggacttccttcagtttcaaaaaataaattctcccttccggtttggactgttgcaggctcgaggccattcaggagttgtccaccacctggtggggcagtgtgacagaggggccattggggaaggtggctagcttatcccgccccttcaagaagaaggtcagcagctcccccttccccttcacaaagatggggcctcgcctcacaaagcggaagccgtactctcggaggatgacttgggtttcttctaccacctggagagggagggggagcaagaacgtggcgttacggggggagcctagactgagggcgggtgggggctttgggtggttggagccgagcactgatccatgggtcccaagcagtacgggacactccccaaacctcccagggccaagcccttccacccgtggcgagcagcgggtgggaaggagaaccctggagtgactggctgggggcctcctctcatccagagacttctctcctaggatggccatggtcacctgggtggcagcactgttacctggaaactgccactgcctgctcttctgtccctttgcccctttcgtggagcttttctgccagacgccactgagacagatcacaaggtattagaaggttcatacccaaaggtaggccatatgcatctagaacttcagcccagattttgtggatgggtggaagtgtttcttcctgtgctgaggctagctattgcagagattcttttccacttgccccacgtctctgcctctggacttactgttcagggccagggtgggaggcaggggcacgtgggaaagcactgttccggttttgttctcatgccgagtctgagcacgtgccagctgtgccactggacatacctgaatgttgcccatgacccccgtggactccatcctgctggctacattgactgtattgccccagatgtcgtagtgtggtttccgggctccgatgaccccagccagaaccccgcctttgttcatgcctagggtagaggcataaagttcagcacagccacaggccacaccttgttatgggcctcagaagccatctcctctccagacctgtaccacaaagctcctaatgtaacacatcattgtcctcattcaacttggctgtatgctattggagggtggaaatcacatctcctgtttatccgtgtgcttgttaggtgtcagccgccaccccccccccatatgcagatttactcggcatggtagtggccagcttctaacacagctggtatttcaagtctcctgggacctcactcaggaatgataccccctcagtagaagcagcaggtgatcttaactcctttcaaagagcaggcctgtctgggaagccatgtcctcagcaggcacagcaacccctctggaaatggatcacaaactcacttctcagccaggcaggccaagcttctattgtaacagtaggcacagtatagtcggatcatcacatcagctgggtttttggtttagtcatctagagtcgtctggactaaaggtctttcaggtctccttgccctgtgagtgcgtgaacctccccacccgaattgcctcagttgtcctgagcctcatgtctctcctggtggtgggccaggcccctgcatgggaagggagcctgctgcggggcaggccagctgggggtgctcacctatgcgcagcatgaagttattgaaggactggttgttgatgttggtgagcgtatccttcatggccagcgcgaagtcggccaggtcagccaggtgctgccagcgctctctctcggacttgtcttcctgtgccaggggaccgtggagaaagtgtcaggggccgctcactgcagcagcctgctctgctgccttccctggcagtgttctgggggtggattccctacacctagatgttcaaggccttacttttcctcccacaaaggagtcgcagccacgctagctctgacttgccactgtgacaaagttcacgtagcaggtctaggcaaagactgggcaattgagcagaggagacggacctgtgagtctgaccacgaggcggaccccttcaccttggctgggcctggtcctggtccttaggttttgtcaggttgtccttgtttggatccctcaactaggtgataagcactggagggggatgacccgccttggacgtgtttctttaacctcatccatataatagggccgtgggatggttgtagaggtaaagcaggatgatggtgttttaagaccagagcttgggaccagggctcctacacctaattttctctcctggtagctgaacaaaggtctaaattagcttaacaaaagaacaggctgccgtcagccagagttctgaaggccatgctttcagtttcccttgttgacaattgctctccagttcctatgaaagcacagagccttagggggcctggccacagaacacaaccatcttaggcctgagctgtgaacagcagggggttgtgtgtctgttctgtttctctgcttgccgaactttctcaataaaccctatttcttatttata

SEQ ID NO: 243 - DNA, 3376 bp, Homo sapiens
  source 1..3376: mol_type = other DNA
gggcggggcgggcccgcgcgtcccggccgggctgcggcggagcgagcggggccagcgctgcagaaggcggcggctggctctccgggacggtcacatcccgctgcaggggcgggcggaggccgccgcactgcctcccgcaccggggacccaggccagcgtccgggcaacgccccctgctcccggacagactccgtggcccgctcgagccctgggggctccgcagacccgcgcccgctccgcccgcagctcggccccgcgctgcccgcgtcgccgggcccgcgccgggatggggtaggggcagcgccaccgagtcgggcgatgggccgccctctgggcaccgagcagccccccgaggcctgaccaaccgcgaggaccggcggaggtgggtgtgggcagggcggaccgcactctggggccgcccgggcaatgcgggggcgggagggcgtagagaaaatagggctgttgtgagctgtggggagcccaggagagctgctgccccccgacctccgtgcgttctgggcagtccttgaccccccacaactcctgccatctccaggagccccgcctggatgtcaagcggatgccaagcggatgccacagttccccccccagcggactccgtggggacatggcttcgctggtgcccctttccccatatctaagccccacggtcctcctgctggtcagctgtgacctgggcttcgtgcgagcaggtaagtaaaggggaacggggctgagggtcaaccacagctagtcaatgggtgaaacctgttaaacaccctggctcccgcagaccggcctccctctcctgtgaatgtgacggtcactcacctcagagccaactcggccactgtgtcctgggacgtcccagaaggcaacatcgtcattggctactccatttcccagcaagtatgaatcacccttctgctcccccaacctgtgtccttggatttcggcacatttcttcacttaagtgggggggatctggaagctggcgtatcctggctcaggctgcccttttcacgctactcccccggagtgcttggatgttgaagagtctctggttgagccttgtggcctggcactggggtgaggctgtcctcctctcccctcatctccctgcagcggcagaatggccccgggcagcgtgtgattcgggaggtgaacaccaccacccgggcctgtgccctctggggcctggctgaagacagtgactacacagtgcaggtcaggagcatcggccttcggggagagagtcccccagggccccgggtgcacttccgaactctcaagggttctgaccggctaccttcaaacagttcaagcccaggtgaggatctgtgctattggattctctggctgcttacctggcttgcagcctcttacttacttccccaagacaagcaacagactagctgagttgaataggatgatttaattcattgtactgccaggaaaggaaagaaaagcaggtgggaaggggattgggtatagacaggctggtattgagttgtttgggggaaggccttttaagcttcctgttacccaacttcacatcagctgcagcctgcatgagtgagtaattaacctgcagccatcccgctttttggtcgctaaccacctgtccaccaacggcttcctcccagggaggggctaccctacactccaagggcaacattatgatgggtccaccctttctaatccccagcatctccatcctgcatgtctgcagtatggaccccagtaacctggagtctgccttctgccttctcccttctcaggtgacatcacagtggaaggtctggatggagagcggccactgcagactggggaagtggtcatcattgtggtggtgttgctcatgtgggctggtgagtaagcagctagacaggggaccagggactcagtaaaggtgtgaggtggcaaaggttgtcaggagaaaaagaagtgagagatacagtggctcacgcctgtaatcccagcactttgggaggccaaggcaggcagatcacctgaggtcaggagtttgagaccagcctggccaacatggtgaaacccgtctctactaaaaatacaaaaattagcagagtgtggtggagggcgcctgtaaccccagctactcaggaggctgaggcagaagaattgcttgaactcaggaggtggaagttgcagtgagcgagccgagatcatgccactgcactccagcctgggcaacagaacgagactctgtctcaaaaaaaaaaaaaaaaaaaaagtaagagaaatagagtggagtggggagatacttagttcaggagggatgatttgaactttgaagagagggagaggaggctgttgagagcccagagaggaggactgcatgggcaccaggaattcaggatgttcttcatggattttctagaagctacgtaggtatctccctatgaggggggaagtggagatgaaggctcagactgtattgtgtttcagctgtaattgggctgttctgccgtcagtatgacatcatcaaggacaatgactccaacaacaatcccaaggagaagggaaaggggccggaacagagtcctcagggaaggccagtggggacaagacaggtgatgtgggggccagtgagggcggaaagggtgattctgcccctgaggggcagccagggaaaggaagaaggtcaaagaggggcagaaaaagatggagaatggaagatctgggatgggggaggctggagagaaagggtggcacctattaccttcctgaagttgagactcaggccattttctttcacagaaaaagtcaccatctatcaacaccatcgacgtttgagtgaagaaacacacccagaagagagatgcactaacaactggggatagggatggggtcagggggagcccaagatggtgatctgcccgagactcccagagggtaatgccactcccacaatctcaggcctggtacccatcctctttccactgtgagcagagccagaaggtaggtctgttcagagtctgtgcccctggacctggggagtggatatcagatgggatatctccttccattccccggtccaggggagagtcactagttgtaccctactccattaggtcccaaatgggggccccatttcacctgtatcaggactctgagcatccccagctgccccacatcttgcctctggccctcagagaggggtgtttctgtgggtactcctcttaccccagcaaataaaaggaattgtctgaccctagaggcagatgctgcactgcactactccaatgtcttccatggagcctcaggtgctccccctctcacctggcagccccttcagctgctagtgatatcacttgttggacatttttccaataaaggttcttggacaaactgg

SEQ ID NO: 244 - DNA, 15872 bp, Homo sapiens
  source 1..15872: mol_type = other DNA
tggcgcggtgcagggctcttaagaacgaacggcttgggcgcgggtaatcagctccctttcccccactttctcacttattctaggtacttgggactgtcgtagagtttccagaccccatgtaggcgcccagtcgtggactgtcccactctgctgctctactgctcgtggtgctcccgcgcccaggtgggggtgaggggcggggtcgggggctgggctgcactccatcctggagtcttcgtgttgaaatctcccaggtaactcgcggctcttcttgttttccaagactggtatccggggactgtgacttgcagggtccgccatggagccagagcagatgctggagggacaaacgcaggtatcaggaggccgtggattcagggtggcggtgtgcagggaggcagcgagaaaggggggacttatatctctgtgaccggtgttttgttttctaggttgcagaaaatcctcactctgagtacggtctcacagacaacgttgaggtaactcgccaagttcctatgcctcatctgtgttgtctcttgcaagctggagaaaacttgggatctgcttttactaggtggctatgcacaagggaaaactttgttatcgtgaactgaatagtatcaagttatgggtagcttgttttattagcagtactaatgcttcttggtgtacagacgtacaaattacgtttgagtcaaaggattgaacttttattgcgaaacacatattcttgagggatactgtctgaatcatttttcttggtggcttttaatcgatcttttgggatgttgctacgtaaaaaccgcatattaaaattaagaaacccttcgccgggcgcgatggcccacgcctatcatcccagcactttgggaggccaaggctggcggaccacctgaggtcaggagttccagaccagcctgaccaacatggtgaaaccccgtctctactaaaaatacaaaaattagccgggcatgatggtggatgactgtaatcctatctgttcgggtggctgaggccagagaatctcttgaatctggaagacaggttgcagtgagctgagatcgcgccactgcactacagcctgggcggcagagtgagactccgtctcaaaaaaaaaaaaaaaaaaaagtaaaaaataaaattaggaaacctgttggtctttgtagcagaatagtgagctggtggagtcaacatttaataaatatttatttctttttagagttcagtaactcctgggctggagtgagagtattgctggagctggggaggttgaggctgcagtgagctatgatcgcaccactgcgctccagcctgggtgtcagcatgtgaccctgtccctatttccctccccccgcccccccccccctcaaaataaggccggacgcggtggctcacccttgtaatcccagcactttgagggccaaggctagctgatcacctgaggtcaggagttccagaccagcctggccaacatggtgaaacctcctctctactaatcccagctactcgggaggctgaggcaggagaatcgcgaatcgcttgaacccgagaggtggaggttgcagtgagccgagatcatgccactgcactccatcctgggtgataaagcgagactttgtccaaaaaaaaaaaaaaaaaaagaaagaaaatgagcaatacaagttaattctactgcaaaaatgccaacctgcctaggttgaaaatacagctcccaacatactttctggtgatcttgaacaagttactgaacttctctgggccttatggggctgaagatagaagcaaattacttaagagtgtgtgtggctaatattaatattaatattaacagctattactattattactgtgcttagaaatgctgttactctcatttatccaaactgaatcacacatgtcttgttttttttaataaagcatacaggctgggcgtggtggctcatgcttgtaatcccagcactttgggaggccgaggtgggcagatcacttgaggtgaggaattcaagcctggccaacatggtgaaactccgtctctactgaaaatacaaaaattagccaggcgtggtggcaagtgcctgtaatcccagctactcaggaggctgaggcaggagaattgcttgaaccccggaggcagaggttgcagtgagccaagattgtgccactgcagtccagcctgggtgacagagtgagactctgtctcaaaaaaaaaaaaaagttgtctgggcatggtggctgttaaatcgcttgagctcaggagtttgaaaccagcctacaaaccctgtttctacaaaaaaatagaaaaattagctgggtgtgacggtacgtgcctacagtccccagctacttgggaggctgaagcaggaggatcacttgagcctgggaggccgaagctgcagtgagccctaattgcaccactgcacaccatcctgagtgagacagggagaccttgtctcaaaagcaaaaaagatatgtactttaaagatatgtaaacaatacaaaaaaaggagaattttacatttatccacatattgaccatttctggagatcttcattgttttgtgtaggtctagatttccatctttcccaaaaggtatcattttcctcctgcccaaagggcttccttgaacatttcttgtagttcacatccgctggtaagaaattcagcttctgaatgtctgaaaaagtcattattttgcccttgtttttagaagatattttgccagttgtagatttgcttcacagtcttctggcggacattgtttctgaaaagaagcttgctatcgttcctatctttgctcgtcaataaataacgtcttctctcttgctacttttgagattttctttataccagtgttttaaagttatttggttgtggcgtgtcttggtgtagttttttttcttttttttgaaacagagtctcgctctgtctcccaggctggagtgcagtggtgcaatctcggctcactgcaagctctgcctcctgggttcacaccattctcctgcctcagcctcccgagtaggtgggactacaggcacccgccaaccatgcccggctaatttttttgtattttcagtagacactgggtttcttttttttttttttttgagacagagtcttgctctgtcgcccaggctggagtgcagtggcgtgatcttggctcactgcaagctccgccttccgggttcatgccattctcctgcctcagcctcctgagtagctgggactacaggcgccgccaccatgcccggctaatttttttgtatttttagtagagacggggtttcaccgtgttagccaggatggtctcgatctcctgacctcgtgatccgccaaccttggcctcccaaagtgctgggattacaggcgtgagccaccgcgcccagccagtttttttcttttaatacttctgcttaggattcattgagcttcttggatctgtggtttagaattttcatcaaacttggaagaatttcagccattatttaaaaaaaatactttgccatgggacgtgactcatgcctgtaatcccagcccgttgggaggccaaggtgggaggattccttgaatctaggagtttaagaccagcctgggcaacatagtgagaccccatctaaaaaaaaaaattagctgggtatggtggtgtgtgcctatagtaccagctactcaggagactgaggtgggaggattgcttgagcctgggaggccaaggctggagtgaaccaggatcatgccagtgcactgcagggtgggtgacagagtgagaccctgtctcagaaaaaaaaaaggaaaaagatcagtttacttatccttttttctttttctttttttttttttttttcttcgagactgagtcttgctctgtcgccaggttggagtgcaatggcgtgatctcggcttactgtaacctctgcctcccgggttgaagtgattctcatgtctcagcctcctaagtatctgggattataggcacccgctaccatgcccagctaatttttgtatttttagtagaggcggggtttcacagtgtttgtcaggctggtctcaaactgctgaccttaagtaagctgcctgcctcagcctcccaaagtgctgggattacagatgtgagccactgcacctggcctacttatgcttttttctattgtgaacttatagaatatattataaatgtttttttttttttaataagatgaaatcttgctctgttgccaggctgttgtgcagtggcgcgatcttggctcactataatctccgcttcctgggttcaagtgattcccctgcctcagcctcccaagtagctgggagccaccaaacccagctaattttttgtattttagtagagatgaggtttcaccatgttggccaggatggtcttgatctcctgacctcgtgatccacccgcctcggcctcccaaagtgctgggattacaagtgtgagccaccgtgcccggcgaaatgtttttgtttatttatttatttaatttttgtttttaagaccgagtcttgctctttcacccaggctggggtacagtggcatgatcgtagctcactgtagcctcaaactcctggtcttaagtgatcctcccacctcagcctcctgagtagttgggactagaggtgtgccaccatgcctggcagggatacattataattttttttttttttttaaatggagtctcgctctgtcccccaggctggagtgtagtggcgtgctctcggctcactgcaacctctgcctcccgggttcaagcgatttacctttttttatttttcttttttgagatggagttttgctcttgtcgcccaggctggaagtggcgcgatcttgggtcaatgcaacctccacctcctgggttcaagtgactctcctgcctcagcctcccgagtagctggaatcacaggcatgtgccaccatgcctgccgaatttttgtatttttagtagagacggggttttaccatgttggccaggacggtctcaaactcctgacctaaggtgatccacctgccttgacctcccaaagtgctgggattacaggtgtgagtcaccgtggccagcgtattatgagattttcttcccctgtgtcactggaacacaaactgtttccagcctgtgtgagctgcaaggattgttcctcctggtgtaatatagtttggatatttgtcccttccaaatctcatgttgaaatgtgacccccagtgttggaggtggggcctagtgggaggtgtttgggtcatgggggcaaatccctcatgaatggcctggtgccatcttttggtaatgagtcagttcttactctattagttaccgtgagatctgattgttaaaaagagtctggcacctactcctttctctcttgctccctctcttgttatgtgacacaccagttccccttccctctctgtcacgattcattgctccctgaagccctcacaagaagcagatgctggcgccatgcttgtgtagcttgcagaactgtggccaaataaacctcttttctttataaattacccaccctcaggtatttctttatagcaatgcaaatggactaacacaagatggttgtttccctggccttgggtagttgacttatatccatctattgataagtattcacctgaagactggaaggcaatatgtttagtctctttctgtgcagttcttgtctccatgcgcctttcttctcttcagtgctctgccttgcaaattttagttgttttggtcttccagaattttcaactgtcttctcaactcagggagactactaggctctgttcaagttctctctccctacactttatcctgtaagttctccaagcagaaagcagtaagctgggacagtcatagtactcacctaatttctcccctttttgtgatcactgttctacactgtcttatcagctcattgtttgtttgtgttagtttggctatatctatttttaggttagttcaagattttgacaagtgaaattgagcatcacaattggcatatagtagataattcataaatgttcacatgaaataaatgggaggatttggttaagaaatttattacaggagttataggagtttcttaggcattgctctttttgtttgtttgttttgagacggagttttgctcttgttgctgggctggagtgctgtggcgcgatctcggctcaccgcaacctccgcctcccaggttcaagtgattctcctgccttagcctcccgagtagctgggattacaggcatgtgccaccacgcctggctagttttgtatttttaatagagttgtggtttctccatgttggccaggctgttcttgaactcctaacctcaagtgatccgcctgccttggcctcccaaagtgctgggattacaggcgtgagccaccatgcccggccacattgctctttcttattggctttcctattgtaggcattgtaatgtcatgtaactaacaagttaaaattttttttctttttttgagacagagactttctctgtcacccaggctggagtgcaacggtgcgatctcggctcactgcaacctccatctcccaggttcaattaattctcctgcctcagcctcccgagtgcctgggattacaggtgcctgccaccatgcctggttaatttttgtatttttagaggcggggtttcaccatgttgggcaggctggtctggaactcctgacctcaggtgatccacctgcctcggcctcccaaagtactgggattacaggcatgagccaccgcgccctgccaaaaattaaaaaaaaagttattattatttttttgagatggagtctcactctgttgcccaggctagagtgcagtggcgcaatcttggctcactgcaacctctgcctccagggttcaagcaattctcctgccttagcctcctgaatagctgggattactggcgcctgccaccatgcccagataagttttgtatttttagtagagacggggtttcaccatgttggtcaggctggtctcgaactcctgaactcgtggtccagctgcctcggcctcctaaagtgctgggattataggcgtgagccactgtgcccggcctaaaattattcttttaaaaatggtaacagggtctcactatgttgctcaagctggtttcaaactcctgtgctcaagcagtcctcctgccttggcttcccaaagtactgggattacagatgtgagccactgtgcctggccccgagtagtttttattgtatacgtatactgtgactggaagttaggactgtttttaggaaatacactgtgagattttgaagtttgccgcattgtctttgttgtgatcagtgtgaagttttgaacatagtggattttgatttaggggatgaaaattcattcaagatgatactgtcagttttcagaaataatgaagttgtatagtgttttctgcaatggaaagctgaacttttacaaaggctcagttagcatttctgaaatgatggtgtgctaattatctgttgaaatttaataatgaaaaataaaattttcagtccatggacaaataaatagtattttatagattaaaaaactttgtatttcatagaaaattatcttttaattccaaaattagattgaaaaattataagcagaagttgtctgacatagttatgggaagtgtctttggaaaccatgctatatatgttacagataatgtgattaaaggttttttctcacttttaccaaaataaaattaaaagtagaaaaatttttctttgtcgactcttttatatctagtttgagtatgattgaagcaaaagttcatttaaatgaaagtgctcttaggaatactgttttgtccttttagagctatttcttcttttttttttgtctctttcatttttttatttttattttttatttttttgagacagagtctcgctctgtcacccaggctggagtgcagtggcgcaatcttggctcactgcaacctctgcctcctggaatcaagtgattctcctgcctcagcctcctgagtaggtgggattacaggcgcgcactactacgtccagctaatttttgtatttttagtagagacagggttccaccatgttggtcaggctggtctcgaactcctgactgcatgatccgccctcttgggcctctcaaagtgctgggattacaggtgtgagccaccgtgcccggcctttgttttttcgttttgagacggaatcttgctgtgttacccaggctggagtgcagtggcatgacctcagctcactgcaaccactgcctcccaggtacaagtgattttcgtgtttcagcttcttaagtagctggcattacaggtgtgcaccaccatgcctgtctagtttttttattttttatttttctttttttttttgagacggagtctttgtcacccaggctggagtgcagtggtgtgatctcggctcattgcaaccttcacctcccaggttcaagcgattcttctgcctcagcctcccgagtagctgggagtacaggtgtgcactaccacgcccggctaatttttgtattattagtagagacggggttttgccgtattggccaggctgtcttgaactcctgacctcatggtcggcgtgccttggcctccgaaagtgctgggtttacaggagtcagccaccgtgcctggccgcaaaattttttaatacattagttttaaaaatgtgagtgcgatggaggcaatgaattactttttaatgctctgaatgtcagtcgaatctatttgatagctccaaaatttgggaattgtgaagaagaaaatataacttgttattttttaaacttcatttatttttaattgtaattattgttttttagtgttacctgccggaatggggaaaacttcattcatttaagtgtgacattaatgattttttctgttaataattttcttcattttggggttattatttacataatgtattttcttaaacctgttcatttttaaaaatcatagatttatttatttatttagagacagggccttgctttgtcggtcaggctagagtacagtggcatgatctcgtctcactgcaacctccgtctcctgggctcaagtgatcctcccacctcaggctcctgagtagctggggctacaggcacgcactaccacgcctggataattttttttttttttttttttgagactgagtctcgctctgtcgcccaggctggagtgtggtggcgcgatctcggctcactgcaagctccgcctcccaggttcacgccattctcctgcttcagcctcccgagtaagtgggactacaggcgcctgccaccacgcccggggaattgtttgtatttttaatagagatggggtttcactgtgttagccaggatggtctcgatatcctgatctcgtgatctgcccgcctcggcctcccaaagtgctgggattacaggcgtgagcccctgcgccaggcctgatttttgtatttttggtaaagactggattttgcagttgtccaggctggatatatttctttaaaaaagaaacataaagggaaaaacattctcattgtgataaatagagggtaaccataaaaatgacaacagtgaatacaagacaatggtaataaattttagctgtattctcttgagtgtataagccttggaccctgaagcttgctctctctgatgtgaccagctttcttactatgatttggtgctgtttggtgttacattcattattttttttttttttttttgggaacacactctaagaagatacatgaaaaagagaaaaaggatttgtatttactcctgcaaagtcagaaggaaagggagaaagagtaggatcttgagacatgacattagaacaatgagataataggtgcttttggagagagagagcttgaatgagattgaaagatgggtctgaatttattttgggcagagaagtttgtggtctagtaccatctttctagtcattgatttgccttttctattagtgtcatatttccattagttttgtttagcactcaaaataacctggttatttgaaatgttcatgcactgtttttttgaattcactagagaatagtagaaaatgagaagattaatgcagaaaagtcatcaaagcagaaggtagatctccagtctttgccaactcgtgcctacctggatcagacagttgtgcctatcttattacagggacttgctgtgcttgcaaaggaaaggtaagataattgtgtccacaaatggagttagtaaagaaagcaaaatagattcccctatctgaaatatcatagttatgtatagcgactttttactgtgtgatttatggatgttaaagtttttaagaaagtattcagccataatctcataattcagacatttaaattttttcccaccagtcttagatcatatgcatatttgtaaagatttgtaatcatgatatacatgtaattttgatttttctttttatttattatgacataacatttttctgtatctctccacagtcttcatgattataatttattattattattgttattttgaaacagaatctagctctgttgcccaggctggaggacggtggtatgatctcgttcactgcaacctctacctcctggtttcaagtgattcttgtgtctcagcctcccgggtagctgggactacaggcgtgggccactacgcccggctaatttttgtatttttagtaaagaagggttttcaccatgttggccaggctggtcttgaactcctaacctcaagtgatctgcccgcctcagccttccaaagttctgggattacaggcatgagccactgcgcccggcctattattattattcttatttttttttgagacagagtcttgctatgtctccctggctggagtgcagtggtgcaaccctggctcactgcaacctccacctcaccgggttcaagcgattctcctacctcagtctaccgagtagctgggattacaggcacctgccaccacgcctggctgattattgtatttttagtagaaacagggtttggagtctcgctctgtcgccaggctggagtgcagtggcatgatcttggctcactgcaacctccacctcatgagttcaagagattctgccttagcttcctgagcagctcaggcacccaccaccatgcccggctagtttttgtatttttagtagtgatggggtttcaccatgttggccagaatgatctcgatctcttgaccttgtgatccgcccatctcggcctcccaaagtgctgggattataggcgtgagccactgagcctggccttaaattttcttaatagcaagagtacaattatttctctttctttaacatgttttccccagtatttctcacctaaattcttttttgtgtaagcaaatctaataagaaaattggttttgcaagttagactagtcaacgtttattaggtgcatattcttttttattcaaggaataataataaacattataatagcaaactgacataacttgataaagaacttgatggaaccatgtctcatctcagccaggtgtggtggggtatgccttagtccgcactgcttgggaggccaaggtgggaggatcgcttgggcttgggcccaggagtttgaggctgcagtgagctgtgatcgcaccactgcactccagcctgggtgacagagtgagaccctgcctcaaaaaaaaaaaaaaaaggaaatatatcatttcttatagtaaaagtgagttattaacttagaatagataatttgtttatataaaaactatatgaatgagcagtaaatatttgtttttgatggctatatttgtaaattaccatttatttatgactgagctatatcttggctctactatcaacaattaaaatatgggtatcttgggccgggcgtggtggctcacgcctgtaatcccaacactttgggaggccgaggcgggcagatcatgaggtcaggagttcgagaccatcctggctaatgcagtgaaaccctgtctctagtaacgatacaaaaaattagctgggcgtggtggcaggtgcctgtaggcccagctactcgggaggctgaggcaggagaatggcgtgaacccgggaggcggagcttgcagtgagccgagattgcgccactgcactccagcctgggcaacagagcgactccgtctcaaaaaaaaaaaaaaaaaaaaatgggtatcttggttgatttgaaggtagtgagttaactcgattgttgatagtcttacagatcaagctccttattctactctttttttttttttttttgagacagagttttgttcttgttacccagggctggaatgcagtggcatgatctcaggtcactgcaacctccacctcctgggttcaagcagttctcttgcctcagcctcctgagtagctgggattacaggtgcctgtcagcacacaaagctaatttttgtatttttagtagagatggggtttcaccatgttggccaggctggtcttgaactcctgacctcaggtgatccactgtgcccagctggtttttttttttttttttttgagacagagtctctgttgcccaggctcgaatgcagtggcacagtctcaggtcactgcagtctctgactcccagttcaaatgattttcctgcttcagcctcccgaatacctgggaccacaggtgtgtgccaccacacgtggctaatttttgtattttcagtagagatggggtttcaccatgttggccaggctggtctctaactcctgacctcaggtggtctgccctcattggcctcccaaaatgctgggattataggtgtgagccatcgtgcctggcccttattcccctattctactcttttcgcccttctcactattgcacttgagtagtcttaaaaaaaaaaaaaagggaaaaaaggaaaaaaatatggatatcttttctatttttttgtttttcctctagggaagactaatatattagaaatttaaaatattactgtatttatttatttatttattttttgagacggagttttgctgtgttgcccaggctggatgctatgttgctcagagtggagtgcagtggcacgatgtcagctcactgcaacctccgcctccctggttcaagaaattctgcctcagcctctggagtagctggaactacaggcgcctgccatcgtgcctggctaatttttgtatttttagtagagatgtggttttaccatgttgattaggctggtctggaactcctgatttcaggtgatctgcctgcctcggcctcctgaagtgttgggattacaggcatgagccattacactcggcctccaaatattactttaaatgctagaaaaacttttgaagaaatttttaagttcaagctcgtaaatacatttaaaaaattttttttattgttaatttttttgagacaagttctcgctctgtcatccaggctggagtgcagtggcaagatcaccactcaccgcagcttcagccttctgggcttaagcaatcctctcacctcagccttctgagtaggtgggactacaggcgtgtgccactatgccaggctaatttttaaacttttttgaagagttggggtcttactatgttgcccaggcttggaagtgatcctccttggactcccaaagtcctgggattacaggcatgagccactgcaactggccagtaaatatattttttgttaaaacacaaatttttttttttgacatggagtcttgctctgttgccccagctggaatacagtgggggcaatcatggcttactgaagcctcgaactcccaggctcaagtgatttttccacctaacctcctgagtagctgtgactacaggtgtgcgccaccacgcctggctgattttttgtattttctgtagagacagggttttgtcacgttgccaggttgattttgaacccttgggctcaagctatctgcctgccttggcctcccaaagtgtgaggattataagcgtgagccaccgtgcccggcccaagtacggtgttgttttttttttccccccggcccaagtacggttttttttttttttctttccaagacggagtcttgttctgttgcggcaggctggagggcagtggctcgatcttggttcactgcaacctctgcctttggggttaaagtgattctcatgcctcatcctcctgagtagctgggactacaggcatgcactaccacgcccggctaattttttgtatttttagtggagacaggatttcaccatgttggccaggctggtctcaaactcctgaccttgtgatctgcccgccttggccctctaaagtgccaggattacaggcatgagccaccgtacccggtcaaatacaattttttttttgagacggaatcttgctctgtcgcccaggctggagtacagtggcatgatctcggctcactgcaacctccacctcccgggttcaagtgattcttctgcctcagctttctgagtagctgggattacaggtgcgcactgccatgaccggctaatttttgtatttttagtagagatggagtttcaccatgttggtcaggactgtcttgaactcctgacctcatgatccacccgcctcggcttcccaaatgctgggattacaggcatgagccactgcgcctggccccaaatacattttttaagtaaagagttctggtaaagtaattcatcatgtgaaccctaaatactaagtgaaaaatcttgtctatttgtagacagctcttagggctgtttaaagtgctctgggaatgttttgagatcattgtaaacatattttcaatatgccttttcatagcagagtttaaaatagatgtctccccaatttttcaactttggacttgtattctcagcaagaataatttatatagaagtgttaatatcaaatatctgctgttagttttataaatgtgtttatcttcttaggtgtactgtagttgtattaaatagaattattgacttaaattattcgaagaaagaaagaagtagcttttagaaaagaaacataacctacttatctgtattagtgttgcttctttgactaatcacttgagttcatctacatgtcttagtgatgctacatccactgtcctatattatttttgttcttttattgaaggatattacacagaatattacacatatcataggtatacagcttgatgaattttcacaaactaaacatacctgtgtagcttgcagtcagatcaagaaactgaatactgccagcatctcagaagccatccatgtgaccccttcaagtcattattctttctggggtaatgatcatcccattgtcaatacattttttaaacatgttttaaaattgagttcataaccagatttaagccatacaaaaatttcagtctcattaaactattttgttggctaattaatttgcttgcttatctcatttattttatttactacaaatgtcctttgactgtgaaatgaaaattaaacttaaaaagatgagttttcattatggaacaatatgtttaaattaacacacctaggaaatatatttctaaactttggatttcttttcccttacagaccaccaaatcccattgaatttctagcatcttatcttttaaaaaacaaggcacagtttgaagatcgaaactgacttaatgggaagaacagaaaaatttagttgctactgtagatttacatgattaagaggcagctttaattgccatgatcattccctctttttggatgtataagaaccttccggacaacagaacctatttctggaattgcagaagataacatatttcccttattttgatttaatcaccataaaccatacctatttaatgagtgtattctgtgcaatttttttctcagattgtctttaactttgtttttaaaatgaccttcaaaataaactgtcaaaacaccat

SEQ ID NO: 245 - DNA, 32628 bp, Homo sapiens
  source 1..32628: mol_type = other DNA
ggactgacctaccgaccattcttccgggtccagaaggtgatctccgcccgtgctcagaatccaggggcccggggctgtaggtaggagttaagtgggtaggatcccttaaccagggttgtccggtgcaggtggtgtgtgttgtttcgcctaacgtgtcagtggcacaaatcacgcgaacttcataaacattgtgcgttcggaagcctttccaagatgcatttaatccctgcgtgagcccacgttaggcattcacgaaggcatgtgcactgttctctcggaagcggctggccggcttcccctcctcgcgcgcggctgtgggtgcaggtcctcacttcccagcctcccatgggcccaaggccttctgggctccaatttgaggcgagccaccccagatccgtaatttttctgcagtgatttatttttacctttctggtaagttccaaagcttccagctcacattcagacgttttccctaacgcaactacgtatttgcaacatacttttttcagattccttgacaaggatatcctagcggcgaaacaacaccgtactgggagtcagaacgtctgggttctagtcttgactgccattaactagcggtatgacattggagaagcttttttgacccttctggatttccgtttccttttctgtaaaatgaggagcttggagtaagtgacaagtttccttccagttttgacatttgggttattgcctccaatgtgtctttccagttcctgcctcaattacatatctgtgctttggttaatatctcgtagggtccttcctcccactccattaatctgtgctcttctcaaatctggtttcatactgatttaaaaattattttctcaaggaatcctgtgttacctgagcactctacttcttggtccaggggcacaaacgtaaataagatattttccatgtgccattcttagaagtatttaatgtgtgtaaatactattgaatgaatttccaaatcttcttttttttttctttagacagagtctcactgtcgcccaggctggagtgcagtggcctgatctcggctcactgcagtctctgcctcctgggttcaagcgattctcctgcctcagcctcccaagtcgctgggattacaggcgcccgccaccgtacccggctaatttttgtacttttagtagagagggggtttcaccatgttggccaggctggtctcgaactcctgacctcaggtgatccgcccgcctcgacctcccaaagtgctaggattacaggcatgagccatcacgcccagcctgaatttctaaatcttaatgtgtttatttcgttggcattaagttagatttttccttgatctttactcgaataagccttttaaggtaaaatgcttgctcgattacacacacatacacaacctcataattgtccgaaggtaaacaagttaatgacttgtgaatatttttaacttataagcaatgaatcctcaaagcttataagcgagtatcaagacatgtgatatggttttaaaatagctgatgataaagtatatacatcatctcattttctcctcttagtcttgtaataggaaggacagatattcaaacacttatttatttatttatttttaacagagatccggaaaatgaggcccataggaaacaagtgacttgctgagtccagataacactgactgtcagagtgagtgtccacctaaggttcctttgttgcctaataagatactttctttgctatactgtacttgtttctgttatcatttcttttctttcttttaaaaaatattcagtataggccaggcgcggtggctcacgcctgtaatcccagcactttgggaggccaaggcggatagatcacctgaggtcaggagttcaagaccagcctggccaacacggtgaaaccccgtctctactaaaaatacaaaataattagccgggtgtgctggcaggcacctgtaatcccagcgacttgggaggctgaggcaggagaatcccctgaacccagcaggtggaggttgtagtgagccaagatcacgccattgcactccagcctgagcgatgagcaaaactccatctcaaaaaaaaaaattcagtatattctatttaccatgtcagaaccatacatttactatgtcagaaccataaaatacactttgggaagattggttgaaatgtaacatttaggctaggcgtggtggctcacgcctgtaatcccagcactttgggaggctgagacaggtggatcacctgaggtcaggagtttgagactagcctggccaacatggtaaaacccggtgtctactaaaaatacaaaaattagcctgacacggtggcacacacctgtagttcaagctacttgggaggctaaggctggagaaaattgcttgaacccaggaggcagaggttgcagtgggctgagatcacaccactgaactccaccctgggcaacagagcgagactccatctgaaaaaaaaaaaaaaaaaaaaaagaatgaaatgtagcatttaatgcctagttatctagcaaagatcacccgtccagagccttaatttctttggtcacatcaaataactattatcatttgtgaacaattttaaagactatctagtagaaaatataaatatatttatataatatatatgttgtatataaatataaaatataagcatattgtagaaatgccatattatgagataaatcattaaaaaaaaattttttttttttttgagacagagtctcgctctgtctccccggctggagtgcagtggcgtgatcttggctcactgcaacctctgtctcccgggttcaagaaattctcctgcctcagcctcccaagtagctgggactacaggcatgtgccaccacgcccaggtaatttttttgtatttttaatagagacggggtttcaccatgtcggtcaggctggcgtcgaactcctgacctcaaatgatctgcctgccttggcctcccacagtgctgagattacaggcatgagccactgcgcctggccaaaaattttaaggctttgtaaaagtttataattttgttcaagatagctttatatggttaaggtaaacgcattgaaatagttcataatttccattcttttttttttgtaatgctgaagaatatatgtgtctctcagtatctatggggcattggttccaggacccccgctgccgcatgccaaaatttacagatgtccaagttccttatataaaatggcgtatatttacatgtaacctaagcacataccattgtatacttcatgtcatctctagattacttatgatacctaatacaaagcaaatactatgtaaacagtatactttagggaataatgacaaggaaaaaggtgtacatattcagtagagacagaaccatctttttaaaaaattaaaaaaattttcgatccacaattgtttgaatccacaaatgtggaacacatggatacaaagggctgattagtaatgtttaatgatataaaataatattcacaatgtattctttagtgtaaaaagttgtaaaacaaaattaatatgaccttatttttgtgagtaaaatagataaaagcacaaagaaaagagttgaaaatatatatattaaaatgttaactaaagttatttttgagtagtgagtaaaagaaaatctatactgaagagtctaaaaggctatacccactacttggaaatgtactctccattgaaaagcaaacagacaaacaaaaaaaaccttaaaatgactttacaatttatagaaataattttgcatattattgcaatgaaaacacgaccctaggttataatcagtcatcataggtagtgtctcgtgtgcctgagattcattgtattggcaagcttgctttaacgacaatgaactgtttgtggaatggaacctggcttattaaactttgaatcaacaatatcaagcagaaagcctggcatatggtacttaggaaatgtttcctaagaagaaaacatgttcttcttcattttttttttttttttcaagacagagttttgttcttgtcgtccaggctagagtgcaatggcatgatctcggctcactgcaacctcgacctcccgggttcaagtgattctcctgcctcagccttctgggtagctgggattgcaggcgcccgccaccatgtccggctgatttttgtatttttagtagagacagggtttcacgacgttggccaggctagtctcgaactcctgacctgaggtgatccgcccacctcggcctcccaaagtgctgggattacaggcatgagccaccacacccagctggaaaacatgttctttttacgttgtttttgtcgttcctgtccttaaaaactgaaaagcaaagccatagaaatgcagtcttgagagcagaggcaatagaggccacggggaggaaaagaactatattactaatgagttctgttacagttttttctcaaaaaaactcttcttttattctaagaataatactcaaaaggcattattcaataaatattgggtgtcttcttcctactataaagcatctttttttagggggtgagatgggaagatggaaaagtgttaagagttcaaagacgattccaactagaggaagtgtgtgcaaagtttcagagctgagatgagaaaccattagagatgacaggtgggttacaataacaaaagcttgagaggtaggagtgtagagactctaagagtgtaagaaataaagtaaggctgggcatggtggctcatgcctgtaatttcaacactgtgggaggccaaggtggatcactagatcccgggagtttgagactaacctagacaatgtggtgaaacaccatctctaccaaaaaaacaaacaaaaaattatctgggcatagtggtgcgcacctctagtcccagctattagggaggctgaggtgagagcatcaccttagcctgggaggtcgaggctgcaatgagctgtgaccataccactgcattccagcctccagcctggatgatagagtgagacccggtttcaaaaaagaagtttcagggtgtttaacagaaatgttatcatttggaattcgcactttagaaacattactctagttgtgatttggttagttgatatttcaagagtgaaaaaagagccttttacaagttgttattgtatttcaattctatcatagtggtaacattaacagtaataataatagctagtatttagagagtacttgttatggaatcccatctcttgatgagactgagatttttcagggcaggaacccagttttactcattgttgtaagtctagtgagctaagtgtagtccagtgctatgcatatagtaaatatccaattaatatttgctaacttgatttgaatattattttaaaaccttttttttttccccaggagaaacatgaaccagaagctactgaagttggagaacttgctacgatttcacactatttataggcaactgcacagtctgtgtcaaagaagagcattaagacagtggaggcatgggttttcatctgcttaccctgtgtggacagctcaactgtgtgcctggccctggccaacagatgtgctcactggggctgctttatctcagtataggcttctagtaacaaaaaaggtagttacagatttctttttttttttttttgagatggagtctcaccctgtcaccccggctggagtgccgtggcgcgatctcagctcaccgcaacctacgcctcttgggtttaagcaattctcctgcctcagcctcctgagtagctggggttacaggcattagccaccgcacccgctatagttacagatttctgtaagttattttattactcggtctaaaatgaaagtgcctagaaccatgagtacaaatccattttgagtaatttatcatttacagaatatttattacttaatgcaataaagtattactccaagcaatagagctttgtgagaaagggaagttccggttaattgtgtggtgctgatgaatttggttccttggaaatcagtgtaaaacagtgaattaaggatacaggattttaattttagcttaaggtttaactacttatgggagtgttcgttggtagaaatagtagctatggccggatgtggtggctcacgcctgtaatcccagcactttgggaggccaaggtgggcagatcacaaggtcaagagttcgagaccgtcctggccaacatggtgaaaccccatcactactaaaaatacaaaaattaggccaggtgtggtggctcacgcctgtaatcacggctctttgggaggctaaggcaggcggatcacaagatcaagagttcaagactagcctggccaacatggcgaaaccctgtttctactgaaaatacaaaaattagccaggcatggtggcgcatgcctgtagtcccagctactcaggaggctgaggcaggagaagcgcttgaacctgggaggtggaggtttcagtgagccgaaattgtgccactgcactccagcctgggcaacagagttagactctgtctcaaaacaaaacaaaaaacaaaaaaaaaaaatacaaaaattagctgggcttggtggtgcacacctgtaatcccagctactggggaggctgaggcaggagaatggcttgaacccagtaggcagagattgcagtgagctgagattgtgcaactgcactccagcctgggtgacagagcaagagtctgtctcaaaaaaaaaaaaaaaaaaagaaaaaaaaagaaagaaatgtagctatgattgtggtagatatttgagaataaatctaaattgtcacttaagttttttcttcctttttgtttatatgttctgatttttttaataggaagaaggaccatggaaatctcagttatcttcaacaaaatctaaaaaggtggtagaagtatggattggaatgactattgaggaactggccagggcaatggaaaaaaacacaggtgagtcagatatttttacaaagcaaaatatgggaatgttggaagaccgggcattttatttgcaacgagattaaggcattgaaagattaaaaactagactggcacttaaaaaatatattaagtcattgtaatattcttcactttaagtcataatccctagttagtttcttgactgccaaatgtagttctccaagattttgcttttaattaaagtggaaaagattttcttatacgaattaagttttctttctcggaagttttgtgggctattagaataaatccaaagaatgtttttagactgaggggctatacttatatactttctctttttgtttttctataattttcttttttctttctttttttttttttttggtttttttttttgagacagggtcttgctttgtccagtatagtggcatgatcatggctcactgcagccttggcctcctagactcaaaacaatcgttcagcctcagcctcctgagtagctgggactacaggcatgtgccactatgcccagctaattttttattttttgtagagacagagtctcactatgttgtctaggctggtcttgaactcctgggtgcaagtaatccttctgcctcaacctcccaaagtgctgggattataggtatgagccaccacgcctggccctataattttctgatttcctttttttcactctttttattattattttttgagatggagtttcactctcgttgcccaggctggagtgcagtggcacgatctcggctccctgcaacctccgcctcccaggttcaagtggttctcctgcctcagcctcctgaggagctgggattacaggtgcccacaaccacgcccggctaattttttttttttttagtagagacggggtttcaccatgttggccaggcttgtctcaaattcctgacctcaagtgatctgcctgcctcggcctcccagagtgatgggattaggggcgtgatcccaccatgcccagccttttctctcattttgacaatatctgtaaggccagcagagaaatactggtagtagccaggcacggtggctcacgcctgtaattccaacactttgggaggctaggtcaggagatcgagaccatcctgtctaacacggtgaaaccccatctctactaaaaatacaaaaaaaattagctgggcctagtggcgggcgcctgtagtcccagctactcgggaggctgaggcaggagaatggcgtgaaccgtggaggcggagcttgcagtgagccgagatcgcgccactgcactctaccctggacgacagagcgagactccatcttaaaaaaaaaaaagaaatactggtagtaataactacaacttctcataatattatttttatttataaatggagcatattattgtcatttttatattccttcattgtgatgtgcttattaccaatttaggatttttgaaacaaaatttgagttttcattataaagtgatattaaaattcagtatatgagaaataccctgttattgtaacaaagtgtaacagactcttggggaaaaaaagaattaatagtgactcatatatgttgagctgtcacaatgccctaaagttaggtatccttatttacaggctgggaaggtgaggtttagagaggataagtaattacccactatttccagctagtttgtgggagagccaggatttgaacctagggaatatggggaatatttgaacctatggaatatggctccagagcacatgctgttactcatcaaccacattatctttcaataattattttgtaaatcacagcaatgctaaacttcaatgtgtttcctgcctgaaagtgttactactttttgtgcatgtacatccttacaaagagtacaaaattgttagcacactgtttggctttttttttttttttttttgagacagagtttcactcttgttaaccaggctagagtgcaatggcactatctcggcttgctgcaacatctgcctcctgggttcaagcaattctcctgtctcaagcctcccgagtagctgggattacaggcatgtgccaccacgcccggctaattttgtatttttagtagagacggagtttctccatgttggtcaggctggtctcgaactcccgacctcaggtgatccgcccacctcggcctcccaaagtgctgagattacaggcgtgagccaccatccctggcctgtttggcatttttaataattttgcagatggattattcagtcattttatagctagaaaactttgaaaataaatgaatatggctatgtcattcagaatttttctaaggaaaattatattggtgtggctttataaatagtattgataataggcttgatttttaaaactttttttttgaagcagagtcttgctctgtcacccaggctggagtgcagtggcaggatcctggcttactgcaactcctgcctccccagttcaagcaattcttgtgcctcagcctcctaagtagctaggattacaggcatatgccaccacacccagctaatatttgtatttttagtagagacagagtttcactatgtgggccgggctggtcttgaactcctgacctcaagtgatctgcacatcttagccttccaaatgctaggattataggcgtgagccactgcgcctggcaaaactttttattattagcaattatcagacaaatatggtagcagaaagaatggaataagcttaaatgtatgcataagtcagtgacaacagatattttattttatccataaatacttcagtatgtatctctaaaagatgaggactcctttttttttttttaaacattaccccctacccctatacacatagaggaacccataaccataattctttattatgactaataaatagaatgattaaaatacaaatttagtctcatggagcagtactctaaaccccaaactgattgtctatgatgaaaataaatgtgtctatttgaagcttatttcatattcaaatctcttctgaattaaagatagttttcatgaggtaattatttttaactactatatacattagcgatatgagtacatttattccctcttctcctgggtcagttaagtagcttgatgtactatttcttgttgcaatatgttggacacttttctacatgtaaatatttatttaagtcttggataaaattaaaatagtatgttaataccatatgcatttaacacagaggggaaatgattatctctctgtgtaagctacctctcaaaagttcagtataatgtattggaaaactagagtattaggtattgttaccattattagaaatagaattgtgctcataattttttttttgaacagagtttcactcttgttgtgcaggctggagtgcaatggcatgatcttagctcactgcaacctccacctctcaggttcaagcaattctcctgcttcagcctcctgaatagctgggattacaggtgcctaacatgcctggctaattttttttttttttttttttttgagacagaggcttgctctgtcacctagtctggagtgcagtgatacgatctcagctcactgcaacatctgtctcccgggttcaagcaattctcctgcctcagcctcccgagtagctgggactacaggcatgtgccaccacgcctggctaatttctgtatttttattagagacgaggtttcagcatgttggtctggctggtctcaaactcctgacctcaggtgatccacccaccttagcctcccaaagttctgggattacagacgtgagctactgcgcccagccgccttgctaatttttgtatttttggtagagatggggtttcactatgttggtcaggctggtctcgaactcctgacctcaggtgatccacccacctcggcttcccaaagtggtgggattacaggtgtgagccactatgcctgaccaactcataatttttgttttgaaatagttttacagttctctgagagcatattcacatagtaaatttgagttgtatcattcttaaaatgtgtttccttgggaaagcatgtggtagaaagataaataggaaatcgtttcttggcattattgtggagtacaatcagtggcttgctggtgctggcttgcatcagtttgtgagcttattgctaaattataaggaattatttgagctggttgttaaacacaaccatttaaaaaaattaagtcacaaaggtagtaaaaactcagaaactcactggctgggtgcgatggctcatgtctgtaatcccagcactttcagaggctgaggcaaacatatcgcttgagcccaagagtttgagatcagcctgggcaacatgatgaagccttgtctttacaaaagaaatacaaaaattagctgggtatggtgatgtgagcctctagttcctgcttcttgggaggctgaggtgggaggactgcctgggaggcagaggttgcagtgagctgagattgtgccactgcactccagccagggcgacagactgagaccctgcctcagaaaaccccaaacaaacaaacaaaaccaactcttcacttcccagttattttattgcattttacaattacctgtgttctcaaggttatttatgcctgtcatatctatatggtaaaaagactcccaacactgcattcagtgactttatgttggtagcttgtaatcaaccatggtgggcatatttgcaccatggaaattggagaatactgtaaattagagatttatttttgagagcatagttattaaacatttgccagcataccagtgaataggatgttcttttagtttaatgttctgcttatctgaggatggctttcttccttttatttttttcttgagatggagtctcactcttgcccaggctggagtgcagtggcgcagtctcagctcactgcaacctccgcctcccgggttcaagagagtctcctgctttaacctctggagcagctgggattacaggtgcgtgccaccatgcccagctaattttttgtatttttaatggagatggggtttcaccatgttggccaggctcgtctcaaactcctcatcttaggtgatctgcccacctcggcctcccaaagtgctgggattataggtgtgagccaccgcacccggctgccttctttcatatctactctttaaatatatttttatagggtgactgcaagtctggaacataaaactacttatttcattatcatcacagatacatttatttatcatccgcagggaaacatgactgagattaaaacaaagcacattaaataaaatgaaaaagagaataagtaaatatttttcctatatttcaagagtttttggtttgggtgcagtagcttacacctgtaattccagaactttcggaggccaaggtgggagaattgctcgaccaggagttcaaaaccaacctgggcaaaatggcaagaacccttctctacaaaaaattagtaggatgtagtggtggcacctgtggtcccagctataacggaggccgaggcaggaggattgcttgagcctgggaatttgaggctactgcagtgagttaggattgtgccactgcactctagcctgggcaacagtgtaagaccctgtctcaaaaaaaattttttttttttttgagatggagtctcgctctgtcacccaggctggagcgcagtggcgtgatctcggcttacttcaacctctgtctcccggattcaagcaattctcctcagcctcccgagtagctgggactacaggtgccgccaccatgcccagctaatttttgtatttttagtagagacagggtttcaccatattggccaggctggtcttgaactcctgacctcgtgatctgcccgcctcggcctcccaaagtgttgggattacaggcgtgagccaccgtgcctggccaaaaatttttttaaaataaaaaataaagactttttggacaccctagatacataaacaagtaaatgaattgcggatacatgtattcagagatatatattgtgtgtgtgtgtgtgtgtgtgtgtgtatatgtgtgtatgtctgtacatactatcagttctcattataagtggattatttattttaggtgtggattctgtatttgaaaattcacctactcaacaaaatgtatttgcagctcaaaaatcagtacttgctgggcatggtggctcatgcctgtgatcccagcactctgggaggccgaggcaggcggatcacctgaggtcaggaatttgagaccagcctagccaacatggtgaaaccctgtctacaaaaaatagaaaaattagccagggatggtggcgtgcacttgcagtcccagctactcagggggctgaggcagaagaattgtttgaacctgggaggcagaggctgcagctagccgagattgccccactgcacttcagcctgggtaacaaaagcgaaactctgtcccaaaaaaaaagagaaaaaaatcagtactcaggttctcttgcagttattattggacatgtgcagaacagtgaaagatgtgggttgtccattgtgcatgttctgaagctgaggttgaatgaggtgacactgtttcagctgtcgtactgcaaacaagtgtcctttttgtattctatttagtgtcactttttttcacatttttatgctttttgttggtaattttgctgtttaaaatggctcctaaatgtggtactgaattcctatctagtgttcctaagcccaagaaggctgtgatatgccttacagagaaaatatgcatctcagataagcttgttctggcatgagttatagtgcaattggccatgagttcaatgttaatgaatcaaatatatatatatataatatatgtatttatatataaatattttacatatttgatttatatatatatattatacataatatatcatattgagatatataaatatatattatatataatactatatataaatatatatatagtatctttaaacagaaatgcataaaacaaaattatgtgttgatcagttgatgaaatgtgactaaaggcttgcaggaacccaactctatatttcccctcagaacagtggttcaatatttgctaattcaatagttttggtgactttatagaacataattattgcaaataatggcaattgattgtatatacacacacacattcgtgtatacatgacatttgtgaccttaaatttttagagaaatagactacaatcaattattataaatactaaatttatcttaatgttttattgatgattcagatggcttagaatacataaatattcaaatatttatgaatatgcggaaaagtcagttaatagaaatgtatcatattttaaataattaaaaaacattttttagcttccttgtgatttgttaatattagagaaacagtttgcatagttattcctctcattgagtgtactgtttatatagacatttattaatagagattacttcttgagcatttaattaatgatcctaaaaggttttattttattccaatcagattatgtatatgaagctttattgaacactgatattgacatagattcactggaagcagactcacatttagatgaagtctggatcaaagaagtgataacgaaggcagggatgaagttaaagtggagtaaattaaaacaggacaaagtcagaaaaaataaagatgctgtaagaaggtaaaacttaactgtatatactggcagggtttgggggagactacatagttatatttacactttttaatggaaagatttgctttaaaatttcttttgtaataaagatatgtgtgtataaacttcgaagtacttaaagcattagaaagtgtattatacattcaagttattataaaactttaaggattttttaaaaatttgctgaatgtatacattggtctgaattttcaaatttgattcagttctgctcattgttatgaaaatgcaaaccacaggtaggtaggcagttattaaatagtctgtcatatgtataggagggggaaataggtctaatccacactgaatattgggttttattgttaatggtagttcacagggataaatgtgaaccaattcacaggctataaagtatttctgatatttaagaaatgaaactcttttgctgttaattgtaggccccaggcagatccagctttattaaccccaaggtccccagttgttactataatgggccatgttgatcacgggaaaacgacattacttgacaaatttcgaaaaactcaagtggcagcagtggaaactggaggcatcactcagcacattggtgcctttcttggtatgaacacaaattaccttacaatgtgcttgggaaccccacttattttcttaaactaaatgtcatagtatgaaatatacaaattcaaagtacaagagaaggctaaagcttgcagtcattagtttgatgaaatgtagagcaagtggttagtaaagctgtgttttgtactttctataagaagaagattgtgttaactgttaacttttttttttttttttttctttttgagacagagtctcactctgtcacccaggctggagtgcagtggtgcaatcttggctcactgcaacctctgcctccccagttcaagcagttctcctgcctcagcctcccaagtagctgggactacaggtgtgcaccaccgtgcctggctaatttttgtatttttagttgagacagggtttccccatgttggccaggctggtctcaaactcctgaccttgtggtccgcctgcctcagcctcccaaagtgttgggattacaggtgtgagccatcgtgcctggcttaatttttttgtatttttagtagagacggggttttgccatgttggccaggctggtgtcgaacccttgacctcaagtgatctgcccatcttgacctcccaaagtgctaggattacaggtgtgagccaccgcgcctggctgaaaattgtgttaacttttaattctagctcattcttagtttgatttaatgagtctacaatttttttattaattatgtttatataacttcctttgctaggttgtgataatattgctgataataattaaataatagtcccatttacgagcacctagcatgtttccagtactgtgctgagcaccttatatgttttgtcttttttatcttgacaacaacatcataaggtaggtattaatagttgcacttacaaataaggaagccgatacttcttcgagttaagcagctttcccacagtatatagccagtaagtagcatagccaggatttaaacccaaggtcaatggactcaaatcgtgagctactgcctactaaattgcctctctgtggctcagggagttgtgcaactctgatttgctaatgtgagggtggctgcctgtacaacaattggtctgttctgtctctaaaatagatatatcagttgatacatttatgaaagtagttatgttctagaattatggagactttagtttgaaatttttacatggaaaaaaacccataagaatctcactggcattttatcacttttcattgtgaaatgatgatctgtgttctgattaagattaatggaaggaataaaattattttaaagaattattgatggtttctgataatgtcgcatatattctttggtattaaggaagtacatgtttgaatccttgatgttcttgaatttctgtttccacagtctctctgccttctggggaaaagataacttttcttgatactccaggacatgctgctttctcagcaatgagagccagaggtgctcaggtcactgacattgtcgtattggttgtagctgcagatgatggagtgatgaaacaaactgtagaatctattcagcatgccaaagatgcacagggtactgtgtggctgacttaatggatctactacataaagtcaaagttctggggccatttacatatagctcatttagtcttcacaacaatcccagagttattatacgtgtattacagataagcctcaaagataaattgttttcccacagacttataactaataggaagagtatagcaggattcaacttgggagttgtgaccataagtacagaccacaggtacaatctttcctctactatgccctttttttttcaactttttatcatagaaattttaaacagatacaaaagtaagaaaagaataatgaaattcgatctatccatcacataaattcattaggagttgcatagtggttatattctgttatttcctgttaatttattatgtggaattcttctctaaagagaaactttcccttctgctttaaataagttcttatctgatcaaatgtataaaattcagacttttggaaaatcacttaaccatcttctcccttatttcttcatttaaaagttataataataaatacccacacatgtaattatacattctaggctgggagtgggggctcacacctggaatcccagcactttgggaggccgaggccggtggatcacctgaggtcattgggagttcgagaccagcctgaccaacatggaaaatccctgtctctactaaaaatacaaagttagccaggcatggtggcacatacctgtaatcccagctacttgggaggctgaggcaggagaatcacttgaacccgggaggtggaggtagtggtgagccgagattgtgccattgcactccagcctgggcaacaaaagcgaaactccgtctcaaaaaaaagttacacattcggtatattgatttttattctgaaatgactgtacccctacccttactgagaaaatgtactcgataaagtgtgtcatattacccccagatttactggcaagatttttaaaaggttgggagttactgaactagtccagttctttcattttacagcatgaaaactaagactcagacagcagccagaactctccctaattatatacaattatacactaattttcagtatgtctgcatatggaatttggatctgctagcttccaatgttattctcttttctttttaattcctcaaaactgcctttgtatgatgtactatgttcttaatgattctagggaatacatgcaaaaagagagggataaatttgccagggatcccattacaaagcaattggttgagataggataacttcattagatcatgctttgtacacctcttctcttggtaccggttaagttccagctcatcaacatagaatgtactttttccttttcttttttttttttttttttttttgagacggagttttgctcttattgcccaggctggagtgcagtggtgcaatcttggctcacttcaacctccttctcccaggttcaagcgattctcctgcctcagcctcccgaatagctgggattacaggtgactgccaccacacctggctaatttttgtatttttagtagagatggggttttaccatgttggccaggttggtctcaaactcctgacctcaggtgatccacccacctcccaaagtcctgggattacaggtatgagccaccgtgcccggccagaatgtactttttcgtaatagtacgttgtggattgcaaaacttttttgtatcttttaaaatttctgtttgatacctgagaaaattacagagatgatgaaatgcaaccacagaattacctcgtagaattttgtgtgatttctctaaagagaggatatgtctagtgatagtaagtagattaaaagattgtttggtcctttcattaagtaaacatttattgagagcctactaggtcactgacctaggtgtatgaataaatagtataagtcctaaaagaaaatttgtgatattggtacttagttttaacctaggatgagatgttgggttttaacaatgagtaaataaaccctggaaagaagaggcaaatgatctagcagtattgaattggaatcttcccatgattttttttttttttttggagattatctccagtgtacttactgatcttgcttttaggtttaaggataggcctttttctacccaaaatacagttgacctttgaacatcacgggtttgaactgtgtgggtccacttaacacacacatttttttcaaccaaacataaataaaacagcattcacagaatttgaaacttccttacatggctttttgtacacacgattctgcagggctggctgcaagacttgagtatgccgggattttggtataggcagtggtgggggtcctggaaccaatccaccagtatacccagggatgattgtattgtttgttgtgttttttctgggatggagtctcgctctgttgcccatgctggagtgcagtgacacgatttcagctcactgcaagctctgccttcctggttcaagcgattctcctgcctcaggctcccaagtagctgggattacaggtgcatgccaccacgcccggctaatttttgtattttttagtagagacgggatttctccatgttggccaggctgatctcaaactcctgacctcaggtgatccacccgcctcagcttcccaaagtgctaggattacaggcatgagccaccgcacccagcccgactgtattgttttttttgataatctcaggtgtctgttattcactcagaatctgcttataattatacttttaacatcttgcatctggatttctctatatgtagagcgcagagtagggtgatgtgactctaaagtgggtcattttggccttttgttagataaaaacatccactgaataaagagaaaaccagaacagaaagttgatgtctttcactgtgaatacctggaattgaaggtgtcatcattttcactctttttaactccatttctttcagttcctattatccttgccgtaaataaatgtgacaaagctgaggctgatcctgagaaagtgaaaaaagagctgctggcttacgatgtggtatgtgaagattatggaggtgatgttcaagcagtgcctgtctccgcacttacggtaaatgcggggacctcatataaatatgcctggatgggaatgctgtacataatgcacacagtatattacatctaaagaacattttgatgtacataatttgtgttgtttttaaaaagttttcttggtgccaggcaaagatggtattatcttggtttggcatgttaggagttaggctcagagaggtcagtcaccagctaatcagtgtggagtcaagtctaaatggaatatattttttattatgagatacttaggatgagaataaatggtgaataagggaaatagtaggacaaagacgtggtgccatcacagctcagtgcagccttgacctccaaagctcaagttgtcctcccacctcagcctcttgagtagttggggctacaggcaggtgccaccccatgcctagctaatttttaaatttttttgtagacatagggtctcactgtgttgcttaggctggtcttgaacacctggcctcaagccattgtcccaccttggcctcccaaagcaccgagattacaagtgtgagccaccatgcctgaccaaagactgtcttaagcagaaatgaaatccagttgttaacaaaaaagtgcttatatttcatgcctcttacaagtggaaaacaggtcttacagcatttaagagatttaaacaaaaagttcatgaataccaagattaaatattaaggttgattttgttattgattgactgaatgtttttgtggattaaattgctacatgttttaaaatgttatttataatgaattccattttctttaagattaccatctattctttcttgaatataaacaccaaggaaactcagtgcttgcctcttataagtgttttccaattctcttaccctatagaggttgctgctaagtgacaatttccttttttgtccgtccttattatattacaaagtttatttataatatagccttttttttctcctgatcattcactgaagggatggtgggttactctaccaccttcctccaattaaatctcacttcatctttacttttcctaaatgtgttacctccaagatagttagaaattatgcgtccattaatagtaaaactgtgcatctttttctctgaaatttataaaatgctaccttactttgttatcttctgcactatccctcaattgttattgcactctgaaagccaaatgttaggcttactaaaataagattaaagtatttggccaggcgcagtgacttatgcctgtaagcctagcactttgggaggccgaggtggtcagatccattgaggcaggagttcaagaccagcctgggcaacatgatgagaccttgtctctataaaaacacaaaaattagcctggcttggtggcatgtgcctgtcgtcctagctattggggaggctaagactggaggaccacttgagccagggaggcagaggttgcagcgagctgagatgatgccactgcactccagccttgataacagagtgagaccttgtctaaaaaaaaaaattaaaatatttgaagagttgaccaccttttctggccagataccatcagatgagtaggtagatgtaaagctgcttaggcagatttggaggcgtgtcagagatgattccaagggaagggaggggattggaagagagtggcagggaggtaagatgaggccttcttttccaagatatataaaggattatttcatgcaaggaaacaactctagttctgctttttggggcagcattttgtaaattggaataaatactaggaataagtgggtgggtaagcaaagtatttagtcaatttttttgttttgttttgttttgttttacagttgtctattgttttattttttgttttttgaaatgaagtcttgctctgtgtctcaggctggagagcagtggcatgatcttggctcactgcaacctctgcctctgggttcaagtgattttcctgtctcagcctcctgagtagctgggattacaggcacgtgccaccacacctgactaattttttgtatttttagtagagatgtggtttcaccatgttggctggtcttgaactcctaacctcaagtgatccgcccgtctcagcttcccaaagtgctgggattacaggcatgagccaccgtgcccggcccttgtctgttgttttatactttgtaacaactgtgagcaatctcttagctgataagaggagtggaaaaataccttgcctatcagttccatttccatcaccagttaatcagctgtgtgatcttggagccctagagagcacagtaaacatagaccatgaaaggtaaaagaatcacccactccagcttcttcattttatggttgaggtaaggagatccagggaagtgaggtgattttttttttaaaggctgcacagctgggtggttataaagcacagcttagagcctagatctctagttagtgctttttctcctcatttatttaataagggtaagtcatgcttgatatgctttgtaggattcttgagttgatcaaatgaaataatagatgtgaaatctcgttcagttggatagaacttaaacaaaaaaagaaagcaagaggaaggaaacacaactgtagggacagacggaggagaaagaaaatgaatgaagcattgcatgtgtttatgaaagggatagtaacaagcccaccagtggtcatcctttaaaaaaaatagccacttgttccttgcaagatctgtccatggctcaggttttcttgctgatccctccctcccttccattcttcccattgtcttttttcttatttttgtttcccctccctccctttctttgttaaattgagtaatcatgctttcaatgattaaagagaaaagtataatataacttgcaagtattatgtgactttctgtccctggcatttacatttacagataatatttattaatgtgtattaacaacgtttgttattgttaaagggcgataatctgatggctttggcagaagcaacagttgctcttgcagaaatgttagaattgaaagcagatcccaatggtccagtggaaggaacagtaatagagtctttcacagacaaaggaagagggtaggactcttaaaatgcttgcctttttaatttgttctgtggttttcgtgacttgattatatgacaatgtattatttttgttacatgttattgttagttcatgaacaatattttcaaagcatttgttttaaaaagtattttattgtttgtactaatacaagaacacaaaaatgcagttattatcagtagaccatagcagctatccatgtacatctactagtcatatttaggtgacataagtagttcaatttgttttattttttttccctcactgactcgactgaattggtaaagtcttatagataacataaattagaatgaaataccaatggttgcattttagggtttgtgaattctttatactttacccattaatataatacgcagaaaggtctttgaagtggtgtgcttgaattttcctctgtatcagcaagagaggttttctcattgctttacactctctaacaactgagtaatcccttagctgatggagactgggatagaaagtgggttaagattctgtcagaacactttgctccctgcttcttcgcttagcataaccttataagaaattattttttttttaaattatggtaagaaacacctaacatcccatttattatgttaaccatatttaaatatacagttcagtattgtagtttattcacattgttgtgcaacagacgtgttgaactattttatcttgtgaaactgaaactctgtaccttttaaaattacccttgtccctctcctgagcccttggcaaccacctttctgttttctgcttttcctttatttctttctttctttttgagacggacttttgctcttgttgcccaggctggagtgaagtggccacgatctcagctcactgcaacctccaatccctgggttcaagcaattcttccgcctcagtctcccaagtagctgggatttacaggcacccaccaccatgcctggctaatttttgtatttttttagagacaggattttcaccatgttgaccaggccggtctcaaactcctgacctcaggtgatccaaccgcctcagcctcccaaagtgctgggattacaggcgtgagccactacacctggcactgttttgtgtttcaattttgtgcctactttagatacttcatatgagtggaatcatacagtatgtgtccatttgtaactggcttatttcattttgtataatgttctagagtttcattcatgttgtagcctgtgaaaagatttcctttttttaaacaatttaatatttatttattttttaatttttctttttttgagttgcagtctcactctgtcacccaggctggaatgcagtggtgtgatctcggctcactgcaacctctgcctcccaggttcaagtgattctcctgcctcagcctcccgagtagctgggactgtaggcgcgtgccaccacactcagctaatttttgtatttttagtatagatggggtttcaccatgttggccaggctggtcttgaactactgacctcaggtgatctacctgcctcggcctcccaaagtactgggattacaggtgtgagccactgtgcctagcctattttttttttaattgagatagggtcctgctatgttgccctagctggtctcaaactcgtgagctcaagcaatccacccaccttggccttcaaaagtgctgggattacagccgtgagccaccacacctggccaatttccttctttttaaagactgtataatattcctttgtatgtaaaatccacattttctttggaagaaatgtccatttgtcttttgatggacatttgagttgcttctacttcttggctatcgcaaataaatttgtttaaaatggtcttgataggctgactttgaactcctgggctcaggtgatcctcttgccttagcctgctgaatagctgggattgcagatgtgccactgcacccagctttgaaatgtttttatagtatgaaaaactgcttaagttaagaagtggtggaattaatcttgtgtatacacatgtttatataacttaaacttcataaagatatctttgctctacttaaagtacattatgacattgaaaatatacttttattttcattttagtcttgttactacagctataattcaaagaggaactttaagaaaaggctctgttctggttgctggaaaatgttgggcaaaagtacgcttaatgtttgatgaaaatggaaaaacaattgatgaggcctatcccagcatgccagtgggaattacaggctggagagaccttccttctgcaggagaagaaattcttgaagtagaatctgaggtgtatcaagcttaattcctatatattagatataatataatgattttaaatgccagtttacaatgttataccaaatatgtgtattaatgttaacaaatctagattataaggggctgtgaggatgcaagttgtgctattttagcattagactatagaattttgggggtggggataagatttttaaatcatttcaattatacaagctctcaaattaaaattttacatgtttcttgaaacttataaaagtagtagtttcatacatgagttaagctaatttcctaatgcaggacaacacaaaggctttaatctagcagttattgatgtctatttcattaaataatacgtttttcccctataaagccaagggcacgtgaagttgttgactggaggaaatatgaacaagaacaggagaaaggtcaggaggatctgaaaataatagaagaaaagcgaaaggaacacaaagaagcacatcagaaagcccgtgagaagtatggccatctactgtggaagaagagatcaattctacggtttttagaaagaaaagaacaaatacccttaaagccaaaagagaaaagggaaagagattcaaatgtactttctgtgattattaaaggtatctttttaaagattttacattacagttcattctttgaatatatgtttttttattctcatagtttgggcctttacatttacatgaaaattatttcaatattttaggagagtttttcttagtcaacatatttcttgctgattttgttgtaaatgtacgtttggctcattatatgctattaagtcaagtagatatgtgtaatgctaagcctaaataaaagtggatttagtgataaatgacattcctatcatggctttaaatagattattgtcatttttatgtctgctgatgtctaactcttaaaagcaacaattataaactttttctgtatttaggtgatgttgatggttctgttgaggccattttgaacattatagatacctatgatgcttcacacgagtgtgaactagaattagtacattttggagtgggtgatgtaagtgcaaatgatgttaaccttgctgaaacatttgatggtaaggattccatttcttcttgttaatctgtgttccccaaataacactgaaccatctgcttctgtcttttgttgcttggcttgtcacacctgacatttactgctatcagcatcacccttcctgctatagtccagtcccagctagcaattgaaacttaataggatgtgcagtattgtggctatagctccatttgttgtggttgtactgcagttttggggaactatttcaagacctggtcacgtttatcttttttttttaaaagcaccattactgccccctctccctactcctcctggttctttactatcccaaggttgatttctcatatctttcatcagacttctgaatgttcctaacactgtaatcaccctattcagttctttccttcatcttttacttttggctgcctatctttggtaattgataactttatacatcgtatctttttacagcaaaagttctttttagctttataagcctagaaggcagggaactgtctttattagttgaatttatgatacacaaaaagggggactcatgactgttaaataaagtcgaacacctagtaaagcaaaaacatttgttgagtgattaggaatcatttaggaaagagatgctttgaaacctgacttgattagagttagatatcacctctactactgaaaaggatagaggtaacatctaactgattaattaaaagtatttggtaggcactgactggcttagcactgtgctgtaatacagatagtgtattgaaagatattgaaatgacttttttttttcttttttttttttttggagacagagcctcactcttttgcccaggctggagtgcagtggcacggtctcggctcactgcaacctctgcctcccaagggattctcctgccacagcccccaccgagtagctgggattataggcgtgcaccaccatgcctggctaattttgtatttttagtagagacagggtttcaccatgttggccaggctggtcttgaacccctgacctaggtggtctacctgttttggcctcccaaagtgctggaattacaggcatgagccgttgtgcctagccaattgaatgacttctttttcttgagacggagttttgcttttgtcaaccaggctggagtacaatggcgcaatcttggctcattgccacctctccctcctgggttcaagcgattctcctgccccagcttcccgagtagctgggattataggcacccacgaccacacctggctaattcttatatttttagcatagataaggtttcatcatgttggccagtttggtctcaaactcctgacctcacgtgatccacccacctcggcctcccaaagtcctgggattacaggcgtgagccactgcacccggcctgaatggcttcttaatgataggactttcaaggtgattgtgtttttctcctgattaaactgtttgggttaatttttttcattcattttgtttaagacaagagtgttttgcttttttttctttttgggttggtttttttttttttgagacagagtcttgctctgtcgcccaggctggagtgcagtggcgtaatcttggctcaccgcacccaccacctcctgggttcaagagatgttcctgccttagtttcctgagtagctgggattataggtgtctgccaccatgcctggctaatttttgtatttttagtagagacagggtgtcaccatgttggtcaagctggtcttgaactcccaacctcaggtgatccacccacctcggcctcccaaagtgctgggattacaggcgtgagccaccgtgcccgtccaggttaatttttttcattcattttgtttaagacaagagtgttttgcttttttttttctcccaaagtatttacagttaaatatattatttgtttgttggtaaaatggtcagctccatgaaacttgcttcttaaaaataactcttgacctttaccaattaagtcactatttttccatccacccctttaagtcactatttttgggcatcttttggccatctgaatacctaagtgcaaaccacaaaaattgtagacaataagattataatttaataatgtaattgttattaaaatgaaggaatagtattttagccctggtcattttttgtgtttttatttctctggtatgaaaatcaaattttgtttagcatactgctttacacgttataggcacttaatgttccttaaatgaatgggtttaaaattataaagaaattttctttgttaaacaagccacaatacagtttataaaattctttcatcaattggaaaacgtactagttttggtgagaaaaaaagtcatagaccttctaacctcctctaattgctatttttttttgagatggagttttgctctatttgcccaggctggagtgcagtggcgcgatctcagctcactgcaacctccgcctcccgggttcaagcgattctcctgtctcggcctcctgagtagctggaattacaggtgccaccaccacgcccggctaattttgtatttttagtagagacagggtttcaccatgttggccaggctggtcttgaactcctgacctcaggcgatccacctgcctcagcttcccaaagtgatgggattacaggcgtgagccactgcacctggcctcttatttgctattttaatttagaaaataaaacaatttagattcaagtttctgcttgaaagacaaataaatgattataatgtaatcgttgtgctacttcattgatcatatttctgtttgctaggtgttatatatggctttaatgtgaatgcaggcaatgttatccaacagtcagctgcaaaaaaaggagtaaaaattaaacttcacaaaataatttaccgtcttgttgaagatttgcaagaggaactgagcagcagattaccctgtgctgtggaagagcacccagtaggtgagtgatcactgaatgttacttttaaaaattagtatattaggtgctataaatagcacttcaaagcaaagcttagaggaaacgttttcaatgttgaaagatatatcctgtgttctagaaaaaaatgactaccatgagaatccattgtaacttcttatgtaaacacctgccctgtgtaacacattgtgcctgtgccttgatgatacaaaagcaaataaggaattaggaacttgccctccagtttaaatatgaacaaataattataatacaaattacactactattgaacgcataaagattattaacagtgtcatggaaagagctgttgactttgttgtggggctggcagagaagtctaccataagaagaaaatttacatttaaatattaaatatttaaaaatattgtttctagcatatatcatagccagagtaaagactgagtatatttaaaattgattaaatcacctcatctgttttttttcctccccacgtagattttgtgtttttttattaacttttaattttgataatagttttaaatttccagaaaaattgcaagagaaaaaccaggaactcctatatatcttttacctaattcaccagttgtttacattttgtcctatttgcctcatttttgtcctgctccatgcacacgtgatgttttttccctggaccatttgaaaatgtttgagatatagtgcccatttgcctctaaatatgtacatctgctaagcaaaaggatactatcttataaaactacagaactaatcaaactcaggaaatttaacacttatttgtacaatgctcttatctaatacacagtccatattcacattttgtccgttgtcccaacagtatactttttttccccagtccaggatcatggattataatatatccatgttgtcatatctctctagctccatttaatctggaacagttcttcaatttttgtttttgaccttgacatttttgaagcatattggacagctattttgtagaatgtaccttgatttggatttgtccagtgtttccccatgatgagatttgattttgcatttttggtctacataacagatttattattttaggtttttctgacctgctcaacatgatcgtacagagatttttatgttcttgtgctaagagcaatgtggaaaactgagtcatgagggtttctaggattaagcaaagacaccagtcagataacactaacaaataacagtagtaaaatagcaccctagaaaattggttcattatagtgcctgttacttcattattggaatttgtatttttagtcagtgaaaaaaaacagactcggccgggcatggtggctcatgcctgtaatcccagcactttgggaggtcgaggcgggcggatcacctgaggatgggagttcaagaccagtctgaccaacatggtgaaaccccgtctttactaaaaatacaaaattagccaggcgtggtggcgcattcctgtaatcccagctacttgggaggctgaggcaggagaatcgcttgaacccaggaggcggagtttgctggtgagccaagatcgcgccattgcactccagcctgggcaacaagagcgaaactccatctcaaaaaaaaaaaaaaaaaaccaggctcagaattagtagaattagtacttctaagtagatataaattacctgtggcaaaatgaaaaataatgaggtcaggtgcagtggctcaagcgtgtcatccgaggactttgggaggctgaggtaggagcatcgcttgaggccacgaattcaagaccagcctccacaacaagaaagataaaaataaaaaaattagtgggcatggtggcacgcacctgtagtcttagctatctagaagaactgcttgagcccaggagcttgagggtacagtgagctatgatcatgccactgcactccagcctgggtgacccatctataaaaattttttttaaaaaataacagagaaataaagtaatgatagatgatctactctagaaaatatattgaaggaaagcttaaaacaaggttttcatggagcagacaagaataggcaaagatggctgggtgcagtggctcacgcctgtaatttcagcactttgagagtctgaggtgggtggatcacttgaggtcaggagtttgagaccagcctggccaacatggtgaaaccccgtctctactaacaatataaaaatcagctggatgtggttgtgggcgcctgtaatcccagctactcgggaggctgaggcatgagaatcgcttaaaccccggaggtggaggttgcagtgagccaagatcacaccactgcactccagcctggatgacagagtgagactctgtctcaaaaaaaaaaaaaaaaaaagaaaaaaagaaaaggaaaagaatagccaaagattttcattcatttttattcttaatattggtcaggaaaataaaattggagttaaagaaacccagacttttttctaggcatgaatttggatttttgtcatacctttaattcttataccacagaatgtcagaaattacgtatttatcagaatctttagttttctgcacattaatgttctcttcttcctaaaggtgaggcatctatactagctaccttctctgtaacagaagggaagaaaaaagttcctgtggctggctgcagagtccaaaagggacagttagaaaaacaaaaaaaatttaaactaacccgtaatggacatgtaatttggaagggtaagcaacatcaaaatctcctataatagcatatccagtcaccaagacctgttgactatataaccatctgaaatctgttcatctttcatgcccataatctcagctcaggccatttcttattgctattgaaacccctaaattgtctgtagttgatgggttccctttgcctgagatgtatgttggttttacccattcaagtcctgagtaccatcctgtcctcagcaaaaagtttatgtctacctttgaaataggagatttaggttattttgttacaaatcaagtcttattcacagcaaacttcatttttgagggggttcccctggtatttagtcccatcatttaacttgacaagaccataaaatttttaagaatttcagtgtaatttcctggttaacaccacataatgtagtatttagtaggtacttatcatttattgaatatactaaccttaaattatcttttttaaggctcattaacctcattgaaacaccataaagatgacatttcaattgtcaaaacgggaatggattgtggtctcagtttagatgaagacaatatggaatttcaagtgggagacagaattgtttgttatgaagaaaagcaaattcaagccaagacttcttgggatccaggattttaaaattacattaaaaatgtaaataactca

SEQ ID NO: 246 - DNA, 25485 bp, Homo sapiens
  source 1..25485: mol_type = other DNA
tcacttccgggccgcggtctagggcggctacgtgtgttgccatagcgaccattttgcattaactggttggtagcttctatcctgggggctgagcgactgcgggccagctcttcccctactccctctcggctccttgtggcccaaaggcctaaccggggtccggcggtctggcctagggatcttccccgttgcccctttggggcgggatggctgcggaagaagaagacgaggtggagtgggtagtggagagcatcgcggggttcctgcgaggcccagactggtccatccccatcttggactttgtggaacagaaatgtgaaggtaaaaaccagagcccgaaccgacaatccttttctcctctctcacaccagcggcgggcagggggttggtaaccacaagccatctctcgtctccccgaccccctgtctccacccctgtcgcaaggtctcgttcccctcaccaccttctccacccgcgtcatcaggtttagagctggttgtgtgggaggaattcctttcaccctgccaatgtgttccttcgcagacctgaaaacggggaccgagactccccttctctggggccgaagcgcacgtccgaagaacattagacttgaatcgtaaattcggtctctcaccctgtcccgaacgtttctgccctcggcaggtggactgtttggctgggcttcttcaacagctttgccagacttgagaggagaagcgtcggtttacctgagttccttatgatccctagcatttcgcccggtgtagtcagcttaggaaatgagaaatgatttcactccaaaccaacagttaactgcaaaggagggcatgtgataactccaggaagcccagagccggtgattttggtggcctgtgttccccttggtgagctctctactcttcgctataccaaaaattggcgaggtggggcaggaccattcttggaacaaatgaggcgtatagatatggcataatattccccgtgaaggacaggcatctccgggttctgagcagttcttcaggcttggagttctgcattcagttcgtggagactatttgcagcccattcgcagaaaaggaaccagaaaccacgtcatataaatgagtgcccaagcgttattgtggttgtttaatcgggcaagactttgagggtagtagtattcatcaattatttgaacatctgctttgtgttgtaaggttgagtagaatagagctagggtcagttggtacaagctacagggaaacaaatttcagtgaaggaagtgtttcatgatagaatgtatccaagatgagttagccagcctcagaaggtaatgagcttcccggctccagcagtgtttgaatggatctgatagcgacttaatagggttagagggattcagctattcagctatcaaatggtcggttatcctggatgaccttttaagacttctttaaattccaagatatcatgaatctggtaaagatgaaattcagtttgaccactgaatcttttcattacattttcattgctataatcaatattcaaatcgtagttattaaagtgttatttttacaggtaattttttaacaatgttcaaaaacaaaataacttgtatttgtactccttttttttttttttttttgggagacagagtgtcgctctgttgcccaggctggagtgcagtggcgtgatcttggctcactgcattgttttatacatatgatcattcagtaaacacttgttttgattttatttaacttcattatttatctgtggtaacaaaaattgcctggtcactttcagtaacatttacatcagcaaaattccagtacaataaaataatatggaacctattgtaaaaggatttaaccattaacaataatattacattaaaagttatgaagaaattattgcctcatattgattgaaatgtgtttttgtcttaaatatgaggtagtattcattttaaatattttctcaagtaggcaaaaaagcttgtttacaattaatagtatatatgtgtgtgtgtgtgtgtgtgtgtgtgtatatttttttttcttttttttttttgagatggagtctcactctgccgcccaggctggagtgcagtggtgcaatcttggctcactgcaacctccgcctcctgggttcaagcaattctcttgcctcagcctcccgagtagctgggtctacaggcgcgcacaaccacgcctggctgatttttgtatttttagtagagatgggatttcaccacatcagccaggctggtctcgaactcctgatcgtaggtgatccacccaccttggcctccgaaagtgctgggattacaggcatgagccacagtgctcggccaatagtatatatttttagatatattcatttatatatttttaaaagataaaccctaagaattcaaagctgaagagctaggttgacagttctatttggaaggagtggatttttaaatttgcattaataaaatgatttggtttttacactatgtaatattttcttttaaatttagtttttgatgatgaagaagaaagcaaattgacctatacagagattcatcaggaatacaaagaactagtgagtattttttttcactgatttttaaaagtaattaggctaatactacttatagcttttctaaatgaagaaaaatatttttacattaaaaatccttaattttacaaaaatccaatctaccttaacaatagtgccagttatatctgtctccacaggtgctctgaatatctcatttggatgacttatctcctctactctaaggaatggttttacaactctttatgggttcttgcatgtattctttatatcttattcttattttgttgacgcatccagggacatattaattattcacttcgtcatggttgtcatgtgatttttttattttttatttttgagacagggtcttgctctgtcacccaggctggagtgcagtggcactatcacagcctattgcagcctcaacctccccaggctcaagcgatcctcccatctcagccacctgagtagctgggactacaggtgtgcaccaccatgccctgctaatttttttgtattttgtagagatggcgtttctctgtgtttcccaggctggtgtggaactccagagctcaagtgatccacctgcctgggcctcccaaagtgttgggtttacaggtgtgagccactgcccagcctgtcttgtgattttaaaaaatgcctctggcagtggggctcagtggctcacacctataatcccagcactttggaggccaaggcaggtggattgcttcagccaaggagttcgagaccagcctgggcaacatggtgaaactccatctttataaaaattacaaaaattaatcagtcatgatggcatgtgcctgtagtcccagttgcttgggaggctgaagtgggaggatgatctcttgagcccagaaggtcaaggctgcagtgagccattactgtgccactgtactccagtctggacaacagagtaagactctgtctcaaaaaaaaaaaaaagaaagaaagaaagaaaaggccaggcgtggtggctcatgcctataatcccagcactttgggaggccagggcaggcggatcacctgaggtcaggaattcgagaccagcctgaccaacatggtgcaacgccatctctaccaaaaaaaaaaaaaaaaattagtcgggcattgtggcaggcgcctctagtcccagctactcaggaagctgaggcaggagaattgcttgagcctgggaggcagaggttgcagtgagccgagatcgtaccactgcactccagcctgggtgacagagtgagactccatctcaaaaaagaaagaaaagaaaagaagaaaaaaaaatgcctctgggtagcagaagagttgtaccacattgaacttcataatcctgacttcaactatttctattagaagaaatacaatttcatgtgattttcagcaaaaatattaacttttaatttgtgttttggtgaaagacaatgtcactgtcatgtaatatgtagattaatatttgcaaaaaattcgatgatacttttctaaactaaatacttaatatgcaaactgtcatgtagaatttttctatgtaattataaaagttaaactttgtttttttaggttgaaaagctgttagaaggttacctcaaagaaattggaattaatgaagatcaatttcaagaagcatgcacttctcctcttgcaaagacccatacatcacaggtttttgctttgtgttattctgctaacatacagttttaacaaatgcccagggttaaacactcacttaaatttgaatgtttgattgacaaagtgtaatattttagacattgtgagaggtagaaagataattcatcacatatgagttctttttgagagcaaccctgaaaaatgataatttgaggcattaatgaactgatgcaactcaaagtgacctttctaaactcagaactagaataagatcacagggtttatacaaactactgttttatttacatagatctccaataattctgcagttgctccttttataattttagcagatccacagtcagtagttcctgctgctgcttccttctcttggaactacttgtattatcttactggttgtgtagtgctaggctgaagtagtaatacatatgttataaactaatgtttgtttttgttgtttttttgatatggggtctcactctattgctcaggctggagtttagtgtgattgcagctcattataggctcaacatccctgggctcaggtaatcctcccatctcaactttcctggtagctgggactacaggtgccgcaccagcacacatggctaatttttttttttttttttttttttttgtagagacagggtcttgctgtgttgtccaggctggtcttgaatgctgggctcaagggatttgcccatcttggcctcccaaagtgctaggattacaggcatgagccaccacgcccagcctgtaaactaatgtttattgagggcttgtgctaattgatattttgggcacttgacatgttttatctcatttaatcttcctgacacctcttaagaaactgctactatataacttccatttagaaatgaggaaaccaggcccggagtagtggctcacgcctgtaatcccagtactttgggaggccgaggcgggcagatcacctgaggtcgggagttcgagaccagcctgaccaacatggagaaaccccgtctctactaaacatacaaaattagctgggcatggtggcacatgcctgtaatcccagctacttgggaggctgaggcaggagaatcccttgaacccgggaggcggaggttgtggtgagccaagatcgcgccattgcactccagcctgggcaacaagaacaaaactgtctaaaaaaaaaaaacaaaaaagaaatgaggaaaccaaagcacagatatattaagcaaatagtccaaagtccacagctaaataagtagtagagccagtatccccagcccaggcaagccaactgagtgcccttgctcagagggtgaggattgggatatgttgctactacccaagtagccttttgctcaaaaactgaaggccaggaagtggctcatgcctataatcccagcactttgggagaccaagacaggaggattgcttgaagccaggggttcgaaaccagcctggacaacatagtgagaccccatctttaaaaaaaatataaaagttagcttgttgtaggttgtggtggtgttctccccagagtacctactcaggatgctgaagtaggagcatcacttgagcctaggaggttgaagctgcagtaagacaagatcatgccactgtactccagcctgggcaacagattaggacccaaccccaaaaaacaaaacattggctttggcatctcatcttctactaaataaactgtaatttcttagcaagatatggtaagaattgtttaagatgagactccagattgtatttttagccatgatcccttgctatagttctccaatacattatgttctactgccattccaggtaacttgctctcttttttttttcttttgagatagagtttcgctcttgttgctcaggctggagtgcaatggcacaatctcggctcactgcaacctccgtctcctaggttcaagtgattctcctgcctcagcctcccaagtagctgggattacaggctcccaccaccatgcccggctaagtttttgtatttttagtagaggcagggtttcactatgttggccaagctggaacacctgacctcaggcgatccacccgcctcggcctcccaaagtgctgggattacaggcgtgagccaccacgccctgctgccccttgctcttataagcatctgtacacctacctttgctcatgctgtcccttaacctggaatgtatggtcccctccccagaccactccatcattcctttcataatgcggagaaatcctcattatcagggcctggttgaaatgctacttgttatagcagctttgctgcttattctaaagtcagaccagaattcaatctacttaactaggccaattgtaaattgatatttttgttactctgccttgaattatagtttcctacaagtctatttgccctactaaattgtaagtcctttgagctgtgtttagtatatttgcattccctgctggtagaacagagatgaaaacttagttgctagtacatagttctcaataaatgtttattaatttaaattgtcttgttatgatggcctagaagaggttgccttgactactttttaatccagcacttcctcttttgcacaacttttcatttgatgatcacctttaattctaggaatagaaaaccttttttgtttgtttgtttttgtttttgagacagagtctttctctgccaccctggctggactgcagtcgctcagtcatagttctatgcaacctctaactcctgggttcaagtgaatctcctgcctcagcctcctgagtagctaggactataggtgtgcaccattatgcctggctaatttttcagttgttttgtagagagggggtcatgctgtgttgtccaggctggtcttgaggtcctggcatcaagcaatcctcctgcctcaccctcccaaagctctggggttacaggtgtgagccactacattttggctgggtgtgatagctcatacctgtaatcccaatgctttgggaggctgaggcaggaggattactttaggccagggtctcaataccagcctaggccacaatgcaagaccccatctctacaaaaaataaaaatacaagaattagctgggcatggtgacacgctgctgtagtcctagctacttgggaagctgaagtgggaggattgcttgagcccaagaatttgaggctgcagtgagctatgactgtaccactgtattccagcctgggctgcagagtgagaccctgtctctaaaataataataataataaaataatttaaatgttattggtatgcccacattaatgtgaaaaaatctggcaatttccaagaagacataacaatctttaatatgtatgtacctaataacaaagcaacaaaatgtgtgaggcagaaacggaactgcaaggagaaatggatgaatacatgattatagttggagacttcaacaccctctgtcagtattggacagatccagtagttagaaaatcagtaaagacatagttgaactaaacagcaccttcaggccaggcacggtggctcatgcctgtaatcccagaactttgggaggccgaggtgggtggatcacttgaggtcaggagttcgagaccagcctggccaacgtggtgaaacccgtctctactaaaaatacaaaaattagccgggtgtggtagtgggcacctgtaatcccagctactcaggaggctgaggcaagagaatcgcttgaacctgggaggtggaggttgcggtgagctgagatcgcgccactgcactccagcctgggtgacagaacaagactgcatttcaaaataaataaataaataaataaataaacaaacaacagcaccttcagtcaactgaatttatttgacatacaccacttcatccaataatcaaaaatacacattcttctcaagatcacacagaatgttcgtcaagacagactacattatgggccataaaacataccttaacaaatttaaaagaagagagatcatacagtgtctgctctcagaccacaacataattaaactggaaataaataacaaaagataattggaaaaaaacaaaatacttggagattaaacaacacactctaaaaaacacatgtgggccaggcatggtggctcatgcctataattccagcactttgggaggccaaggtgggcagattgcttgagctcaggagtttgagacaagcctgggcaacatggtgaaactccaactctataaaatacaaaaaaattagcagggtgatgtggtacacaccttccgccatgttggccaggctggtctcaaactgctgacctcaggtaatctgcccacctcagcctcccaaagtgctgggattacaggcataagccactgcgcctggccacaatttttgttttatagaattataaggaattatataattatatataaaatatgtaatcatagaataatcataaagtattatattttatagaattataaacaaatgcccctctttattgctgatcatctttcttgttctgaggtctactttatctgaaactaaattaagctactccagctttctttttttttaaacaactttattgagatataatttgcatatcacaatactgatccttttgaaaaatttttttttttttgagacggagtcttgctctgtcacccaggctggagtgcagaggtgcgatcttggctcactgcaacctctgtctcctggttcaaatgattctccggtctcagcctcctgagtagctgggactacaggtatgcaccaccgcacctggctaatttttttatttttttagtagagatggggtttcaccatgttggctaggctaatcttgaactcctgacctcaagtgttctgcctgcctcagccgcccaaagtattgggtttacaggtgtgagccaccgtgcccggctgagaaccctgttttaaaggctattaagataaattttaaaattgtccttttgggacatctaatcataaataacaatgtagcattcttgaattaatctactgttttgcagtagaaatggttcgaatgtatgggtaatagttttaaaacttgaatcttcatttcacttgagacttctttccacaggccattttgcaacctgtgttggcagcagaagattttactatctttaaagcaatgatggtccagaaaaacattgaaatgcagctgcaagccattcgaataattcaagagagaaatggtaaaatgttgaagttagaaatctaagtactaaatgcatttttttttacagttttgactattctaatatggtcttaaatgtagctgtctcatgtacatttatttcaagtttgaaagacttcagctgacttgagattttagagtatatggctgggtgcagtggctcacgcctgtaatcacagcactttgggaggctgaggcgggcagaccatgaggtcaggagatcgagaccatcccagctaacacagtgaaaccccgtctctactaaaaatacaaaaaaattagctgggcgtggtggcgggcacctgtagtcccagctacttgggaggctgaggcaggagaatggcgtgaacccgggaggtggagcttgcagtgagctgagatcgcgccactgcactccagcctgggtgacagagtgagaccctgtctcaaaaaaaaaaaaagagtataaacttcctgatttgtatttgacatctcaaagaaaggagaccagaattcaatgatactttggatttcacagagttcaattttctgcccagccattatgtttatgaagttgagtatttttgaatggtcatagttgtggttactgttgagaggtgtccatcctttttctggcttaagattgttaggacctttgtaggaagcagtggttctttttttttttttttttgagacggagtctcgctctgttgctcaggctggagtgcagtggcatgatctcggcttactgcatgctctgccttgcgggtttacaccattctcctgcctcagccttctgagtagctgggactacaggcacctgccaccactccgggctaattttttgtatttttagtagagatggggtttcaccatgttagccaggatggtctcgatctcctgacctcgtgatccgcccgccttggcctcccaacgtggccggaagcagtggttcttaagctttagcaagcattggaaatggttggagggcttgctgaagcacatatggctgcctcccagtttctgatttaataggtctggggtaccgataatttgcatttttaacaatgatatggtttggctgtgtccccacccaaatctcatcttgaattcccacgtgttgtgggagggacccagtgggaggtaattgaattttgggggcaggtgttccccatgctgttcttgtgatagtgaataagtctcatgagatctgatggttttgggaaaggggagtcttcctgcacaagctctctctttgcctgctgtcatccatgtaagacgtgattgctcctgtttgtcttccgccatgattgtgaggcttccccagccatgtggaaatgtaagtccgattaaacctctttcctgtgtaaattgcccagtctcgggtatgtctttatcagcagcatgaaaatggactaacacaaacaagttcccaggtgatgctgaagctgctagtcctgggaccacaccaacacccactgttctagggcactgggcagagacagataagcttgtaccagcatcatgtggaagacaaaatggaactcaaagccctattaaccctggttggctttatctttcccctgaccctgtgcttaagttcactttctctctagctcttcctgctcttgttcccttcttgtgtacctgaactacatttaacatcctgactcaaaacagccgagtttctaaccatgctacttgttattgtaccatttcctttctaacccagattatcatctctgtttcaaatttcttgctgtggtaacctcaccttaatttctatgtcttcgttagctcaatagattgccatgatatttttttaccacggcccataacctctttaatggcttggcagcaggacctttcctttgattgtttcttgaagatatgagatctatagttcagttgtatcgttggctcttaagggcctggaacatgcaacaatagggcttccgttgttgcatggcaaacatgagaattttgcatggcccttactggggagtttcctcctcatttgactgatgtgagtagagactcttagagccagccaccatcataatcatctactagaatcccaagatgctttccccagcagctaatagcgctgttgtctgtgggtagggggaaaacaccaccctaaccctgaagaatccatgacatagtgctattactttgatgtgaataagtctggaaaatagtctctttctactgtggtttgctctataaaatccttgcctctgaattttcctgaaaactatgctttattctgacttacgggttagacaattttagtaagtatgttagtaaacaaatttttttaggggatcaggaaaagaaatagtgaacttgacaatggcattctttagttttcagtttggaatttaattggaaactcatttagattttaataaaaagggaataaatatatatcttgtatcatgtggatgccttaggctgtcagtaacagaacactccagtgaagaaaagatctcccagaacaagaagtccagaggaagggagagaaggaagacaggttcgggattggttaatttagtggctcactgatctaatcaaggaccccgacactttgcatctttatactctgccattctcagaatcttctctcatgattgtactctggctgtattgaatgcagactcaacagtgtcttatgaagaaatggaatatttcctcctgtacatctctttttgttagcaagacaacaatttcatggaaaccctccagtttttccctcaggtcctattgattaggattggggtcacttgcctttcttaaaccatctggcaaggggaatgagaccattatgattggcttgaaccaattaggagtcactctcctgggattggggagggccctgcctctaagtagttagctgcctgataattctgcaaaagctggcttctattagcaagggaggaggaggggaatgatgtagaataatgactattgtcaggccacagcatggggcattttacttacatttaaacataaggtaatacttagtttctgctacagaatttctaatacatgtacttaagagttttgctggctgggaacagtggctcatgcctgtggtcccagtgctttcagaggctgaggcaggaggatcgcttaagcccagcctcagacttctgtttgaggctgcagtgagctatgatagtaccactgcgtgccagcctgggcaacagagcaagaccctgtctcaaaattaaaaaaaaaaaaagaaaaagaaaagaaagaatgttgcctgactaagatccaggggtgaataccttagattaatgttgattatactcaaaactgcagactatttgaaaatagttcttaatgatgagaaaaagtcaaaggctctctggattcttttttatctttttggtgccttattaaagaatttagagaaattgcaaatgagagtattattttgatggtttttaagtacttcatactgttgtgttattcttagtactttcagttttcctcaggaagattattaggagaataataattttatatcttttgactgagcaaaaatgcacttaagattaatggattagttagatgtcagttttctgattgtgatattgtactactatagttttgtaagatgttaccacttggggaagctgggtaaagagtatatagcagatttctgcattatttcttacaattgcacttacctcaaaataaaacatttaatttaaaaaaatgtatataaacatcaggaggattagagtaataaagctacttaagagtagacccaaaatcctacagtcatatgtggataaagaaatggaaggtaaaaattaagaagcattctgctaatgttgtggaatgtaataattacagatgcaaacagaacaattattaccagtccacctgcttcgcaggaagataaaagtaataaagtaaattaaaccaatattttaagttactttttattttcttgggctcaagttgctacttccctggtttataattattagaccaacatctgaatagaagcttcaagggcagagatcgttttattcatctttgtatccccccaaagtgcttaacaccatggttttattacacatagtaagcagcgcccttttcaataacatctgttataatataaatgaagacttttaatgctatttcaattagcaaaattatattttgttttgtgactcttctcatttaagggacacctttgagagcagtttcattattaagcctaactcaatgatttccgtagtatattcttagacactatatgattatggaagagaaaaacatattaacaaatttttgttgccatacattgttatttttaattgccaataaaataattactaagagatatttgtagttaaaagtgtggggtttttggtggggcttattctgtaaaataggaaaaggcttaaaagatgatagttaaaaatggccgggaatggtggctcacgtctgtaatcccggcactttggtaggccgaggggggcagatgacttgaggtcaggagtttgagaccagcctgccgacatggtgaaaccccatctctactaaaaattagctgggtgtggtggtgggcagctgtaatcccagctactctggaggctgaggcaggagaatcgcttgaagctgggaggcagaggttgcagtgagcccagatcgtgccactgcactccagcctgggcgacagaaagagactctgtctcaaaaaaaaaaaaaaatatatatatatataaaataaaagatgatagttaaaaagataatagcttaggatgttacagtgatagatctgaaggtaacttgtacttaaggaacgagaacagtgagaaatatatgtttttaatggagttgatactatttcatgtggtctttggttttgaacaggtgtattacctgactgcttaaccgatggctctgatgtggtcagtgaccttgaacacgaagagatgaaaatcctgagggaagttcttaggtaccattctttaattgttttttaaatgaatcattattaatattatatgatctgtacatatgctttttgcccaacaaatatgaactaataaaattgctaaattctctactgaaaaccatcaaaatgatctatcaatttatgactgtggatatatttcttagtgacagaaaaagttattttcaggtaacttataccagatcagtccaaatgaaagggtctttttacacccgcatcataggaataggaaagtagccaccaatgggaaaaagttgcagtagacctagcctgatctctggagagaggtataatgacttgagctaaacagcttactccttggcttctggatctcactatggaggtggcatattctaggtgtcacatggtaggaggctgggcatccagattccacagattgaatagctgacttggtgatagtaaccttcaagggagggatgacagaggcgtctatcccagatgagtatcttgccggtctccttgtttccccagttaaatgattctcagccaaatgcctggcaaagagtgtgcagaccactaatggggtccacacagaactaagaaatggtaatggacatttctttttcttttgggcctgttgtgccctgacctttatgggaattttggaaggaaggggcagtagtagctcctaatttttaaatctcctgtgagaatatattagatttagggcaaaaggatgcctataatcacagtgtcacttgcagactgtggccttggcctttggggtcacttcttctccaactatactaccacacatgaccatcttctagcatcctacagttccccccacttaggtactttgtcccacctccaaagcagaagagaggatcagaggatgggcctgatgggaaactatggcaggagctccaggatgcagtgcttaatttcgggggtttgagtgattatggagagggtagcagatatgcagttgaactcaaccctttcttgccacatccctccttggatggcaggggcaaatgggagcctgagacaacacagaatgctttgagtttacaggtttgagatgtaagggtgtttggttcagaggactggtaaagttttgatttggactggttgtgttggttgattggtggcctgaaaactggtcagcactgtatttttagattttattttccaagagcttttgaggggatatactactgtgtaagtaatagaacttagttatgaacatgtataacagttgaccttggttactttcgaaaagcactgtctcagtgaacagtttacaaaagttgatgggctttggcacagtggtatcacaagtgcttgatgatagctcagatgccattggaacaatgacattttatcaagaggggtataatggctcttatcaagaggggtgtaattgatcactctaaagagggtgattgaagtccttattaatgggatttgccattcaaatttgggttcaggatttcaaatctgttgatctttattcagctagggttcattcagagttctagaagaaatgggtagacctgtattttgtgttactaactgtattatgctgtatgcctatgtatgtctttcccagttgactgtaagccactttagagcaaggcttgattatcttccatctttgtgtctaatgtgccttttattgtaagcttaggttagcatgttgcttagttgaatatttgttctttgaccaaaaaaggaaatttatctttttatcttatttttgtatatttcagaaaatcaaaagaggaatatgaccaggaagaagaaaggaagaggaaaaaacaggtgcctacagaacatataacagaagtattttattgctgttatctcttattaagtttacacctagatcttactattaaaatttatacttatgtggaactacataattttaagtacaatgtaaatattgaccaataatattaatatatcaataattctatgtatgtcgtgcattactgctggccaccatattatatagtactatatatacttaactgtatatagtacaaacaccacatagtactaattaatcttacaggacatgcatataagcaagagtagtcattttttttggcaagtttaagcatttgtttttaactttttatacttttttctccttctttatttttgtcctggtaactcacagaacaacattttttttttttttttgagattgagtctcattctgtcacccaggctggagtgcagtggtgtgatcttggctcactgcaacctctgcctccggggttcaagcgattctcctgcctcagcctccagagtagctgggattacaagcgtgcgccatcacgcctggctaatttttgtatttttagtagagacggggtttcaccacgttgatcaggctggtcttaaactcctgacctcgtgatctgcccgcctcggcctcccaaagtgctgggattacaggtgtgagccaccatgcccggccagaacaaccttttatactcttttatttatttatttttttggagacagtctcactctgacacctgggctggagtgcagtggcgcaatctcggctcactgcaacctctgcttcccaggttcaagtgattctcctgcctcagcctcccaagtaggtgggattacaggcgtgtaccaccacgcccagctaattttttgtattttcagtagagacagggtttcaccatgttggccaagctgctcttgaactcctgacctcatgtgatccacctgcctgccactgtgcctggccaactttttatacttcttaatatataaagtatatactttttttttgagactgagtcttgttgtattgcccaggctagagtgcagtggcgtgatcttggctcactgcaacctctgcctcccaggctcaagcgattctcgtgcctcagcctccccagtagctgggattataggtgcctgccaccactcttggctaatttttgtacttttagtagacagggtttcaccatgttggccagaccggtctcgaactcctgacctcaggtgatctgctggccttggcctcccaaaatgttgggattacagacatgagccactgtgcccggccaaaagtatatactttcttataagagtgtatactttatactttcttttaaagaggccagacgtggtggctcactcctgtaatcccagcactttgagaggctgaggtgggtggatcacttgaggccaggaattcgagaccagcaacatggcaaaaccccatctctactaaaaatgcaacaattagccgagcgtggtagtgcacacctgtaatcccagctactcaggtggctcaggcatgagaatcatttaaatccaggagccggaggttgcagtgagtcaggatcacactactgcactccagtctgggtgacagagtgagactctgtctcaaaagaaaaaaaaaagaaaactataatatctttggatcctttaggtagtgaattagttaaaatgaatctaaattgtgtgttttttaaaaaattgtattatggaatcctgaagttatcagaggctaaaacagaagagcccacagtgcattccagtgaagctgcaataatgaataattcccaaggggatggtgaacattttgcacacccaccctcaggtaaggttgaggtgtactgaactttctctaataatatgaatacataaacaccatatagaatgtgccactttctcatacttatttaacttcaaaagccctgggagggagtattgaatgtctttggtatttaacgttctttgtgaatttggttaaagaggttgcagacgagatactgacctgaaagagagcgtatagtcctcaagtttccgtgtaaagcctggaacccagagtagagagcaaaactccttgagggagtaactagcctttgtgcatgactgcagcttacaagagaggttcacataacatttggtattctcttccatgcttacagttgtatggtatttgttagtgagaagctgaacttggaaagataatattaaatttcttttccaatgaattaagtacagctagaaaataagaggtagccattttgtccagatatttggtcagaaatcatatctttgaaatcaaaatttataggaatccttgtaggaaatactagtggatgaccttttcaacatgtggcaaatctattctcaatatgaactgattttctatataagaaaacaagtaattctgaaacagaaattatggtcatgaattcagttcattttattatggattcctatggttttaaataaatgtccttttctcaattaaaaaaatatactctgtgaggtagatattataatccttgtttttcttttatcttttttttttttttttgagtcagagttttgctgttgttgcccaggctagagtgcaatggtgtgatctcggctcaccataacctccacttcctgggttcaagtgattctcctgccttagcctcctgagtagctgggattacaggcaggcaccaccacgcccagctaattttatatatttagtagagatggggtttctacatgttggtcaggctggtctcgaactcccaaccttaggtgatctgcttgccttggcctcccaaagtgctgggattacaggcatgagccactgtgcctggctactcttatcttttttaaaaaaattatttttgttgagtcgggtgttgctgtgttgcccaggctgggtctcaaactcctggcctcaagtgatcctcctgcctcagcctcccaaagcactaggattataggcatgagccactgtacccatcccttcttttttttttttttaaagaaattcaaggaagctgagcgacttgtccaagatcaccgaactcttcaatggtgaaattatgacttaccttggtcttctgacactaaatatattcttctaaaccttagtttagaagaacttctataattgagattagtgtgatgtttacccattaattttttaatgtaagttggagaacacctttctttaatatgcctaatttaagctgttttaggttcacagtaaaattgagcagaaggtacagagatttcccccatatagtccctgccctagtacatgcctagcctctcccattatcgaccccctcaaaagtagtacatttgttacgttggtgaaccttccttgacacaacattaccaaccaaagagcatagtttacattagggttcactcttgctattgtatattctgtggattttgacaaatgtatgatgacatgcattcaccattatagtatcatgtagtatacagtttcattgccctaaaaattctttgtgctctgcctattcatccttcccacctcctagcccatggcaaccactgatcttttactgtttccacagttttgccttttctagaatgtcatatagttgaaatcatacagtagtacgtagccttttcagattggcttctttcacttagtaataatccatttaagatttctccatgtcttgtcatggctttgtagctcatttctttttagtgctgaataatattccattgtctggatgtgccacggtttgtttattcatttatctgctgaagaaaatcttggttgcttccaagttttgacaattatgaataaagctgctataaacatcagtgtgcaggtttttgtttggacatagctttcagctcctttgggtaaataccaatgagcatgattgttatatcttacagtaagagtatgtttagttttgtaagaaagtgccaaactgtgttctaaagcggctataccattttgcatttccatagcagtgaatgagcgttcttgttgcatccttgccagcatttggtgttgtcagtgttctggatttggagtattctagtaggtgtgtagtggtatctcattgttgttttatttgcatttccctgatgacatgatgtggagcatcttttcatatgcttgtcatctatgtatcttctttggtgatgagtctgttaaggtttttgacccattatatttgttgggttgtttgttttctttttgttaattgggttcattttcttattgttgaattttaagtgttctttgtatattttgaataacagtcctttatcagatgtgtcttctgaaaatattttcttccagtctgtggcttgtcttctcatcctcttgatactgtcttttacatagcagaaattttaatgaagttcagcttattaattatgtctttcatagggtgtgcctttggtgttgtatcaaaaaagtcatcaccatacccaaggtcacctaaatttcctcctatgttatcttctaggatttttatagttttacattttacatttaggtctgtgatctattttgaattattttttgtgaagggtgtaaagtttgtgtctagattcatattttttctttcagatgtccattttcctttcctcaccgtattgcctttgctcctttgtcaaagataaattgattatatttatgtgagtttatttctgggctctctattatgttctgttgatctatttctccattcttttgcaaataccacactctcttgattactgtagtttgaagtctccaagttgggtagtgtcagtcctccaattttgttcttcaatattgtgttggctattctgggtgttttgcctctccatataaatgttagaatctgtttgtcagtatccacaaaataacttgctgaaattttgattgatattgtattgaatctgtagatcatgttgggaagaactgacatcttgacattgagttttcctgtccataaacatggaataggccgggcatggtggctcatgcctgtaatcctagcattttgggaggccaaggcgggaaaactgttcgagctcaggagttcaaaaccagcctgggcaatttggcgaaaccctgtctttacaaaaaaaatacaaaaattagccaggcatggtggtgcacgcctgtagtcccagcctctagggaggctgaggcaggagaattgcttgagcccacgaggtggatgttgcagtgagttgagattgcatcactgcactccagcctaggtgatagagtgagaccctgtctcaaaaaaataaaataaaaaaataaaaaaaaggccaggagtagtggctcacacctgtcatcccagcaatttgggaggccgaggtggtggatcacttgaggtcaggagtttgcgaccagtgtggccaacatggtgaaactccatctctacaaaaaatacaaaaaattagctgggcatcgtggcaagttcctgtaatgctagctactcgggaggctgaggcaggagaatcgcttgaacccgggaggaagaggttgcagtgagccaagatcgtgccattgcactccagcctgggcaacaagagcgaaacttcatctcaaaataaaataaaataaaaaccatggaatatttctccatttatttagttctttgatttctttcattagaattttgtagttttcctcatatagatcttgtgcatattttgttatattttatatctaagtatttcatttttaggggtgctgtgctaatgtaaatggtatttttaattttaaattccatttattcattactggtataaaggaaagtgataaactgttattaatttgtatcctgtaaccttgctatataattattcatttcagtttttctgtcaattgttttgcattttctacatagatgatcatgtgttctgcaaataaagacatttttatttattccttcccaatcagtgtaccttttatttccttttcttgtcctagtggattaggtaggacttctagtatgatgttgaatcagaaaggtgagagaggggacatttttgccttgtttctgatcttagtgagaaaccttctaatttctcaccattaagtattgtgttaagttttagagtttttcgtactctttatgaagttgaggaagttcctctctattcctagtttactgagagcacccattaattttaaggagttagattcttatttgacagaaaaacaggagtatattgaatcagaagcagatctgtgaagttaccttgcttctttgtaccaagtcaaaccatttcttttttatatatatgctacagattgtaaggagaaatagcctcattttaatgatatatatgaaagctcctgctttaggtttgtctgtgctctagtttgctgacccaaattaactttgttttatatacacctaagtacatacactatttaaatcttgtgtctaacataaattgaataaatttgctttgtctgctttcttatctaagtgaagctatagaaaacttgatctcaaaccacatataattcagttgtacacattaatggtacaccataaatggtagatctcaaaagtaatgatttcaatttttaaaataatttttttcaaatgcgcatatctgatatttcagagaatcacttcgtacaaagtgatggaagcccagtatgaagacctgagtttggaagaatcatgaagttgtttgagcttctgctttgtccttttgcctgtctttccctcattcctgccagcaatggatagtgtcttttctcagattgatgcagatttgccagagatgagatgatctttctttaggttttctggctttctgatcttcccttcctagaaattagagaagctaagtatttggcttcaagtactttcctttctaggcctgagaatatacgtatgttcataattaacaaacccaaggcaagaactgtccagagaaagaacatgagtggaatataaatgcttatatgtatgggttcccccctcctcaggaattatttgaactgtcccttctccagttctgtgagtccactgagggctaagcctacctctgctaacgtcactctcagtaataacagcggtgttttacctctatctttatttctgttagttatgtagctccctgtctaggttggtttggagtgctggttacagcttatcttttccatggagatttcccttattgtccaagggtctggagagcttttcttccttcaacctctctggcactgtagtcagtctggtcactgctagaggagtggtctgttgtcaagtttcttgcacagacaaaattctgttttctgttttagtatgtatgctggcaaggtattttttttttttaactggcaggatcaaccaggtgtggcaaaaattttaatcatttagacatgtgtgccatgttttcccatcatgcttttagatcttagcatcattttaatgtctttgcttgtctcagtgtgctttctttcatagcccatgtatttacactgaaaatgttttatctttttaaaaacaatcaccttataataaaaaatggctcagaggagcaattagaatgttaactctctctcttggttggcacagtcaccaaatggctggaaagtatttagtgctcatgtttatatgtgcttccaagttctgcttgctttagaaatctttacattttcataatgcactggcaggtttatagttatcttcaatacataattataaacaaaaattattgacattactggcatgcactcttgcaatacaaaaaattatagttttacattaattgttctgaaagtatagggtgactttttacatgcaagcaaaagtttggaaaccaattacattgtagtaagggattagtatactgtttatttggattatgtggcaatcttatattatagtgtagttctaatctttagacaaggattttagctttttgtagctatagtactgtacaaacagcagaagcatggtacttgttgagaagtaggtgagaaactgtagttccaagctccttaaggatagagacatgatgtttactgttcttacccagtggctggcacagtataggcactgaatatatgttgactgaatgactatgaggaaaaacaagtattattaacattagctcatttcggtaaacctagcctaacacttaaaatatttctcataatattctaattgctcttattgtctacttattgccagaagttaaaatgcattttgctaatcagtcaatagaacctttgggaagaaaagtggaaaggtctgaaacttcctccctcccacaaaaagacctgaagattcctggcttagagcatgcgagcattgaaggaccaatagcagtaagtaaacgacatcacttaagaactataagcaaaatgacaaggtactgggaaatcaaacttcgaattgaatcactcagtgggcatctgtgctacttactaaatggatttgaatttagatagctccttttcttacttgacccagaacttatcagtacttggaacagaagaacttcggcaacgagaacactatctcaagcagaagagagataagttgatgtccatgagaaaggatatgaggactaaacagatacaaaatatggagcagaaaggaaaacccactggggaggtagaggtatggctagccttaatatgtcaagatttacaaatctggtggtggaactatcaaaatcagaatatgtgcaagaaagcctctaataaattttgcttgcagacccattcatattaatcacctcctagtgcagtagctgctaagtcttttctaggaagtgaaattgttgtgataaggattttttgaggcagaaaatagcggtgtcattatacatttttttcttatgctgtttctttacttgcccttctctgagtatgtcagggttggtggtctgtttcacctgggcattctgaaatgttttatcatagagcagcatcagtaccacctttatcatagagcacatcagccaccacttcccagaggggttctccaagaagagactttacgaagaagagatttaggaaacctagtctatgtctgtctctccctccgtcccacaagaaggtgcccccgatttttgttcatttgaggcagtatgttgggaattttagacaaattaccctatttcatactgtagccaattttttctttttttttcaggaaatgacagagaaaccagaaatgacagcagaggagaagcaaacattactaaagaggagattgcttgcagagaaactcaaagaagaagttattaataagtaataattaagaacaatttaacaaaatggaagttcaaattgtcttaaaaataaattatttagtccttacactgag

SEQ ID NO: 247 - DNA, 32744 bp, Homo sapiens
  source 1..32744: mol_type = other DNA
gctattcacacgcttcagttcacaacttccatccagaatcctacttctctgattgtcctcatggggaaagtatgctatttccttcatcctacaagatgcttctcactgactctatccatattcttctcatccttcaagagccaagtcaaatctctctgcttccaataagccttccttgctacactcaggtaaatgtaatctctccatctcctggcgaatgtctcgatttctttttctgtgctatgcctggtgtgacagggagtcagggccaaagatgatctaacaaagtcagaacatgataatccaagtacagaagatcatttcatcaatacaggctctaagaaacagtctagcagtgggtgactgctagactgtttatgagaatatgagaatgaaggccaaaaggattcacaagaggggatcaagagattttcaaggaacttctggaaggcaaatctaaggaagaatccaaaatcagaaaccaaaaagcatagtcaggagttaaagaacttagaggagcagagcacaaagttgtacatcgtatgtggttttatcttgggttgattcttctagttttcattaggatgaccacacatcacgtatgatttaaagatgttgctttgcctcttacaatttgcacagcttttgccacccattattttctatgatatattataattatacatctgacaaaattctgaaattggcagctgtgactacttatgctctggacttatctataaatcttttaaggatagtcacaattttgtctgtgtctctctaagaatcttgcagtgttttaacataaaacatgatgaagaagtatttgatgagtgtatgcatgcatatatagatggatgaaaacattaaaaaaaaaacttgagctccatcatttctgaatgtataaccaatcctccaaaatgtctgaagttaaatgactggctcttaataaacctttttgaggcatccacactaccatattttactaattactaagtgttttctaaactgtgtgtgacaggtttttagttaattgaaccaaatatttgaccagatttgaagaatagtttttcaaagtagtttttaatgaggccatatcttgaagtttgttacctgttaaattaaaatgaagaccaggcctgaagaatccctgagcagctaaaacgagtagacctcattagtgacctaagggttgctgggtttgcaaacagaagtgaaacttaacttggggtgatttcttgtaaatgcctatattagaaagaaaacaaaacttaagctcaaccaatcaaaagtagccaaaaccttagaaaattattaatataattagggacgttccaataggatataccaaataaggcaactgtataactataaccaatcaaatattgtgcttgctttatttctgtgtctgttctgtaaaagcctcccctttgcattccctcagtggagctcatgaactgcttttggtttggagcttcctgattctcaagtgagtgctcaaataagctctctaacattttattatgcctcagtttaccttctaacataactgaactcatttgactttgtataaagtaaaaatatcataaaccttaaaactatcaccagtccaatattttaggaagcattttattagttacaaatataaaccacccacctattattataaactgaaataccaagagtaaactgaagatcatcagggtcatagcatcactatggagattaagtactgcactctttcactatcataagtgatgatttacacttgtaaagaaaaagatccaggagaaatattcagcctgagtgtatgtgtgtgtgtgtgttttttttttagttctcaaaaggagaaaacatataaactgatatagtactggataaaaccacagactactaggtagctcaggatgcaaaaacaaacaaagattaaaattccaaactgaaatatttgagaaataattatcctttggtaaaactcgctgtcaagaagaaattcatttttaatcatgaaatatatttttcctatgctatttttgctttgctttaatttgctatttagcaatgcctgaaatattaataatttgtttaataaattccttctaactcttaatagatttttaatgaagaaatctgtcttagagatctgtcaagaattgatattgcatactttctgaaagcgttaaattattgacctgctgaacagtttcatttgaacctctatccttttcttgccattttctatgttcagatattcttagaagctttgtgaaatgtaaaaattattgatcctataagccataataacaggtattttaggaataagaagaaaaatgtttcatccacatagtcaatttataaaaaataaaatcttttattccagattaaaatggtaaatcacttgtaattagcctgataggtaaaataaacccatactacttaaaaccatgaatgaagatagaggaaaaaaaaaaaaaacattcccatgggggccccatcgttgatctattttctacaaaacacgtagctagctattcctacatggctgcctaaatgccagagctgtaacagctccagataaatccctttctccatgcagattttcaacactgggaaggtcagctctggagttcaacaaagtcaaggtgcattctatcagaatggctgagatgctgactcccctattgtactcttccctggattatgacaataaaacacaacgctcagctttgaaaataagtaaacttgtgaagacaggaaatgtgtgacactttcataccccagtctcttcatgaccccaagagaaattcatacagggtttatctctgtagattctgaagacaaaatggatcatgacaagcctgtaatatttgccatcaatcagatctggatttaatccccggcttctctatttactaaatatttgacttttttatcatttgtttatctgaatgtgtttctttataatgttgccaaccttataggactgagggaaagattaaaggagataaagtatacattttcaaatgtttgttacccaacccaacacataattactgcttaataaaaactggtggctatggtagtggtgatggttgatccctgcccccaacataagttccaaagccaatactacagaaaaggataaaatactgtgaattaatcccttagaaaagctctcactagatgtcatcctcttacacctaaaggactaaccaatgttgagattaaaactcagagatttggttttaagtctgctatggcccaggaacacagagtttgcagactaggcccaaatgcccagttagaaccagtgagcaataaacagtattggggaatgattttaagattgggtcagacagacttgagttctctagggttttttgggtcttttttttttttttaaacatttctcaacggagcaatcatgggaaatctgcttgaattttctacatctcagtttcctcatcggcaaaatatgaaaatcattacatctcattactctcaccagttacttcatggtaatattagcaacatagtttggattaagatcctcagagatattctagattataaacattatgctttttgtgactctgtgtttcagagtttcccaagctatatgtccctagagacttgttctgagagatgctctgacaaaagaaaataagagttaagttccatggttaaatacatttgggaaacactacaccctttttggagagtcacagttaacattggcatattgaaagccttgagaaatcccacaatatagataacacagacagtgctgatgcgttctgatggtcgcagaaaccagctctgaccaacccacacccattgtaaggagttgcttggccccacaaaaggaatctactttgtaactattaagtggacttccacctttgtttttctctcttaaggttgccctgattcattcaaagaggtaagtactggaaagagggaaaatgacatataaaagaactagataaacttgaaggcattagcataattcatgtgcatcaatggagcctggatagtttacagtgataatcacatacatttatggatataattggggattccgtgaacatttaattaccgacaaatggactgaaatctgaaaatcagaccaaaccagactgaaatctgatttccaagaaaaaaatcaggaatgttactgttgtactttttaggacctagcaaaacagcagggcttgtcaattgatacattatgtataagacttaatgctattcactgggaatataatgagttataagagataacctgctctcctagaagagtgcttagcacataataggcctttagtaaatatttgctaaatataggagcacattaaaacacaaatcttactagaccccataaaagggctggatttacaatacaaaatgaaaagaagacaatgcaggtatcttttattaatgcctagtattaactgatataaatgcacagcaaatagtttcaaattttcagctagattctaacttctcagttgtataaagaattatggatgaaattagcaaaagagctagtttaggttttgcatggaaaaatcctgcaattttggtatagatctacaagtgaacaagccatgtgtcttatctaattaattcagacatctgggttcatactttgagtgatgacatggctggtggagtccaagagtgtccaagggacacattactgcatgaaaacactcaaagtttgggttggagttcatcagagggataagcaagtccagctttcaggaagaagttttttttttcatacaaaagactaaaacttgaagatagagtgaagtaattaaccaaaacagggaggagcacaaatataagggagaagagcagctcataagctcagaggcaaaacccagctcagaaacagagaggaaatcagaaaagagctgggaaggacatatttgatgacaccaagaaattttgtataaagagtttcttatggtttagttggatatttgtaatttgactaaagagcaaccgcttttgttacaagactattttctggcagccaaatagcttctggtatgctgggaaattcaaaggaaagaaagaattaactcatacaaattgcttagaacaggaaaggaatgcatttacccttatgggctgttatggactaaatatttgtatcccgagattcatatattaaaacccttacccctaatgtgacggtattagaaggtggggactttgggacatgatggtgaagccctcttgaatggaattagtgctcttattaaaaagatcccagaaagatccctcactctttccaccatgtgaggacacagcaagaagacaagctgtctatgaaccaggaagtgggcctcctcagacactgaatctgctggaacctgcatctgagattctcagccagcaggactgtgaaaaacaaatgcttgttgtttaaaccatacggtctatgatatttttgttatagcagcctgaacagactgaaacatggacattctaagatcatgagaggccagaacacactggatttagagcatgaggcctgggattcaatcttggccctaccaatttatttctagttattttacattacgcaagtcatggaaactcatgagttttaaagacttacctagttggtaataggtattttatagggattacgtaaaggttaaatgactgtctataaaagtgctttttaaattacttcctacataataagtgctaaaaaagtagttttccaaatatttcctcatcaaaagattattagcaattttttttatttgataggaatgggccaatgtatctaaatctcctttttctgttttcaggagaaatttatctgccaactaaattacagaggaataaagttgaataaggagggcagttttgtggcctagctagatatctccctgactttaaattttgctcttatatgtgatattatattgcacccaaatatttctaaaactttagatgcacttttcactgcaactttactatgatcttcattgttttgttcaatatatgtttataataatattaggatattttcacaaattatacatactctttgcatgttttaatactgcagagacatatggaatattaggataccaaattggatttttttcatgccaaactgtagcatttaaaaaaatactgtttctatatcatatttcagtttgaagtactttttaatggggcttaataatatttatatgtaagtatttaataaagccttaattgaataagtcatgttaaaatgtaaccacaataagttattagcttgcctatataaatgccaacaaaaataatgccaatttacttgtctaattcttaagtcaaacacaaaattgcttaatacattaaagagaaaaaacgtcaacttttcaaacaaaaaatttattttatagaatattaatgttttgaaacttcaagaatatctacttctgaaattaggatcctctgtccattagtcaattaaatatatgtgcacaattaaatacatctgtattaatttctaataaacatgaggctctgaggtcagatagccaagatcccaatgtttactatttgtggcacttaaccttactttttttttttttttacttaggttccttatcagaaaaaatggaaattatctcataaaatgactacatgaattgtataaagtgttttagcctaggacatagcacacagtaaaaccttagttaatatcagctctgtaggactaataatataactctatcccgattcatttttttaacctatacaatttaaaaataatttaaactacatcagggcttaggtaaggcctgaaatattacattatacttaattatagatgacgacctctgctatgagtcttttgtaaaggtatttttcacacctagtatcatcctggtgcctcatctccttaggtaaaacttcttcttcatccaaatatccgaaaaggtgttaaacaactcaggtaagacttctcatttaaggtcactctaattacagcagcaacaacagatgtatatacattcactaataaaagaataatttgtggttgtgtccctctgaaagttaagccagaaaattttagattttattgagacataaaaagaaacattgctctccaagtcaaattctctattattaaaatatgtcatcctttatgaatttcataaatagcaaacccaggaacagagtaaccattttaaaaagtctggaggggattccataacaacatttaaatacattactactcaaacaatttgattggattataaaatatttgaagctgcagctgtagttgtgatgtttactgttgattattttgatttcaagatcctcacacaaaaaatacaagtttacagaactatttatattaaataagtgcactgtaaaatgaaatgtacataatatatatttacctaaaaaggacaaaattagaaatagcaaaataaaatcatagttctttaaaagttctatctccgaataggaatagttacctcaaaaccaaaaagactaaatacatgttctagttgaaaatgtattgaaaactaagcaaaagacattaatgtgagttctggttatcataaaactttacaatagtgaactacacatgattctacataaatctaaaaacattttgcaaacatgaaagcatttataacctaacaactataaagtaataattctattattttatttttgaagatcaggcccagaattatataatgagatttgacttcaaagtggcaagttttatcagcatgttctaccatcacatatttaaagaaatcaggtgaatggattaaaaaaataaagatacaataattatatacatatgtgctccctaggatgttaaaataatatggggaaaaatgcagctgaaagatttccactgtacccaactccacttccctaccaaagcagaagatggaacaatgatgactagaaatcttcatgaacaagaggaaattccagtttctaactgaaaccttactataaacagttatctgcgataagctgtatttgtcataaaaggctcaagctgcattgacagatcttacatcaggggtccccaacccgctgggctgcagaccagtaccggtttgtggcctgttaggaaccaggaaacacagcaagaagtgagtggtgggcaagccagcattacagcctgagctccgcctccagtcagcccagcagagacattagattgtcataggaccacaaaccctgcttgtgaactgtgcatgtgtgggatctaggttgcacgctccttatgagaatctaatgcctgatgaggtgaaacagtttcatcccaaaaccaccactccccatgccagtttcgtggaattgtcttccatgaaattggtccctggtgccaaaaggctggggactgctgcacaagcctcccattagatggagaaataaatacctccacaaatgtttcaatcttaagaatacccaccaagggcgggcgcggtggctcaaacctgtaatcccagcactttgggaggtcgaggcaggcagatcacttgaggtcaggagttcgagaccagcctgaccaacatggagaaaacccatctctactaaaaatacaaaattagccaagcatggtggcacatacctgtaatcccagctactcaggaagttgaggcaggagaatcgcttgaacctgggaggctgaggttgcggtgagctgagatcgtgccattgcactccagcctggcaacaagagcaaaacttcgtctcagagaaaaaaaaaaaaaaagactaccccctaaagaaccatagtcaactatggttcaactataaacaactgcatttaacttcaggttagcctataagttttgaatattcactatatcgacccaccctccttaagcccaatgataataataataataatagcactacaatttttttcatgtatgatattggttttcaatttttttaattttaaaaaacctctttgtaatcactagccctatctgacaaatgaggaggaaactaatgcttagctaattaagtatcttgcccaaagtgatgcagctcataaataagacagcttagaccatgtgttttactaagtcagagtagagaaaagccatttacagaagtgtggagtgactgtctggctctgaaattggacagatgtaatttcaaattccagtttcaactctttggaaagtcacttaagttcttctaccttctgttttctcatttgtagaataaggatcatagtagtatctgcttcataaggctgttgtgggaatcaaataaactagcgtatgtaaagtactattttagaagcctaaataagtgacgagtacatgaaacaagtatacacaatgtaaattttcaaatgtacaatctctagattactagctgatgaatcattaggttctaattagggaaacagatattatcccctaaaatttgctaaaatttggtcaggaagtcatttatgccttaatgttgattaataatccatgtatctagctggcttggagaaagaataccaacaacctgggagataatttgttgaaatacaagaaacaacatgtaggaaaagagaaaggtaaagaaattagcactagacctactcactctctcacttgatcagcctttactcccttacctccagttcttccttttctgcttttataatgggtgcttgtggtataaataaaaggaggtcaggctataaattcagatgacccaaattgaagacgagtctttcatagagtgacctgagatctcaatatctctgagtcctaatatattcatctgcaaaataaagatgataatgcctgctaatacacctcattatgcatgtgagagcagtttattgtatatgtgtattttattatctaaaattagtcatactagatctagatgtagactggtttcctgctttcaaccaatttatgactaaagtttttagagtctttaaaatatttagtttggggtaatggtatctagatattttaaaacttttccagggtagcatactgaactgcttatgatatagaaaattttcacttttttttgacaaatgaaatgttgatatagctttactttaatggttaagagaggggatggctttgaatactttggagacacatgtgcaacctgtgttttacatgcaatccctataatataaagatctttcatatgataaagttttctttataaagagagaggatttacaagtcacacatgaaaaataatcttgttattttacaatcacagtttgcagctgccctgtatattcattatctagaaggtaaaagtggacaaatataatttggtaaggttgatcatttcagaggtgaatgtagactttgagctttattaactaaagttgaaaattagaccaccagatttcaactacccagcagtaattaattccagcatgtgaagcttaattaaggaaaaacaaaatacattgcaaattgttgaaaagaaaagccaccaactgatgacacaggactatttaaatatattaaagaaatggtgcagtatgttaagcatgtaattccgccaaaattctcccagctttattttgtcttcctttccatatccttggctctcaaaaattcattctcagttctttggcaaaagagactggaagagaccagaaggaggagagggggagtggacagctcatgctaatgccacttttcatttcattttttttgaaaaatcctactttgtgcatataaaatatagttcatttcttatcctgagagttaccctggcatatggctcaattggaaacatcaaggtttttagttctttttaaaatggcttgcctcttttccagacttttcttcagatgtattgtcaatgccacttttagagtctatcacccttatattggtaaaatcttcttcactttctggccaggaaggtactgaccatgatggtaaatgaatagtgagtgggacaagtctgggactgattgtgaaagcacccatctaagcagttcctttttcagatattattgagcttgtgttgttggagtttttagtaatataaaagacatgttctctagacccagaaagaaaactcacttctactttttactcttctattgagttaagtaatccaaaggcatctattgaactttataatcatgctctgaaatctgtgtgctcaattgaaattccatgagcccagtctaatcctgatccttcttgataaaatacaatgctgattaatgctgatcttaagaacatttctatgtatctgaagatttttaaactcaatgcttgtctggtctggtattggcatgactaaaatatccaattttaaaagttgaatgtgggctgtaagaattaatatcttgttctattgaccatcttggttaaagtttttggtttgcaaagtataaaaatacttgtccaatttaattcatcaagactgttctgcattattctgcaataaatcctgtatagagtccactgaatgcatggaatcattggataatggcagactctgcccaaagaggggaaaaaaagatagcctaaaagtaagtatcaaatagggaagttttgagtatgaaataaaagataaaggtaaaagaaaactggagggagataagtagtttgttccttatttttcctaaatggaaatatattttataatgttttataagaaatataaacaatatttctcttaaaaagtataaaaagtgttattctttgtttgcaatgctaagaaagttttcatgatactttataaaagtgactttcgatttctggctggcaataatttctgagtcctgaggcaattgtcagtcactttttcaaattggagaatacagtaatagttttaagagtatacccttattttcagctcaatatgtacattctaaatctaaatatcatgtgtaaacaagtatacatagagcttcatgtgacaaaaatatacaagttataaaaattcattcacaatcagtaacatacaaatgtctgtatccagaaattttgaaggactgagcaaggttatatttttccttagcacattcttcatctattttccatttttcttacctggcaggcagctaggggctacagagtcaaataatgaagttgtctttcatttggatatagtttattaatgggaaaacactaatccattaatcaaccgaagtcagtaatttttttttaaaaagtatcttctttggtaacagagatcacatacctcttaaaaaggagccattatctccatgggtttctcagctgaagttaaaagtctaaaaatgattttcattcattcctcattaatatgcaaaattattcaaattagatagtaattaaccatctactcagtagaaaaccttttcatgataatttatgataaactcagttgccgctttgattgagattgatttttggtgttgagaatctatcatgaatacaaaaaagcacctgaaaaaatatttttaaacacctaacttattgcttagctaattacatggtagccatcttcacagactgttccaaagagaagcttatcaaataagatcagtccaaaaaaaagctgtgcagtgcatacactcttcccatatttatagtaaatctcagcccagagcacaatgtctggatgcctctgtttagttgactcatatcatttttggacttattattctttaattgaactaactgtcacactccagataagactgcctggctaatacagaatttcaataagaggcaaactatggaaattttcacatatcctcacgatcaattgatttcacaggatattttactcaatgggctcagttatgatttgtaaacagacttcagttttactttctgcagatgagaaagagacctcagtagtaggtgatgaaagggtgattattatgtgcttgtcaggctagtggaagtcattttcattctcaacaacaaaagctggagttgagtatcggtgaccatagggtacgcaactggatctaaacactgaagactgctattcaaaacgttgctccctgagagtaacaaaaacatggggacacagttagtgaccttctcttagcactttttaaaaatacacaaaggaaaacacctactactttcagtacctatttggttgcagagatcaactatgggtgagaattcctgtggcaatagatgaaaaggaaaatctgactccggctgggtgtaggtggctgcctcaatcatccacttaaaagcattttattatgggatcagaatagtacatgttatattttggcaagcattttaccttcatttatatttgtatgcaagaagattctagatgttatttcatttgctcctctgtcaggtatgatggacagatactgaactcattttccagatgaagaacatgaggcctgagtggtgtgactgttaacgaattaatcagccagttagatgagcagggactaggacttggtgttctttctgcttttttcttgctagctacttggtatttttcaaaatgtctcccaaagatggcctacatcagaatcatcaagggtgcttattagggatgccacttgcgaggccccttctcagttgtaccgtgtcaacctctggagaaggcatctaagtaattccattttaaaagtacctgcccaggtaattcttaagcgcgcacacacacacacacacacacacactcacacacacacacatttttaatccactgcctatagctttgcctcaccaaacagttgatctcccacccttgcaaaatgtatactatatcttcagagaataggacaaatggggagtgatagccttgtgtggatcctcctggggattgtctgacaaggtgaattatagggtaattagtaaaatatcctgaaaacattgttctgaattttcccagcaatgtctgaaaaggttaattatataataatgagcataagcttaaacaaagaggagaaaaatctgcactcaaaaaagtaacaccttaaaaaaattttgaaaggtgcctctacaaaactgagtgaaatgattgcaatttgaagcaactgctagttcccatagggaacagtaagttcccagtaaagatgatatgtgtgcacattttttttgttaggattctaaaacaacagaattagccataagctaggagttgctatgatttatgttttataatagcccctcctttccatttcctggtcagcattctggatgattatttcatttagcacatattctctagtttgtttctttcgcttcaagtctattttacattttcctgtactgaactgcatttgccatctgctgatccaattacttatacaatccaaatccttttgagtctgattgttttgttcctcgttatttgctcagcctctagttttagtatcctctgtaaactctaaaatcttgttttcaatacctcatctgaatttcttatatacaatacaacccaattagctcaaactttaggttttcctaaggctacttgtgtttgaggggatttagataagttgagtggatttggatcctaacaaagtcctgacaattcactcttctaaggatagctgatccatcaaaaattgaattattgcctttaaattgaaagaaattaaaaaaacaggaaagatacgcattctaaaattctgctatatatacagaagaccaatatattgtcgtcaacatcgtcatcttttttcagctttagtggggtttaattgagaaaaactgtatatgtttaaagtgtacaatgtgatgtttaaatatatgtatatgttgtgaaatgattaccacaatcacgctaacataaccatcacctcacatagttaccttcttgtgtgtgtgtgtgtgtgtgtgtgtgtgtgtgtgatgagaatattcaaatacaattgtaagctaagagagtagattttgaatatcctcatcatgctaagagagtagattttgaatattcttttcacaattagtatacaattttttttagattttaatttttgtgggtacataggtgtatatatctatgggttacatgagatattttgatacaagcatacaatgtgtaataataacatcagggtaaatggggcattcatgacctcaagaatttattctctctttgcgatacaaacaatccaattatacttatagttatttttaatacataataaattattgtcgattataggtaccctgttatgctatcataatactaaattttattcattctatttttgtactcactaatcattcccactcctcttcccagcttctagtaaccgtaattctatatatatctccatgagttcaattgttttaatttttagttttcacaaataagtgagaatatgagaagtttgtctttctgtgcctggcctatttcacttaacttaatgtcctccagttccatccatgttgttgcaaatgacaggatctcattttcttttacggctgaatagtactccattgtgtatgtgcaccacatttttgttatccattcatctgctgatggacacttaggttgcttccaaatattgactagagtgaatggtgctgcaataaacatagaagtgcagatatctctcctataaactgatttctattctttgggatatatacctagctgtgagattgctggatcatatggtagctctatttttagctccattttttcttaggaacttccaaactgttctccacagtgattgtactagtttacactcccaccaatactgtatgagggttctcttttctccacatcctcaccagtatttgttatttcctgttttttagataaaagtcattttaactgaactgagatgataactctttgtagctttgatttgcattttcctgatgaccaatgatgttgagtaccttttcatatgcctgtttgccatttgtatgttttttttttgagaaatgtctattcagatcttttgtctgtttttaaatcagattattagattttttccataaagttgtttgaacttcttatatattctgattattaatctcttgtcagatgcatagtttgcaaatattttcttccattctgtgggttgtctcttcacctttttttgtttcctttgctgtgctgaagctttttagttagttgtgatcccgtttatccccttttgctttggttgcctttgcttgtggatattactcaagaaatttttgcccattacaatgtctagagaatttctccaaggtttccctttagtagtttcagtttcagttcttagatttaagtctttaattcatttttatttgatttttgtatggggagagataggggtctagtttcgttcttatgcgtatggatatccagttttaccagcaacatttattgaagagactttcctttccataatgtatgttcttggcacctttgtcaaaaatgagtctattctagatgtgtgaatttatttctgtgttctctcttccgttcttctgatctctgtgtctgtttgtatgtcagtaccatgccatttcggttactacacctctgctgtatactttgaagtcaggtaatgtgattccttcagtagtgttctttttgcttaggatagctttggctattctaggtcttttgtgattccatataaattttagaattattttttctattttgtgaagaaagtcatcggtattttgatagggactgcattgaacttgtagattgtttccactagaatggacattttaacaatattgattcttccaatccaagaacttggaatgcctttccatttttttgtgtgtcttcaatttcttacatcagtgttttatagttttcattgcagagatctttcactcctttggttaaggtaattcctagatattttatttgtagctattataaatgagattaatttcttgactcctttctcatattgttcacttttggcatatagaaatgctactgatttttgtatgttgatcttgtattctgaaactttactgaatctattagttctaatagttttcctttaggttttttcaaatataagatcacatcatctgcaagtaaggataatctgatttctttctatcccatttagatgccctttacttcttgctgttgtctgattgctccagctagcctttccagtaatacgttgaataacagtggtgccagtgaccatccttgtcatgttccaaatcttacaggaaaggcttttagtttttccccaatctatgtgatactaactgtgggtctgtcatatatggcctttattatgttaaggtatgttgcttccacctccagtttttttagggtttttttttaatcatgaagggatgttgaatattatcaaatgcattttcagcatcgattgaaatgatcatatagatttttgttcttcattctgttgatatgatgtatcacattcattgatttgcctatgttgctccatctttgcatccctgggatcaattccacttggtgatgattagtgatctttttaatgtgttgttgaatttgttttagtattttgttgaggatttttccatccatattcatcagaaatattggctggaagttttctttttttgatatatctttgtctggttttggtatctgggtaatactggccttgtagatgtgtttgaaagtattccctcctgctctattttttcaaaatagtttgagtaatattgatattagttcttcaaatgtttggtaaaatttggcagtgctgccattgggttgtaggcttttctttgcacattttattatggcttcaatttaattacttgttcttggtctgttcaggttttggatttccttatgattcaatcttggtagattgtatgtgtctaggcatttatccatttcttctggattttccaatttattggcatatagttgcttatagtagcttctaatgatcctgcaaatttctgtggtatttgttgaaattttttctttttcatttctgcttttatttatttgggtcttctctctttttttaatagtctggctcaaggtttgtctactttatctttttaacaaatcaacttttcattttgttgatcttttgaatttttttcatttcagtttcatttatttctgctctgatttattatttttcatttcagttttatttatttttctctaatctttattatttcttttcttctaattttcaatttggtttgctgtcttgattttctagttttttaagatgtattgttaggttgttcatttgaggtttttggctttcttgatatagatgtgtatagctataaactttcctcttagcgctgctttcactatatcccataaattttggtatgttctgtttccattatcatttgtttgaaaaaaatgttttaatttccttcttaattttttcattgacccactggtcattcaggagcatactgtttaatttccatgtgtttttatagttaatacaatttctcttgatactgatttttagttttattccattgtggctagagaaaatacctgatataatttcttttttttattttttaagacttttttgtgagctaaaatatagggtatctttgagaataatccatgtgctgaggaaaaaatgtatatcctgcagccattgaataaattgttctgtatatatctgctaggtcatcttgttctatagtgcagattaagtctaatgcttttttgttgattttctgtctggatgatctgtccaatgctgaaagttgggtattgaagtctccagctactactgtattggggtctctctttagccttaataatatttgctttatatatttgggtcctccagtgtcctccagtgtcacatatatatatacatatatatatgtgtgtgtgtgtgtgtgtgtgtgtgtgtatagtgtatatatatacaattatatatatatatagtgtgtgtatatatatagtgtgtgtgtgtatatatatagagagagagaattgttttatcctcttgctgaacttacccctttatcatgatataatgaccttattgttggcctctttttacagtttttgtcttgaaatctattttgtctgataaagcaaagctactcctgctctgttttggtttccactgcatggaatatcttttccatccctttttttagtctttttttcatctttttttttcagtctttatagatgaagtgtatttcttgtaggtcacagatcactgggtcttgtttttctatccattcagccactctgtgttttttgattagagtgtttagtttttttatattcaatgttcttatttataagtaaagacttaatcctaccattttgttatttgttttccagttgttttgtagacttctttctttcctttcttcctgtcttccttttagtgaaggtagttttctctggtaatatgttttaatttcttgtgtgtgtgtgtgtgtgtgtgtgtgtgtgtgtctgtcgtattttttttaggttcccaggaggcttctgaataatatcttataacccattattttaaatggatgacaactaaagattaattgcataaacaaacaagcaaagagaaaactaataaaactctacacttaaacttcttatccccacttttgaactttttgttgtttctatttatattttattgtattgcctatgtcttgaaaagttgttgtagctattatttttgatcttttcatattttagtctttttttttttttttgagatgaagtctcgctctatcgcccaggctggagtccagtggcgtgatctcgactcactgcaacctttgcctctcgggttgaagagattctcctgcctcagcctcctgagtagctagcattacaggtgcatggcaccatcctgggttaatttttgtatttttagtagagacggggtgtcagcatgttgatcaggttgttcttgaactcctgacctcatgatccacctgcctcggcctcccaaactgatgggcatattttagtctttctactcaggatataagtagtttatgaaccacaattacagttataatattctgtgtaactattgccactgagttttacaccttcagatgatttcttactgctcattaatgtcttcattttttcagattaaaaaactccctttagcattttttgtaggacaggtctggtgttgatgaaatccctcagcttttttggtctgggaacgtctttatttcttctttatatttgaaggatattttcactggatctataattctaggataaaagtggggtttttttccttcagcactttaaatacatcatgccagtgtttcctggcctgtaagttttccactaaaagtctgctgccagatgtattgaagttccttcctatgttatttgtttattttctcttgcttttaggatactttctttatcatagatctttgagagtttaattattaaatgtcttctttgggttaaatctccttggtgttatataaccttcttgtacttgacttttgatgtctttctctaggcttgggaagttctcagttattatccctttcaataaactttttactcctatctctctaccttctctttaaggctaataatttagatttgcccttctgaggctatctggcaaaccttgtaaatagatcttgtagatattcattttttaaaattattttttcttttgtcttctgactgtgaattttcagatagcctgtcttcaagctcactaattcttcttctgcttgattaatcctgctgttaaaagactctgatgcattctttactatgtccattgcattttcaactccagaatttctgcttgattttttaactattcaatctctttgttaaatttatatgataggcttctgaattctttctttgtgttatcttgaatttaattgagtttcctcaaaacaactattttgaattctgttggaaaggtcatatatctctgtctctccaggattggtccttgctgacttatttagttcatttggtgaggtcaggttttcctggaaggtcttgatgcttgtggatatttgtcagtttctcagcattcaagagttaaatatttattgtagtcttcacagtctgggcctgtttatacccatccttctttggaaggctttctcagtattcagtattcaaagaaatttaagtgttataatctatgtttttagtctctgcagccatatctgcatcaggtggcatccaaagcccagtaatgctgtggttcttgtagactcatagaagtactaccttggtggtcttggataagatccagaagaattctctagattaccagacagagatttttgttctcttcccttactttctcccaaacaagtggagtctctttctccatgttaagcttccttgagctgggggagggatgacacagcaccctagtggccaccaacactgggactgtgctgggtcggacctaaagccaccatggtctgtgtcttgcccaaggcccacaataaccactgcctggctaccacctatgtttgctcaaagcccaagagctctacaatccgcaggtagcaaagccagccaagcttgtctccttgcctttagggcagtgcattctccctggtcccagctaggtccagagatgctgtccaggagccaggacttggagtcaaaaatctcaggaatatacctggtgccttattctactgtggctgagttggcacccaagccacacgacagagtccttctgacttttctttcccctttccataagcaaagcagcatctccccaaggccaccactgccttaggcctatggtgagtactgcctaaccaccaccagtgttcactcaaggcccacgtgttctttagtcagcttttggtgattgcctccaggcctaggaccctcccttaaggaaagtggggttccctctggcctaggactgttctggaaatgctgtccaagaaccaaggcctggaatcagggactgcaagagcctgcttggtcctctaccctactgtggctgagctggtacctaaggtggaagacaaagtcccctttactcttctctctccttttcccaaacagaaggagtctctccgtgtagccaccaaagctgggaatgtgctggatctcacctgaagctagtacatctctgagtcctactcaaggcccacagaaagtactgcctgggtgtcattgctgattattcagggtccaaggctctttagtcagcaggtgacgaatccttctagaattaggtccttcacttcaaggcaatgggttcctttttggcccagggagtgtctagaaatgttgtccagaagctagggcctaaaatgggggctgttggactctgcctggtgccctatcctactgcagctgagctagtatccagcttgcaaggcaaagtcttctttactcttccctctcctctcctcaagcagaggacaggagtttctcccagagctgtgagctgcaccacctggggctggggaagagtggcaaaagcactgccttggctaccccatctggtgtctcactaagttgtgggccctgtagatctcctggccccaagcccagcacagcaccaggacttgccgaagaattgcagaccttgtggcctacatggcctttcaagtttctttggtactccagagtactttagcctgctatgaaaaggcttatcggaactcaggttctaactattgtgatgggcaattctcctctggctagggcttgtctaaatgctcctctgtgtgtgccagctgagttctgccccatgttgctttccactgtgacagtacaactctgagttccaatgcaaaattccacaatcactgtgcgctccctcccccaaacacatagattctctttctgggccacgcagccactgccaggggattggggaggggtggcatcagcaattcaagactgtcttttctatctcctttagtgcttctttctgtgatacaaagttaaaacctggtactttgattgcttgcttggtttttagtggttataaaggtgcatttttgtgtggacgtttgattcaatttggtgtctgtgaagacttctatttagccgttttgctccacttccaagcccaatatattaactacagtcaccatgctgtacattagttctttggaatgtattcatcttacaactgaaagcttatacccatggaccagcatctcctcatttctcccccagcccacacccaaacactagcaaccaccccatctattcttgtttctatgagttcaattttttaaaataccacatataagagatatcatgcagtatttgtcgttctgtgtctggcttatttcacttaatataatatcctcccggtttatctatatttttgcaaatgagaggattttcttctcttttaaagctgaataatttttattacatatacatgtactgagtatttttattatatattcatacatattatatattatgcattcatatattatatattcatgtccactcatccatcaagggacaattaagttgcttccatatcttgactagggtgaataatgctgcaatgaacatgggaatgtgggtatcttttcaggatagtgatttttttttgtacgtatacccagtaataagacggctggaccatacggtagttttatttttgattttttgaggatatttattgtttttcataatggctgtaccaatttacattcccaccaaaagtgtacaagagttcccttttcttgacatccttggctgttatcttctaaattttttattacaaccattctacaagatttcattatggttttgatttcaatttccctgatgattagtgatgttgagccccttttaatacacctattggctatttgtattcttcttttgaggaatatctattcagatcctttgcccaatttttaatgtttacttgattttttgctactgagttgtatgagttctctagatattctgaatattaaccccatatcaggtatacggtttgcaaatatattatctcattccatagtgtgcctttgccttttgttgactgttattttgctgtgcagaaatgtattagttcgatatagtcccactttgtttttgcttttgtcacctgtggttttggtatcatatccaaaaaattatcaccaagatcgatgtcatggacattttctcattttcctctaagagatttatagcttccaatcttgtgcttcagttctctatccattttgagttgatttttgtgtgtggtgtaacatagggatcaactttctttttttttttttttggtatatgtatattcagtttcctcaacatcatttatggaagagactaccttttacttattgtgtatttttggtgcctttgtcaaaaattagttgaatgtacgtacataggtttgtttctgaactttctattctgttgcattgatctatacgtctgtttttatggcagtaccatgctgctttgattactatggatttgtaaataatttgaaatcaagaagtgtgatgcctacttctttgtttttcttactctataagattgctatagctatttatgatcttttgtgttttcatacaaattttaggatttttctattctatatatagcattttttttccttgttttgtccttgtctggctttggtttgaaggtaatgctagccttgtaagataaactagtagtgttccctcctcttcaattttttggaagagtttgaggaagactggtatttctctttagatgtctgatggaatttaccagtgaagccatccagttctgagctctcatttttccggagatttttgattacctattcaaaatccttactcgttattcatctgttcagatttcacctttttaaatataaaattcatcttattgattatctttttaaaggaatttatcaacttattctaggttatccaatttcattgccatataatcatgcgaaggagtttcttatgactgaatttctgtggaatcagctataacatctcctctttcatttctgactttatattttattaaccttctctttttttacttagtccagctaaaggttatgttgtttctcttttttaaaattttactcttttaattaatcttttctatcatttttctagtctctacgtgatttatttctgctctaatctttattatttcctttattctactaactttgggcttagattgtttgttcttctttatctagttccttgtggtgtaaactgaagtttttatttgatatttttctttgttcttcatgtaggcatttaacgttataaacctcccttagcactgcttttgctgcattccataattttggtattttgagtttcaactttcatttgtctcaagataatttcttatttcttttttgacccttttgttttcgggagcatgttgtttaatttccatatattgtgaatatttcaattttattcctgttattgatttctagttttgtatttttatttttggaaaagatccttgatatggtttcagtcttcttaaactttatatgacttattttgtggactacgatatgacctattctgcagaatgatctgtgtatgcctaagaagaatatgtattctgctgtgtttggatgaaatgatctgtatatgtcttttgggtctaaagggtagttcaagtccaacattttgttgtttattttctttctatatgatccatttattgttgaaagttgggtgttggagtcatcaattactgtattgctatttcttatttctttctttttcttttttttttttttttttttttgaggcagtatctcactctgttgccaggctggagtgcagtggtgcaatctcggctcaccacaacctctgcctcccaggttcaagcgattcttctgcctcagcctcccgagtagctgggattacaggcacctgccaccacgcccagctaatttttgtatttttagtagagacagggtttcaccctggccaggatagtctcgatttcttgacctcgtgatccacccacctcggcctcccaaagtgctgggattacaggcataagccaccacctgctgtctatttccttcttaagattttaagtgagtcttagcctgtagttgagtttttgggttgttttttttttcttatccatccagccattctgtcttttgatgggcaaatataatccatttagatcaaaggtattgatagatcgagatttgcaattgccaatttgttcaatgttttctggctgctgttttgaagattctttgtttctttcttttcctctcgctgtcttcctttgtgatttgataattttctttagtgcaatccttggattctctttgtcttttgtgtatctactataggtttgagtggtgtttgtttgtttgttttgtgaccatgaagtttaaataaaacattttatagagtctaacagtctattttaggttgataactgcttgccttttatcatgtactaaaactccatacttttgctaccccaaactttgcattccatgtttctgatgtcataatttacatatttttatatcatgtatctgttaacaaattattgaacctatagttatttttaatacctttgtcttttaatcattatactagagttggaatttacagagtactattacagtattaaaatattctgaatttgactgtatactaaccactgtgagtttcatactttcatatatttttatgttactaataactgcccttgaatcaggttgaagaactttctgtagcatttcttgtaagacatgtctaatggtgatgaactccctccaggtgatgtctgttatttctgaaggacatctttgccagggaaagtatttttttccaacatgttgaatgtattattccactctctcctcacctgtgacaaaagatagacttatggtagtttccccagtacgtaactagcctgttttgtttctttgaaaattctctctttatgtttgattttagactgtctgattttattctgtcttggtaaagtcttcgtcaggttgaagccatttgggaatctttgagcttcatgcacctaggtgttcatatgttccccccgatttgggacattttcagccaccatttctttaaataagatttctgcttctttctttctcttttctactgaaaatttcaatattcaaaccctagttcctttgatggtgtcccatacctcccatagcctttctttattccttctcattcttttttttcttttttctcctctgtatttataatttcaaatagtctgaatttcagttcactgattctaccacttgattaagtctactgttgatactctctattgcacttttcattcatttattacattctttatctccagaatttctgtttggcttgttttgatgatttctattttttaattgaatttcttgttttgttcatgtattgcttttctgatttcattgaattgtctatctgtgctttttgtaccttgcttaggtttcttaaaacaattattttgaattctttatcagaaaattggtagatctccatttctttggacttggttgtgagaataattggggatttctttgggggtctcacattgccttgatttttgtgtttcttgaggtcttgcattgctgtctttgcatttgaggaaacaaccaccttcttcagtcttttctgactaattttggcagaaaaaatgccttcatcagtcagcccagctaaagattcttaaactgtctcagatcttttctgtttgtgccattctacacctattgattcctcttggtggggtgtgggggaattcttaagactgtatgccttcttccaaccccaaaaatccaggctggatgctgagagcttcccatttgttttctctagggcagtgctctgaaatcctgaagtttttaggcctttttacaattcagtagggtcaaatcatctgtgtgagatgcttgcttttcctatccttaggtatgtgctctggatgctggcctgggagaagaggagtgagacacatggagttttgggggtgtcccttgtgggtccggaggtaaaattcatgggccagcttcctggcagagttcacaaagtggttagtagggtctgtgacctctcttctctgctctcattctctcccaatctttgaactgtgctgattaccttagtaatctgggtgaggtaataaaaaagtataccttttgggaaatatcctgcatggctagaggaacaaggtgctccctcactgtgctcttactttctgtcattagagaaactgcagactaaaggggacactcttgacaatgagctgtgctgccttggaggaagggtaacagataaagtgaaactgttttattaactcttcaacacataaactttttgatattttgctccaaggtgtgctgggacttttccggactccaggactcctgcaaagatacttttttagatgggtcattctcaaaattgctgcatctgtgggggagaaggaagtgatggtaggaagctcctattccaccaacttgcttatgtagctcccatcatctttattaatgttgccaatcagtacctcatcaaatatttattaagttctcattctaagaccttctcaatgtaaaatagtaaatctgcccaaaaagctagattgaggccaagccatgggaccaaactaaaactttaactgtccagcttacttgcaatttatatttatttctgcaattatattttttcaaccagaccagtcatttatttaattttgtcaacataatttctcttgaaccttataggctgatttttccagcattttacctagcaaataatggtaagtttaagaacactaaatgactcataatgtattcacgtttcatttgccttacaaaaacccaactaagccacacaatgcttaagcaatagagaattccacattagtgatgcaaaattaaataatttacttttactccttgctttcatttttttgttttgttttgttttgtttttttgtttttttttttttgagatagagtatcactctgtcctctgttgtccaggctggagtgcagtggagggatctcagctcactgcaacctccgcctgttttatttattaatttctatgataaataaatatttcctgttgtatttattaatttctatagtagaatatgatgtatttttattgtacctcttccttatccttatacctacagagaagtcattaaatattgattggataaataaatgattgaattaatgaatattaaactctcaataaaaatttctaaaagtttagttgttagtaatccagctctgcattcaattatgtgtagtttggtcttgctaaaactctaacacttctggattactgctactggttattctgctctccagataccgcatcctattttaccaagctccttccttacctgatcacagtttaaaacaatatatctgctctttccccagcaggattcccagattctagttctttcttccaggcaagttgttcttttgtgataatactgaaacatctgaggttggcagaccaggcttgtacttcaacatagcataggtaaaggtagcttctgggttagcattctgagaagtactgtagaccaattcagaagcaatagaaatgaacacatgctatgaaatcttttaattacaaagacataaagtatcaaatacttcttcattgctttggggacctaggataccccattttttgagttcagggtctttactctggggttcataagaaaaatactaagcacccctcatgctcttgaaatgcattattttcaataatcccacttttctttctttcttttcttttttccttccttcagaaaaacaaacagaatgaaacaagaaaatggcactgtctctctgacactaaggacacaaatcacagcttttcttagtgcatcaatgatttactgtaaagaattacgattcttgttgtaattgtattctactttacatattttgaatagtgtaagtgcattatttacatggtaattatataaataaatctgtctgtccttgaactaagcattgctatttagaaagccaggaagtaaacagacccagcggttttgaattccattcaaagatctgcacagcaatgtgtaggagttgaacttttctccttagaagcaatagcagaggcatgtaagaaaaccatactttctttacccttccaactcagaggatcaaatcacttttggtaacttctgcagctcttaacaatctcttctggcatttagaagatgctatcagctattattgtttatctttcttttttttttttttttttttttgaggcggagtcttgccctgtctcctaggctggagtgcaatggcatgatctcggctcactgcaacctccacctcctgggttcaagcgattctcctgcctcagcctcccaagtagctgggactacaggtgcccgcaaccacacccagctaatttttgtatttttggtagagacaggttttcaccatattggccaggctgatttcgaactcctgtcctcgtgatccacccacctttgcctcccaaagtgctgggattaatggcgtgagccactgcacctggccttattgtttatctttcattctttaaaatatacttaccaagtcaactacactttaaatcatttaaaatttattctttatctttctctagaccctagcacacactgccttctctataacataataatgttcaataaatgttaatcgataatatatattaattttatgttaacaaatatttactgagatgctgaactaaatactttggagaggaccatgggcaagacacagtcttggaaatcttcaaggaacttataacccagtggaagaaaattgggtactggaagcagttatacaaagtggaatatagtaagttcataataaaagtacaaggtgataggagatttaaaaggagggaatccattgtaatttttgtaattgaaattgtactttctagaaaacaggataccacttaatgcattatcagattgatgctgattgaaataacagcttattcttgctttctcttaatattactttttactactaactttcatggctttcattatacttcttttaggttactcccatctagtagctggaaaaggcctctatgaaagcctgtttctctcataaacagaagttgtcacatatctacattcaagcaaaatatatctagtcaatggagacaagatgagagatgtatgcatataaacctgaagatcatgtatctctgagttcatttttttaagagacttgtcttccttctcttgctttcaaagttatttatgacttcaaaaaaagaacttgctttcctcttcttttggaaaatgctccatggttagtctaactttactcactaataacaattcctcattcagagatgcaataatgagacataatattacagaaactccagagtatgagcaacacaggcagttcaaactgagaaacagacaatagtgaagcctgaaactatgtttgaagagggatctggaagaaaagacaagagtagaaaagggaagagcagagaaggaagcaatctaggtccaaacagaatgtatacatgcttggagccagttctcttagtttcattgaatcataatgaatattttcagaaacaactttacaccactttatttaagcctccattttgtgccttttattatcaagtgttcattttccattagtgatttccagatttcagcactttcattgtcttttccaaagttggtgtaatttttatatgcaaacatgtattgatcctgctcaaaatcaattcttgttttgtaaagggcttcactttcatttttttcttcagtgatattattattcctatatcatctccagctaccagccacttttttctataataaaacagacacattactttccatacctgatgtatattttgtatgaaaggtatatacagattgttcatttattcaaataaaaaaatgaggacacatggctgcacagagcacatttcctttggtttatatgtttttttccacaaaaagcatatagtgctataaaaattatattacatttacccatctatacaaaatgttactttgattgagaaagtatagaattatgtgaaagtaaatgcacatttcagcaaaaagtgtatcagttaacaataatattgcattttattttgtccattgttaactattgaagttgatggcatatttttctgtttacacttgcttgaaattaggtagaacacttagttcttatgtgttctttaacatgtcttggaaaagatcagaataattaatttgaagtatcaagaaatagccttttattgggtattgataaatttttttacatgcagtttcattaattagtaaagatgcccattgcatccctcacaattgacaatgagatattgagattgtaccttttttaatatttaaaatactaattgttctcgaaatagaaatctcacagtacactcagatatcttatactttcataaaagtcattgtattagtcaaggttctccagagaaatggaaataatagtttagatatagtacagagattatatatagagagatttattatgatgaattggctcatataattatggaggctaagtcccatgatctgctatctgcaggatgacaccccaggagagcctgtggtgtaattccagtctgaatctcaaggcctgagacccaggggaatagataatataaatcacagtcaaggaaaagagaggactcatgtccgagctcaagcaagcaggcaagaagagaatgagttcaagtcctcctgtcctccatttttttgttcaactcaggacctcaacaggttagatg

SEQ ID NO: 248 - DNA, 32744 bp, Homo sapiens
  source 1..32744: mol_type = other DNA
gtctccgcagccgcctgcaagcgggcgggggcggggtgtgaggcgctgcggacggggttgcgggctcggtagcggcagcttcagggcgcgagcgcgggcggtgccgaccactgcaggtaacagaggcgctgcgagggcagccgcggccctgtggaggtgagcgagacgccgagggggctcgggtgcccaccgcggggcgggaagtgcggcatggggcggtaccgctcacagccagccggctcccgccgcggcttcccaccccgggcggggtcccacttgcccaaacgcccccgaacgcccccgtgcacagcctcagccggccgcgcctcgagcagccagctggcccgcgtcccgtcacccgcccggtccatgtccctgcagaccgtcccgcccgcgcacagcggcgggaaccccagcttctgcgcgcccggccgcgccccgggcctctgccccgcctcgctcccgctgcccggcgcctttgtccgctctgcgcccctggagtttctgtgcctccacgggcgggagcggggcgcgaaggtctgggggtgccccgaggacgcgccgcgtagtgagcctccgggcccaaggtttgactggctttgacctcatgccggttctgggatgtgattttactttctcctccagctgactccgatctcctgtgtgtgcagaagtcaggaagcctgggtacaaggcttcttcccggtccgggatgactcggtgttaccgccgccctctgttaggccagaggcctttgacctgcctgcctgcctgccccacggggccccctctcttcccatctttccactggctaagggaaaacgtctctgtctccaagagcttttttttctatttgaaataagaaaaaaatatatcagattcctgttgtagacctctatctggtgtggaagtgacttagactagtcttcttaattaatacatgtatattaaatacataaaccaagagaagggggtcggggaggggaggggaagtatgttcttaaaaaatgaagtctgttaaacatattggatttttatttttggtaaataacgtattttaccttaaatattgtcaagattttgatattttatgaatgggagtggatttcatagtaatttgaactttgagctttttcttgtcaccgtttttgataaatttatactttcctgaatgaggtgcactataacagctatttcgagataatttatgttttattaaggattatccatcaatgctatgccttttatacttaaattcagactctgatttcttggacattcatttaactagaattaatgctggggggtcttcccttgcctagtacagttgtataaagagaaagtcaacagaaaaacttttttctcatttggatgatttaaagtactcttaaacatgtatagcataaattagtatcacatttgaaatgtaagcttttaagtgtttgacgtgggtaatatttttgaacttttaaatgaatctttttggaagtgaagagaaatgagctctcagggaagatccttgccctgaattccattttagattgctttctaccaaggcccaaacaaattataataaaacgccctggccgggtgcagtggctcacgcctgtaatcccagcactttgggaggccgagacgggcggatcacgaggtcaggagatcgagactatcctggccaacatggtgaaaccctgtctctactaaaaatacaaaaattagctgggcgtggtggtgcgtgcctgtagtcccagctactcgggaggctgaggcaggagaatcgcttgaacccgggaggcggaggttgcagtgagccgagatcgcgccactgcactctggcctgatgagagagggagcgccactccgtcttaacaacaacaacaacaacaacgcactatgtgctctaacatgcttcccaaattgtgtggtatgaaaagtgatgcaagtactaggcaaacaagtagagatcagtgctttgttctctagagagaaagcaagtctttcaaggattcaaaactaaattgattaatccagcaggacatgatccccatccatctttgcacatccccatctatacttaaatgtttaaatgagttgtggacctgcagtttggagtgaattccaaaggatacattaaatgtctcttaaggttttgtgaccttctcgttaattcagtaaacattttggcagtatctgccttgctggtcacacttttggggaatcaaagatagaaggcccagcccatcaaagaaatcataatccagcgagttaaagagagaaataaacagaaatttctcagggcccttccaaggttcttccaagacttttttcaagtcttctttccccatgttttcatcaaactcagcctgggacatgcaaaagggcattacttttcagattcactcacttttttcatcttactttgagatgaccaactctttaaaaaacaatgaagttctgtaaaatatgtttccaactgggcacaaggcagtgctttacagttattaaactaattcttggaaatttttgtgccaataatggccaaagtggagaggagaaaaataatagtaataatttatttattttatgagcaccttttgtatgccagacagtgtgcgggtgctttatacatagtattatttaatcctcaccgtaactccaaaggttaggtattgttttccttacagtatagctgagaccattggagccataggttgcacactgctagaagtggtaaagctgggtaagaatctgtagctgactctttctagtcattttgttggtggcatacttcattggaatgttactgtctctccttttatctgtcacattaatctttttgaatctgtttaatctgaggatctctggagtggtagtgctgctacacacattatgtagtcctcactctttgccaggtagcactttccatatatcctcagaagtatgtaagctagctactattattatctttgttttacagatgaggaaattgaggcacagagattaactaatctgaaccagataatgccataagtagtagaactgcgatgcaaacttggacagtctgactccagagtctgcacacttaaccactccactattctggccttctacaaggtacatctttggttggtaggaagctgtgattttagtgtgctaaatgtttttctgtttttgtttccttttaatgttcattcaaatacatgtaggataactttatgttgtctaccagctgatgtcctctaccagtgtcttatgtaaacaatgacatagtactaattataattaacatttattgagagcgtaccacattcacgacccctgtgctgtgttttaaatattccacataaccctcagcacaatctaaatactattatttatgcagcatctcatttgtgagatacttatatcatcttcaaagtgctttcacaaaataatccctttatttctttccacgctgtcagtcagaggtatgaccatcacctacttgtgttgctgcatttcagcaaggttcgatgacttgccttggctagcaggtagtagagccaaaactcaaatcagagattcagactcctgtgtacgctgccttttccattgtactggtctgtcagcgaatctctgctttgtactctcgtcctaaaatagatcatttttgtccataggagcagtttatgtttggagattgtattcccaacccagaatcaagtgtcagctgaatcatagatataactagtcaaaacttttgtcattattttcatctgtaaattaatgttcccactttagatgcagtgcctggcacacagtgatggctcagtaaatgtttgaataaagtaagaagtatctcgtacacattgatataaaaaagttcctcaaatgttttatgtttgaatgcatagtttcttttctatttgatatcataaccctctccccacacctcacaaacagaagctttcaaaattacttaattgaatcataactaacttcaaaatatattagactctgtccctactgaccctaaaccattattttcaatctgctgtcttagcccatagtatacgtcttgtgtggaatggaaagagcatggatttgagaatcatttttacttggtttgaatccttgctctgcctcttcttagcgctgtgatcttgtaaaaattacttaacaactctgaacctcatcttgtaaaattggggactctgtctctaaagaaaaaaagataaaaaatattttaggctttttatcgtatatttattcatctcttcatctttttatacatccatttatcaatgcataatattcaaatccttttttgtgaagagatttaggctatactatgtttattttaggtcagttttacttttcctttacatggtagcagataattattaggaatgaattataactgatctgtaatgttctgaaaacatttggatttcgggtttaaataaagctttttgtcttccctatccctagttccaaaagatgagtcgtggatattcagaaaacaacaatttcctgaacaataataaccaaatggtattggacatgatcctttatccattaattggaatccctcagactatcaactgggaaactatagcaaggctcgtgcctggattaacaccaaaagaggtaaataacagtccccccagaatatctcctgaaaatgttcagaaaaggtcatcaatttaaagaaacaccaagagagagaaaaatatttgagttttacatattcaaatgcatgtattaacactgaatagacatctatataatttgactagatgcaaattacataaattttatatattatatatagtatataaattttatatattatatatagtatatatatttatatataatattttatatataaatatatattttatattatatatatatttgttgttgtttttgtttttttgaggcaggatctctctatcatcccaggctggagtgcagtggtgccatcatggctcactgcagcctcgacctttgaagcttaagtgatcttcccacctcagcatctcacagtctctctcagagtctcactacgttgcccaggctggtcttgaactcctgacctcaagcgatctttctgccacttcctcccaaagtgctgagattacaggcatgatccaccatacccagcctggtcttccttgttttacaagagcataaatatatatgcctttgagttaaagcacattaaaactctaccctgaattttaaaatataaaaatagaagttagaggcttttgcatagtgaaatgtatacaaatattctagatgttactctgcaggttaatatttgcttacaaaaagtaattgttgaaaaatatcttcaaatagaaggcaagaaaataccttctcaattttttatttaaaaaattcccaaaccgctgggcatggtggctcacgcctgtaatcccagcactttgggaagccgaggcaggcagatcacgaggtcaggagttcaagaccagcctgaccaatatagtgaaaccccgtctctagtaaaaatccaaaaaatttgctgggcatggtggcaggcacctgtaatcccagctactcaggaggctgaggcaggagaattgcttgaacccgggaggcggaggttgcagtgagccaagatcacaccactgcactccagcctgggcgacaatgtgagactccgtctcaaaaaaaaaaaaaaaaattcccaaacctctgtttctttcattttatattatgacagtgtgcaaaaaggtttgatgaattaaagagcagtggaagctcgcctgttgacaaccagtataattccctaatggctgctggagagagtcctgttgaaactttagccacatatatcaaatcctcacttcttgacatacatggagaatttcaggagactccagttggacatgatgcagtttccaaaactggtaaggttttaaactaaaatgtagtacttgcccttatgaaaattctgcagaatattatatattccaatcaacttttctttctttgtttaaaggctaatataaacattaatagagaaatgtattcatatttgtatcttcctgaattttgttgttttttctttttgagacaaggtcttgttctgttgcccaggctggagtacagtggcaccatctcagctcactgcaacctccatctcccaggctcaagagatcctcctgcctcagcctcccgagtagctgggactagagacgtgcaccaccgtgcttggctaatttttgtatttttttgtagagaccaggttttgctgtgttgcccaggctggtctggaactcctgagctcaggccatccgtccgcctcagcttcccaaagtgttgggattacagacgtgagctactgcacctggcctgaatttttaaaatcatgtttatctttgctattttttaaaaaaagttttagggccagatgcagtggctcacatcagtaatcccagtactttaggaggtcaaggtggaaggatcacttgaggccaggagttcaagaccaacctgggcaacatagcaagaccctgtctctacaaaaaaataaaaaataaaaattagcttggtggatggtgcacacctgtgatcctagctacttggaaggctgaggtaagaggcttgcttaagcccaggaggtgaaggttacagtcagctttgatcaagccactgctcttcagcctaggtgtctgagcaagacactgtctgtaaaaaaatttaaacatttttaaaaataaatttttaaatgctaaaatataggtcaaatacaatcaccaaaaaaacccactttactgtatcaaaatgttctactctaatctactggcctagttaatttcatgtatttttttttttaactacgaatattcttttactttattttagaggggtttgccctgtgccctttacttaatattcctttttcctgagagactcttgcttgtctctcatgttactttttttttttttttttttttttttttttatacaggtactctttttgtttttggagatggtggttgcgctgtgttgctcaggctggtcttgaactcctgagctcaagcaatcctcctgccgcagcctcctgagcagctggaactacacgtacatgctactgtgctgagcctacagccactctttattatagtcaacaagagcttcaactgacacagtagtggggtaaaagatgttttctgcaattacattggaaataataactggttttagaaatcctctgagtgtagcgagttattttaatctcagcagcggcagagtattgatgtaaaaatttgcttcagaaagagaaaactatgctgttggcatttgaacatttgatccctgtttgtacacaccacattagtattttttgaaatccttattctaacattagcaatttatgattcatttttgtactgtttcttccatatatctttagaaatactaaaggaaaatgccaccctgataagtaccatctttagccttggaaaccatgcatttacagtattaccattcaataaataaaaacccattctcagctagaaacactaacccccacctttttttttttgtatgtgtttgtttctgtatttaaggaagacatagtatagcttccacaaggaattgttcttcagaaagtgaaaattgtactactcataatggtggagaaatgactgaagaatctgaagggtaggcggctggttgtttgctagataagattaaatattaatatcaacttcataaaatatatgattggtggttaccataaggtaggaatttcatattgcataattgctgaaactactggaatcagcttagttcatgtgttgaactgaccgaaacatgacttattcatgttattatttataaattggattacagttttctatttaaagatttttatttttatatttataaatattagaagtaatatctcttaacacaaaactttaaaaagtgaattttaatacccaaggaaaaaaactgtatgccattaattctccgactttactaaagaaattggatgtgtattttaggactatttgaacataataactcattatagaaaattttagaattaaaatgtctttcagtgtattgcaagttttgatagttttgtatagttttgtattgttttgcctatttttacaataaactgaatattgttaagtgttcactttgatgagttttgaaaaatggatgtaccatataaccatcacccaaatcaagacacagaatatttttattatttctgaaagttcctttgtatacttacttttcatggatttttatgaaaatcttactttttatagattttcaagaacagcttgctttatatataattcatatgtcataaaatgaaccctttgaaaaagctctggaggttgatgattgtgctgattgcacaacagtgtgaatatacttaatgccactgaacttaaaagtggttaaagtggtaaattttactttttgtatatttaaccacagttttaaaaattcacccttttaaagtgtgtagttcagttatttttagtttattgacacagtcttggaggttttcttttgagacaaagtctcacgctgtcacccaagctggagggcagtggctccatctcagctctctgcaacttctgcctcctaggctcaggcaattctcatgcctcagccacctgattaactgggactacaggtgtgtgccaccgtgcccatttttgtatttttagtagagatggactttcgccatggtggccggcctggtcttgaactcctggcctcaagtgatcctcctgccttggcctcccaaagtgctgggattacaggtgtgatccaccgcatctggccatattcacacaggtttttaactgattggttggtttgtgtgacacaaaaatttgccaaaaattttttactgaaataatctaatattttatactctagtctaaaaaactatggaaactctgtttcgttagttcaattattacctgtttatattttgaccataatttctttggaagagcaattttgtgaaaatttgtttaaattcttttgactttgatagagcattgattataatcctttttctggtagcccaattttatttaattctttttttttttttagagacgtggtctcactgtgttgcccagtctggtcctgaactcctgggctcaagcagtcctcccacttcagactcccaaggtgctgggattacagttgtgagccaccgtgcctggacctccaataatgtacttttttttgtatcaggaatgtgtgaattaaacacacaattcaattaaattcatgttgtaggacagtgtgtctctctctgttctcttccttttgtaatgacatgaagacagatgtagatcacactgatgtttctttttgaggtgatacaattttttgttgtttttgagacggagtctcactctgttgcccaggatggtgtgcagtgatgttatcacgactcactggagcttgacctccctgggttcaggtgatcctcccacttgagcctcctgagtagctgggaccacgggcatgcaccaccatgccggctaatttttaaaatttttctgtagagatagggtttcaccgggttacccaggctggtctgaaactcctgggctcaagcaatcctcctgccttggcctcccaaagtgctgggattgcaggcgtcagccaccttgcccagccgacgtaattttcaaagaaagtaaattcaaggagattataatttttgaagcagactctctgatgtgtcatttaaacttgtgcttaaattatgtttaaatatggaaataagtacattgtagtcttaggaatgcttttaactacatttattaatttatatttaatatatttatattttatgtatgtgaatgcctagaagcaaactgttttgctgttaaaagtaacaaagccatgctagttattcatttgattctttagtgaagaattatagctatttttcctttttaaaaaaatctgaaaattttagtatttaatgataatctctctcccacacccataactgtgtaaaagtgctgttttatgttccccacaggaattagagtgtgttgcttaatttttctttgtgaaatggtattatttttataaactttatttatttatttatttatttatttagagacggagtcttgctctgtcgcccagtctggagtgcagtggagccatctgggctcactgcaacctccgcctcccgagttcacaccattctcctgcctcagcctcctaggtagctgggactgcaggtgcatgccaccatggccagctaattttttgtattttcagtagagacggggtttcaccatgttagccaagatggtctcaatctcctgacctcgtgatccacccgcctcagcctcccaaagtgctgggattacaggtgtgagccaccgtgtgcggccataaactttatttttaatgtataacttgaaaaataaatttcaaggctgggcgcggtggctcacgcctgtaatcccagcactttgggaggccaaggcaggcggatcacgaggtcagaagattgagaccatcctggctaacacggtgaaaccccctctctactaaaaatacaaaaaaaaaaaaaaaaattagctgggcgccatggtgggcgcctgtagtcccagctactcaggaggctgaggcaggagaatggcatgaacccgggaggcggagcttacagtgagccgagatcacgtcactgcagtccagcctgggtgacagagagagactccgtctaaaaaaaaaaaaaaaagaaagaaaaagaaattagaaatttcaaactgtgtaaattatttgtcctgtagtaaccatattttgttttattacgtcagtaatttgctaaaattagtcataatctaagatatgatcaggctagcaagacacttgaaaaatgtcaagaccctataaaactgatttgtgttcagaattttcaaaaacatcttgttctcttcccttcactaaatgtcagtattcttgactccttttctaaaactctaataatttcatttttgtgtaacatttttatgaaggccaaacatggtgatccatgtgtgtgatgaagcaaaaaacttgaaagaagattttacttgcccgcgagatcttttgatatcagaaatgaagtactttgctgaatatttatctatggatgcccagcgctgggaagaggtggacatttcagttcattgcgacgttcacattttcaactggttgataaaatacattaaaaggaacactaaggagaataaagattgtgagatgcccactttaggtaaaaaacaatctgttgcttaatttgtagtgaaatttgtgtgtcacctggtagtttcttcaggccaaaagtgaaatgtggaaaattgtttggacaccggtgtttatgctcatattagtaacagccttttaggaaactgataacctcatcttttttagtaaattatagtaaatttatggcaaatgaacagatctctagatcagcagttcccaatgtatggtgtatggaccagtgggatactagggacccttttagagggtctacaaggtcaaaacagtttgcctaataataccaagatgtcacttgactttctcactgtgttgctcagatggtacaaaagcaatagtgggtaaaactgttgaagctttagacaagatcaaggcaggggcaccaaactgtactagcagtacatagttacatagttaataagaaaaaaaaaaagaaaagaaaaaaatctagtttcacttaagaatgtccttggtaaagcagtaaaaattactaattttattaaatcttgaccattgaatatacatatctttactgtgatgaaatggaaagtccactcctactgcacagcaacacatgattctcttgaggaaaagcacttgtgcgattattttcagtcctgaggtaaattagctgctcttttaaaaattgaagaccatttttacttgagagaacaactgacagagaaataatggtaattcagacttaggtgtttggcagacattttcttgaaaatgagctgctcagttaaagctgaaagcatttgtcacctgctgtcagtgacaaaattcaaggtttccagtgagaattacagttttggaaaacttaacttgcttccatgtgcttgacagaaggcttctcaatacctgacttttctgatgagattggtggtcatattaatgaatgtgatttttaaatatattgtacaatgaagtatttcaacatttggaatatctgtataactcattgagccaacattttccaaatgaccaatacattttattttcaaaaagtcatgcgtgagtgaaagattcatgcaaagtgaaagataaattagagaattttgttattaacggagtcagaaaagttcactgatacagttcagatacattgcaattaacctttaagaaactaccatttgtcaagtttggtgtaggctacccacaaattgaatgcagaaacagatatgggaatccagttgtcttctgttaagtcagacattgaagagatttgcaaaaaatatcaaacagtgctactctttactcttttttttttgagacagagtcctctcttgtcacccaggctggagtgcaacggtgcaatctcagctcactgcaacctctgcctcccgggttcaagcggttctcctgcctcagcctcccgagtagctgggattacaggtgcatgtcaccacgccctgctaatttttgtatttttagtagagacagggttttgccttgtttgtcaggctggtctcgaactcctgacctcaggtgatctgcccgcctcagcctcctgaagtgctgagataacaggcatgagccacggcgcccgacctaatatttttcattttagaaaaggtggttattttaggcagggcatggtggctcacactggtagtcccagcactttgacaggctgaggtgggtggatcacttgaggccaggagttggagaccagcctggccaacatggcaaaaccccgtctctactgaaaatacaaaaattagctgggcgtggtggcacccacctgtaatcccagctacttgggagggtgaggcatgagaattgcacgagcccatgaggcagaggctgcagtgagccaaaattgcaccaccgcattccagcctgggtgacagagtgagaccctttctaaaaaaaaaagaaaagaaaacatagttattttaataaaaatatgttaacatgtaaataggttttttgttctttgtaaatgaattcatattttttgatttcctctattttaatttctaatgtgataaatactggcagatacaacccacataaagaaaaaccctttaggattctcagtttttaagattgtaaaggggtcctgagatcaaaagttcaagagccagtgttctaaatggtagcatactactagtattactagtagaattactgtaataagaataattactgagtaatatttcaatgggcatatacttgtatgatcacacttgtggtttaatagtctttctatgcactagaattgctatttacagtagtattaaaatagaactcttatggaaaataaatctatgctgacagtgtaaaagttttttaaaaaacttaataatttattgtattctttagtgatcaaattaataggagaggtttctagtggtccttaaataaaaattacaagattgctaaatcaaaaatttcagccagaatccagagattccagactaaccagctataatatgtatgtgtgcaataaaaatcaaaacatgtagagagagaaaaaaaattattcgattcatcatatttatgtgtgtagtaaaggtaaaagaaatgcagcaagcctggccaacatggtgaaaccctgtcactattaaaaattcaaaaaaaattagcctggtggcgtgtgcctgtagtcccagctactcaggaggctgaggaggagaatctcttgaacccgggaggcagaggttgcagtgagcagagattgcgccactgcactccagcctggcaacagagcgagactccgtctcaatttaaaaaaaaaaaaagcccggcactctggctcacgcctgtaatcctagcacactgggaggccgaggcggacggatcacctgaggtcaggaggcaagactagcctggccaacatgttgaaaccccgtctctactaaaagtacaaaaataagccaggcgtggtggcaggtgcctgtagtcccagctactcgggaggctgaggcaggagaatcgcttgaaaccggaaggcggaggttgcagtgagccaagatcatgccactgcactccagtctgggcgaaggagtgaaactttgtctcaaaaaaaaaaaaaaaaaagcagcaaagctagtcattctgttatctttgaccttaaatcagtgtttataaatgtaaacatttaccaaaaaaagtctttattctaaccaggaaaactaccaaaatgcttaattaaatttctaataacctgccactggttcctaactggaatggggtacattaccatttcctgaggtgctttttcaccagctttttcctcccttcaccatttgtgtttaagagccttcaccgggcgtggtggctcacgcctgtaatcccagcactttgggaggccaaggcgggcggatcacgaggtgaagagatggagaccatcctggccaacatggtgaaaccctgtctctactaaaaatacaaaaattagctgcgtgtggtggtgaacgcctgtagtcccagctactcaggaggctaatgcaggagactgtcattaacccgggaggcggaggttgcagtaagcagagattgcgccactgcactccagcctggcaacagagtgagactccatctcaaaaaaaaaacaacaacaaaaaaaaacaaaaaaccttgaatctagagttgttatttagagacagattgggattacttattttaaccattgtctgcttagtcgtttatttagaattgtgttagtactgtaatgatgcaaaacagagttttctttccttaaacatacctcgtgggagatgacaggtttgctaaactacagcatcaggcggcatccccctttctttttctgtatgtctgaaagctcactcattatgcctttaggaagtaagtttaggactctgcagtaataaattttttatctttcagaatcttttaaaattaaatatttgttcataacaagcattgaactctttaaattagcttttctaataacaaatgctctcattaatcatttaaaaagttttctattacttgtatatgcaatgaattatagtctcaattatctttttccctgatttagtcaaggagaagattacatatgtgatatctttagctggagtctttttactttatatgaatctaacgccagggtaaatttattgtacattttctccataccctaagttttaacattgaattttctttattttatgtatctaacccataagctataataagattgtattaaattattcttattccagtaatgtcctcttttaaggtaagaaggagcctgttcagaggagattggggtacccatcaaaagggtaatctaatttttttttttttttagagccaggaaatgtcatttcaattcttatttcttcggagtttttaaaaatggattcactagtaagtattgacttaaaaaaaatcaaagtgcttctgttcacttatgctttcttttccttcaagtatctagaaaattctgagactttattaaaattattgttaattgaaaaaacaatttaaaaaattgttaattcaggaatataatttctttttcttgagacagagtctcgctctgtcacccaggctggagtgcagtggcatgatctcagctcactgcaacctctgcttccccagctcaagtgatcctcccacctcagcctcccgagtagctgggactacaggcgcatgccactacgcccagctaatttttctattttttgtagagacggggttttgctttgttgcctaggctggtctcgaactcctaatctcaagcaatccacctgccttggcctcccaaagtgctggaattacaagtgtgagccaccgcacccagccagaatactccttttctatgttagcaaatgtgaagttgtttatttgactctttggggtttgtactagtcccctgtattcttttatttttaaaattaaatggagatggggtggggtggtcttgctatgttacccaggctggtctcaaactcctgggctcaagtgatcctcctgcctcggccacccaaagtgctgggattataggtgtgagccacctatattcctgtattctttctactccttagctcttccccatttagcccagctggtatcagggaagggttacagaaaaaaagcagagactaaatgagtttttgagttttgaaatttttgaaacctttgaattttgaaatctaagccctaaaggataatttttatgccataagcataaatatttggaagaatacatgattatcctctctttacttttaaagtaaataaacatacctcaggttgtagaggtatgttgtagaggatggaaggaagagagcaaacccagcacaactgagaaaattcggaattgactgaaattttctgccacccagggaaaaggaggcttaaagttctaactaagtttaattataagaagttacagaccaggcgcggtggctcacgcctgtaatcctagcacttgggaggccaaggcaggcggatcacgaggtcaggagttcaagaccagcctagccaacatggtgaaacgctgtatctactaaaaatacaaaaattagccaggcgtggtggcgggcacctgtaggcccagctactagggatgctgaggcaggagaatcgcttgaacccaggaggcagaggttgcagtgagctgagatcgtgccacagcactccagcctggatgacagagcaagactccatctcagaaaaaaaaaagaagtttacatgttctgtatacttgagtttatagactaagatttatacctgccacaattttaaaagatgcattattattatttgaaatattctaaagaaggttgaaaataattttttaggtatgtatatatgttgttacaaatttgacctgctagattgcctttggaacagtacagattaagtcaaaaactgggtggcaaaacccagttagtgcctagcaatatatggattagacttttaatgaattttatctttgaaaggtattgctatgacattgtccttcatgctactattttcgacatttattttctatgattttttaggttgaacagtgtattcagtattgccacaaaaatatgaatgccatagtagctaccccatgcaacatgaactgtattaatgcaaatcttctcacacgtatagctgatctgttctcacacaatgaagttgatgatttaaaggacaaaaaagataaatttaaaaggtaatttcaaaagtttaattttaaacctaatactcctgttaaaagaaatatatttctatttcatgtgagtgaaatattctttcttttttcttttttctttgagaaaggttctcactctgttgttcaggctggagtgcagtggtgcaatcttggctcactgcagcctcaacctcctgagctctggtgatcctcccacctcagcctcccaagtagctgggactacaggaatgcaccaccatgcccagctaaattaaaaaaaaaaaaaaaaattttgaccaggcacagtggctcacgcttgtaatcccagcactttgggaggccgaggcgggcagatcacgaggtcaagagatcaaggccatcctggctaacatggtgaaaccccgtctctactaaaaatacaaaaaattagccaggtgtggtggcaggcgcctgtagtcccagctgcttgggtggctgaggcaggagaatggcatgaacctgggaggcggagcttgcagtgagccgagatcacgccactgcactccagcctgggtgacagagcgagactccgtctcaaaaaaaaaaaaaactttttgtagagacagggtctcactttgttgcccagtttttgaaattaatttttactctctcttttcatttatagttagcttattattattattttgagacggtctctctctgtcgcccaggctggagtgcagtagcaagataccagccacaacctgtaccttcaggctcaagcgatccttccacctcagccttccaagtagctggaaccacaggcgcacgccaccatgcgcagctgatttttgtattttttgtagagatgggggtttgctgcgttgcccagcctggtcttgaactcctgggctcaagcaatccacccgccttggcctcccaaagtgctgggattacaggtgtgagccaccatgcctggccaaaatactctatttttagaatatatttagaaatatatttctatttttaaatgaagtaagtaaagtgaagtaaaatttatccagagccaatggctcaagataaaaattagtaattagttactttgtataatggccatatgaacatatcgtgatagtgaattatgttaaaaattatgaagatattactcaagaggctgaggtgggatgattgcttgaggccaggtgttgaaagctgtagggcactactattatccctctgaaaagccactgcactccagcctgggcaacatagtgagacccatttctaaacaaataaaaattattaaaacagaccttagataaagggaaaagtggtatgaaacgaggtcagcagtggttatatcatttaagggttgtttaggtcatagcaaggaggatatactttaggtgtgaatgcaagcaggggagtgacgtgatctgatttgttgttaagaggccatttttggttgctatgtggagaatagacattagggatttaagaagcaaggagacctgttaagaggctggtgcagtagtctgttgagaagtgaaagggtttgcactagggtagaaacggtagagctggaaagaagtagatggactcagttgttagatttgacagatttatgaatgtaatgatgtggggagagagagaggattccaggataattattaggttttcagtttgagtaactaagtggatggtagtgctattaatggagaaaggaaagattgggagaggaaggaatagggtaagggaaatcaagagatagctttagttctttttgagattatttaacatgcttcttggacattcaagtgggatggcaagtagatacctggatatattaatctggagtttaggtcaaaggtcaggacttaaaatagaaatttaagagtagatgagatttgaaaccatggaactggatgagaccatactttttttgtatgtcctgttcaataaatctttgcctccctaaaagtggtgaagacattgtcctatgtttttctgttattcatcttgaattaatttttttttgtggtatgaggtaggggtcaaggttcatttttttttccccaaatagatatctagttgacacaataccatatgttgaaaagaccatcctttcccccactgaattgcactagtacgtttactatatgtgaagtctgtttccgaattgtcctttgtgttctgttgatttctttgtctatccttgtatcagtagcacactgttacactgtctttttttttttgagacagaatttcactcttgtcacccaggctggagtgcaatcatgagatctcgactctctgcaaccgccgcctcccaggttcaagcaattctcctgcctcagcctcccaagtagctgggattataggcacccaccaccacacccagccaatttttatatttttagtagagacggggtttcaccatgctggccaggctggtcttgaactcctgacctcaggtgatccgcccgcctcggcctcccaacgtgctgagattacagacgtgagccaccacacccagccaacacactgtcttaattttgatagctttataatcatttttggtatctggtaatttaaattctcaagttttgcctatcttcaagattgtagtgttgtctattaagttcttggcatttctatataaatttgataatcagcttacccattttctctttctcacaatcacataaacctgctagaatttgggattcatgtaatctgtagatcaatttaggaagatttaaccttttaataatagtgtgtctttcaatccatgaatatggtataaccttccattaatttgaatcctccttaatttatttcaccaatgtcttgtagttttcaatgtagagatatttttcctttttatttattttattttattttttgagacagggtcttcttgctcagtcacccaagctggagggtagtggtacagccatggcttactgcggcctcaaactcctgggctcaagcatcctcccaccttgatctcccaaagttttggaattaacaagtgtgagccaccatacccaacctcttttttaaattaaatttattcctaaaataaattaaataaataaatttatttaataaattaaattgttggtgctattgtaaatgctactgtatttcattttttaattgttagcaaaatagtattgataaaggctacccaatatttagagatgcagcagaggagaagtagccagttaagaacctgagaaggaggagccagtgaagtagaaagaaaggcagaaggaaaaaaggtttccaaagaaagataatgcttaagtgaccaaatgtgtggaatgctgccatcacatagagtaagatggggacagaaatgtgaccaagtggatttagaaaacttttttccggatgttttactttgcatgactgctgaaaaaattagcagtagctattagggataggtaggctcaagagaggattttttgtttttttaggaagggagatactagattatgtttatatgctgatcagaatgatccattaggaataaattaataatgcaggggattattcaagaatttaatccttaaggggaacaacacagagaggaattatccaagagctaaataattgaaaacagaaatggaattctaaatccagatttggcttttaatagcagaagacattacacaaggaaagatggagacaggtaggatatacatttagaattaaagacatacttagaagactcaagttcagttatattatgcataataattaacgtttattgaatgcttaacgttatatctagtactctttaaaaacatcacttaaccctcataaaactttatgagattggacatactaaccacactttatacttgagaaaacaaggttcaaagaggttaagtaagtggctaaagatcatatacctagttattggtaggcctcggttgttaaattctcaaaatctttaatgttgcatattccagtaacaaaggactaaaagaggccaggcaaggtggctcaagcctgtaatctcagcacttcgggaggccaaagcaggaggattacttgaaggccaggagtctgaggccagcctgggcaacatagccagccccaatctctacagattttttttttttttaattaactgaatgtggtggcacacagtagtcctagctacttgggaggctgatgtgggagatcacctgatcccaggagtttgaggcccaggagtctgaggtgccactgcactccagcgtgggtgatggagcaagaccctgtctctaaaaaaataaaataaggccgggtgcagtggctcacgcctgtaatcccagtactttgggaggctgaggtgggcggatcatgaggtcaagagatcgagaccatcctggccaatatggtgaaacccaatctctactaaaaatacaaaaaatttgctgggcatggtcatgcacacctgtagtcccagctactcgggatgctcaggcaggataatcgcttgaacccggaaggcagaggttgcagtgagcagagatcgtgctgttgaactccagcctgggcgacagagtgagactctgtctcaaaaaaaaaaagtaaaaataaaaaataaaatttaaaaatgactgaaagatagctatttatcaatcttattttttatgggaaaatagatgattgatcaagcagttctcatcagaactgctttattttatttacttaataataaactgttaattttatttacttagaacactaaaaatgtattataaactcccaagagagccactaaggatttattaatcttattttacaaatgcacagattggtttgtttattttcatcactataaagtagtgtagaaaattaatattttggtcatttgttgttaatagcaaacttttttgtaagaagattgaaagactgtttgatcctgagtacttgaatccagattctcggagtaatgcagcaacattgtataggtatgctaacatgtttttttctttggtgtactttataatgcagctatattctttaatttactacatttacattcttcttcctggatgttttttgtatcttctttgtttatagatgctgtttgtgtaagaaacttttaacaaaagaaacagaaagaagaattccttgcattcctggaaaaatcaatgtggatcgacgtggaaatattgtctatattcacataaggtgtcgtgaagataaaatacatacatgtatttttgtatatatatatatatagttgttgttgttgttttggagacggagtcttactctgtcacccaggctggcgtgcagtggtgtggtcttggctgactgcaaccttccgcctcccaggttcaagcgattctcctgcctcagcttcctgagaagctgggactacaggcgtgtgccaccacacccagctagtttttgtatttttagtagagatggagtttcactgtgttggccaggctggtctcgaactcctgacctcatgatttgcccgccttggcctcccaaagtactgggattataggtgtgagccaccgctcccagcccagattttttttaaatgtgaatttctagcatatttataaaaatataactacttttataaggaatgggataacatcttttctgcatgttatccaactttcatttagaaaaatactttctaaacaaggtagttgttagtacattttatttactgggtaagtgtcataatgttttacacattaaaatgataaaaattattgtatattaatcttgaaaggtattctggttagtgcctttaaaatgctctcttttcactaacagattttagttatctgtacaaatgttatattgaattttacaagagaaccaaatttactttcaggtaaattttggtgaggaaaattgtctttagcattggattttctgtcatctatttgttcttcatactttgtcagtatttcattaatatgtaggccgggcacggtggctcacacctataatcccagcactttgggaggccaagtcaggtggatcacctgaggtgaggagtttgagaccagcctgaccaacatggtgagaccccgtctctactacaaaaaactagttgagcatggtggtgggtgcctgtagtctcagctacttgggaggctaaagcaggggactcacttgaacccaggaggcagaggttgcagtgaaccgagatagtgccactgcactccagcctggtgacagagcaagactccatctgaaaaaaataaataaaataaaaattagctgggaatggtggtgcacacctgtaacccagctacttgggaggccaaggcaggagaatcacttgaacccgggaggtggaggttgcagtgagccgagagcacaccattgcactccagcctagacaacaagagtgaaactccatctcaaataaataaaataaataaatacataatacatatttctctttatgttcaaaacaagttctcattctgagttgagggtgggtgttgtaacttggtataatgtctcaggaggcagaaacctcaaaatgtgtattctttgacatccttcatccagtatcattcaggctgaaatgcagtggtgcaatcatagctcactgcagccttgaactcctgggctcaagagatcttcttgcctgtattctcagcattttgggaggctgaggtgagaggattacttgagaccaggagtttgagaccagcctgggcaacatagccagaccccatctctacaaaaaaattaaaaattagctgagcatggcaatcctagctaggagtctgaggcaggaggatcatttgatcccaggagtttgaggttgcagtgagctaggagcatgccactgaactgcagtctggacaacagagcaaaacaaagttatgaaaaagtacatagatacataaaagttgttagtggttaaaaaaataggatgttcactaaaacattaattgtggtgttacctttcagtgatagtattacagatgattttaattttctttttgttgttcttttttctatattacaaatttatagcacacactgttatgaaagaaaccctatgaatgttaaatttcatatatatatatacacctattagtagtatgtgaaaaaagtaattgatactaacttcaacatccatttttgttgttttattcaaagtattttcctacatgtcagcagttgatgtatacctttttttttttattttagagacagtctttgttgctcaggctggaatgcagtggtgcaatcatagctcacagtctctctctgttgctgaggctggaatgcagtggcggaatgcagtggtgcgatcatagctcactgcagccttgaactcctggactttcaagcagtcctcccacatcagcctcctgagctaggaccatgggtgtgcatcaccatgcctggcaacctggcaattgtgtatgtgtgtgtgggcacagggtttgtgtgtgtgtgtgtgtgtgtgtgtgtgtgtgtaggcacagggtttcactgtgttgccaaggctggtcttcaactcctggcctcaggcctcaagcgatcttcccacttcagcctctcaaagcgctaggattacaggtgtgagccgccattcctggcagatgtatacatttaaaaaattgttttaaaattcctttttttttttttttttgagttggagtctcactctgtcacccaggctggagtgcaatggcacaatcttggatcactgcagcctccacctcccaggttcaagcagttcttctgcctcagactcagcctcccgagtaagcctctctggcctaaaattacttttaagacaaatgtgcctgtgtaatttgtaataacatcatgacattttatttttgagctaagcacaaaaccagcaaaattagaaaagattgaaataaagacttaaaagaatcaggcctataatcccagcagtttgggaggctgagtcaggaggattgcttaagggcaggagtttaagaccagcctgggcaacatagtgaggcccccttctctacaaaaattgttttatattagccaggtgtaggtttggcatggtggctcatgcttgtaatcctagcactttgggagactgaggcgggtggatcacctgaggtcaagagttcgggaaaagcctggccaatgtggtaaaaccccgtctctactaaaaaaatacaaaaattagccaggcatggtggcatgcacctgtaattccagctcctcgggaggctgaggcaggagaatcgcttgaacccagcagggcagaggttgcagtgagccaggatcgcgccacttcactccagcctgggcgaaagagtgaaactccgtccaaaaaaaaaaaaaaaaattagccaggtgtgatgacacataacctgtaatcccaggtactcaggaggctgaggcgagaggattacttgaaccaaggagtttgaagttgcaataagctatgatgattgcaccactgcactccaggctgggtaacagagtatgaccctgtctcaaaaacgaaacaaaaacaaaaacaaaaaacaaacttgagttgcatatgaccatagcaaatatggttttgaggctttgctattttttaactttatattatttaatctaaaaatctatattaccaagacctgattgtatattctgtatcactcaattactaaaagatacttgaaaatagtgtaaaatactaatacattaatgaaatgttattagtgatataaagtactaatacatgaatgattctaatgtttagaatcaccagtaactaataacaacttgtcatataacatatgcaattagaataaagcttccatttaacatttgcctaattcccaactcttggcctgttcaaactatatttaatttgtaatcctttatctagcttagcaaaattatttggtattcaaatcattcataccttttcctgttgtccaccaaatatacaaaccctgcctctactaaaaatacaaaattagctgggtgtggtggcacacgcctataatcccagctacttgggaagccaaggcaagagaattgcttgcatcctggaggtggtggttacagtgagccaagatcatgccattgcactccagcctgggcaacaagagtgaaactccatctcaaagaagataataattaaataaataaataaaacaaattgtttatatcacttgcttgtaaaattgaggctctttctccagagataagacatgggatgttcatgagtatttgaatagtcttttcgaagaattaaaatcttggagagatgtatactggcgattgtggggaacaatcaattggctgacttgttcaagatgttatcaggtaagatttttttttttaaatatcctgctctgcaaatattgagagcaagattattttgatatctgctgtttaattgatatgtttaaatgtgttttgacaatatccaacatctttttaaagaaactagtggcagctgggcatggtggctcgtgcctgtaatcccagcacatttagagaccaaggcaggtggatcgttttagcccaggagttcaataccagcctgggtgacatagtgagactccatctcttaaaaaaatgaaactaggcccggtatggtggctcatgcctctaattccagcactttgggaggccgaggtgggcggatcacgaggtcaggaaatcaagaccatcctatctaacatggtgaaaccccatctctagtaaaaatacgaaaaattacccggttgtggtggcacatgcctgtaatcccagctattcgggaggctgaggcaggagaatcacttgaacccgggaggcagagattgcagagagctgagatcgtgccactgcactccagcctgggtgacagagcaagactccatctcaaaaataaaataaaataaaatataaaaataaaataaaactagtggcaaaagcaatggtgctgttaaacattttttgcatctggtttcatttctcttgacattgtttcttctttctctttttttatttccattcctgaaacaatcaaagacttgttgaatttttagaaaagcaacaggttttggccaggcacggtggctcacgcctgtaatcccagcactttgggaggttgaggcaggtggatcacctgaggtcaggaattccagaccagcctgaccaacatggagaaacctcatctctactaaaaacgcaaaattagccaggcgtggtggcgcatgcctgtaatcccagctactcagtgggctgaagtgggagaatcacttgaacccgggaggcagaggttgcggtgagctgagattgcgccattgcactccagtctgggaaaggagggaaactctgtctcaaaagagaaaaaaaaaaaagtcacttgttttaagtgatcaaatccagtttttcagtgaaaacaattattaaaaaatccttattgccttcacttgtttccagccaaactattttctctgttgttctatacacttctatagaaattcagaagcacctttgcagataggatgctattgatatgtgcctttgttgttacaacaattttgttcccaaaaagtttttgttttttaattaatgtttataataaaagcataagaaaacttgctacttgtaggaacctataataaacccttttgtggaataaataggtttttctaagtcacagtcattcctaattaatcttatgtataaatgcagagttttcgacaaataatttcttttgaatccctaaagttttcctctccccagtaattttcctctgtcacttgcgtaatgattttcaatagagggaaggaagaacagcttgtcaaaatcttcagattgggattttaaactgtttaagttcccactcaatgggttctgtgttcccacaattttaaaaaggtttgttgaagtattatatacagtaaaatgcatcctttttgtgagtttcgacagtgcttacaattgtataactacctccgcaatcaaagcatgtaacacttccatcaccctaaaagaaatttctttgtgccgctctttagtcaattaattcccccaccctagcctctggtaaccactggtctgttttctctatatatagttttgccttttccagaacgtcatataaataggatcatatagcatttagctttttgaatctagcttccttcacttcgaataatggatgtaaaatctatccatgttgtttcataaattagtttgttcttttttatggctaagtagtagtctgttgtatgactatatcacagtatgttcagacattcaccagttggaggatgtttgtggtctagtgtggagccattatgaagaaagctgctataaacaatacaggttttcctgtgaacataggtttttatttctcttggatgtatttatttctcttcttttttttttttttttttttttgagatggagtttcactcttgttgcccaacctggagtgcgctggcgccatcttggctcactgcaacctccacctcccaggttcaagcgattctcctgtctcagcctcctgagtagctgggattactggcatgcgccacatcacccgcctaattttttgtatttttagtagaaatggggtttcaccaggttagccaggctggtctcaaactcctgacctcaggtgatccgcctgccttggcctcccaaagtgctgggattataggcctgagccactgcgcccggcctctcttctttcttattacctaggagtaggattgctggtttgtgtggtagtttaacacttgccatgcctaatagttttccaaagtcccggaaccattttgcatttctaccagctacatatgagagttctagttgccccccatctcagtagcaattgatatagtcaggtttgggttttttgttaatctaataggtgtgtaaaggtcctcctcacaatcggagtgtgacataatcaaggatatcaagcttctaaaatctgacttgcttaacatgtcagaatgcagaaactttgagagattattttcctctcctttacagcaaattgaatattgattgatgatattgactatttattatagagctcataaactcataaaatggtttgtatgcagaatattgtatataagagaacgtgcaccttatagtttttataggttctcaaatttttaaaattaaaaaccattatgtgaacatcacaattgaaactaacaaccaaaaattctgaattataggcagctgaaaattctgaattataaactattctttaatgcatttatgttaaagatcattgcttatcaaatagcaacttcagtacatcataatataaatagaaaaaaaagatcagtgcttagattgttaatgttttgtttttatttgaattattttactaacttgtttttgtttttaacctgttctcgctcagagtccctctcctccccgacaggaccctattcaggtttccccttcttaaagtctcccccagtgaggaactctctcaacaagggcccactcctggtgcagtactatagcttttcatcccacctcagagtcccccgcaaaaagaaacaagtgatcagagtaccagtcagggtacctcctaaaagcccagcgatgtcccctccatccagtccaaggtttcactttttcaccttttctggtcctttccccaacagctattaatggtattatccattcaggtctttcttcaccccaggccttgtgggaccacccttaatcatccagtggtactgccccctcttaggatataccaccaccgctcacacaggatctccacccagaaacaatgacatctggggtctttctccagtcccctggcatggtatttcttacaaactttctacctcccactggctaatggaattgccctcccaatggctcccgcaaccatgacacaaaaacccaacacccacttccttcctttctagataaaatggttttaccttctcaagatctcctgccttcaaagcccaacattatcatcacccaccaatggtgccccctgcacaggcccaaaagtcttgtcccctctagatctgagtaagatatcacctactcaaggatgctctccctagcccacaaggctaacagaatccaaccttcagagccccatagtatctctgaatccaataattttaccactcagagcctcagtttcccttctccaaaccaactcctgggactcagggtccatcctaaccaaccttttctcagaactggtggcacaacctctgtctacccaccagcccccagctgcctagtccagtggtcttccccatcgcaagcagcacctgtgtccactgaaactccttagacagtgcttgcaccatgttctttttttctttttcttttttcctgagatgggatcttgctacattgcccaggctggcctcgaattcctaggtttaagcagtccttctgcctcagcctccctagtagctggagtgacaggtgtgtaccatcgtacctggtcctattttactaacttataaacaattgaaacctgatgtttaatttgacaattaaaccttgataagcttttatcaaagttttcaaagccagtgattcaaagttatgtcataatttttattaatactgatgctaaatatttaccttaaaaatgcatcaaggggccaggcatggtggctcacgcctgtaatcccagcactttgggaggctgaagcaggcggatcacctgaggtcagaagttcaagaccagcctgaccaacatggcaaaaccctgtctctactaaaaatagaaaaactagccaggtgtggttgtgcgcgcctgtaatcccagctactcaggaggctgaggcaggagaattgcttgaatctgggaggcggaggtagcagtgaggctagatggcaccacttcactccagcctgggcaacagagcgagattccatctccaaaaaagaaagcatcaaggaataaccaaatgaagcaaaattttatttttctttggaaaacatttgaggtgattggccagttgtaaaattgagtgtatatcaagatcagtttaattcatctgaattttgcttaaggtgatttcattttttgctgtctaatagctttattcaagtagaattacacgccataaaatttactcattttatttttttatttttattaagttaggttgtgttcaggatttactctttttaagtctgcaattcactttttttttggtaaatttagagttgtacagtcatcaccatcatccaattttagcacatttccatcacctcaaaaagatccctcatgcccatttgctgctattccacattataaccttccacccctggcaaccactaatctactttgtgtctgtatagattggctttttctgcatatttcatataaaaatggaacatataatatttggtcttaagtatttttgaaacatataattttgttgtggaaatagtagttgattttatctatgtctttatcaggcctttctctgtattgaattttcacattgtcaataccactcagaaacagtggtttatcctactgcagcaagttcattgaatactgttggcactggaatttatccctgctgtaaccaaaaggttcttcggtttgatcctactcagcttacaaaggtgaattttgaatattgcccttagtagctacagtttttaaagtataacagtaatacattaatgtataaaagacttcaaacaatacataaatatagtaagaagccgttcctctttataacactcccccattttccatctcttcttagagataatcactgttaatggtttccttttagaccttcttttgtacctttcaggcacaaattatatatatatatatatatattttttggaggtttttgttttttgtttttttgttttttttttttgagatggggtctcgctctgttgcccagggtggagtgcagtggtgccatctcggctcactccagcctctgcctcccaggctcaaacaatcctcccacctcagccttctgagtagctgggactacaggcacacgccatcacacccggtaattttttgtatttttgttagagacagggtttcgccatgttgcccaggctggtctcgaactcatgagctgaagcgatctgcctgctttggcctcccagagtgccgggattacaggtgtgagccaccacacccagccttatatatggctttttatattggaaacaagatcatactaataatattctgtaatttgccttttttactcaacaacataactagggtatctttctgtgccattttatttaactgctgtataatattccaagctatgtatatatcacaatttaaccattctcctattaatgaacatgtaggtggtttctagactgatggtattactgtgttgca

SEQ ID NO: 249 - DNA, 6112 bp, Homo sapiens
  source 1..6112: mol_type = other DNA
gcggtgagggggcgggcccgtacgccgattccatatgggcgccggcgcggagcgccgcggggcagcgcggggtcgccatggctgagctgcagcagctccgggtgcaggaggcggtggagtccatggtgaagagtctggaaagagagaacatccggaagatgcaggtagcggggctggggccgaaccaggacccccttctcagcgggtgggttccgggcccttccctcagccaccacgcgacgccttgcactgcagccgcgtccccgcagaccgggtgtgggcggccctggggtcgccggggcggcctcggacaggacttcggaagctttggcggatcggatgaaatccgtgtgcccttgccgtgcgcgaggctgttttccgccccttccagcccggggcaggagcgtcctcggcggcaggtgggaagcccctggtggcaggcgctcgccccaccaccttcccctcttacgcggccccttccgcaggtgagcggcccgaggcccagcagaggcgctgccaacgtgaaagaccagaaaggcgaggacttccggcctccccgttggccaggtcatgcctgcttctcttgcgcccaacctcgcttcacacagcgcgggtttctacactgttcttctctgagccccgcaatgcctctgtgtgtttcggtcctgcttctctcacggagtatgcgtttcccagatagtgccccttgagtcattgattagtgggtcggctgccctctggtggaatttgtattgctaggttgctgacctctgaaccccatggaagaggctcctggttttcagaatttggcttcgtcagaccaccctaccctcacccactcgggcgaacctctgttcacccaaccatcggtgcaacaggtgccgatgagctagcagcaaggacaccatgaaacactacactagacattgaggataattttccccagtggtggttttaaggtcctggtgtctattctcagggaaggtgaaagcagaaggtggagagagaggtgcaaatatccacgtggccttctaactcctgtagtgctccatagtcatctctgtccccagagactttcctacctaacctctctgccctttctccccagggtctcatgttccggtgcagcgccagctgttgtgaggacagccaggcctccatgaagcaggtgcaccagtgcatcgagcgctgccatgtgcctctggctcaagcccaggctttggtcaccagtgagctggagaagttccaggtgagaaatatcctagacagagcactgtagtccttgatacagacttttgcaggagatgacaagcatttgttcaaaactcttggctttagtgtcttggttctgttaacagttgtgatactgatggccaaccagttttcacagggtttgaaattttggaaaaagtcttggcggtcgagtgccttaagttgaacatcatttcctatagaaatgatgtaggccgagcgcggaggctcatgcctgtaatcccagcactttaggaggctgaggcaggtggatcatgagagcaggagatcaagaccatcctggccaacatggtgaaaccccgtctctactaaaatacaaaaaattagccaggcgtggtggcacgcacctgtagtcccagatactagggaggctgaggcaggggaatctcttgaacccaggaggtgtagttgcagtgagccaagatcgcgccactgcacttcagcctggcaacagagcgagactctgtctcaaaaaaaaagaaatgatgtaatggggagttaccaggggagttcatgaccaagagcccttatgcagtttgttggggaggaggcgtttgtttgttccttttgacataaccaccaaatacagaatgtatactgtgtagtataaagtttcctggctggacgcgtagctcgcgcctgtaatcccaacattttgggaggccgaggcgggtggatcacgaggtcaggagtttgagaccgtcctggccaacatggtgaaaccccatctctactaaaaatacagaaattatctgggcatggtggcaggtgcctgtaatcccagctactcgggaggctgaggcaggagaatcgcttgaaactggaaggcgcaggttgcagtgagccaagatcgcatgccattgcgctccagcctggacaacaagagcgaaactccgtctcaaaaaaaaataaataatgttcaggcacggtggctcacacctgtaatcccagcactttgggaggccgaggcaggcagatcacgaggtcaggagatccagaccatcctggctaacacagtgaaaccccgtctctactaaaaatacaaaaaattggccaggtgtggtggtgggcgcctgtagtcccagctactcgggaagctgaggcaggagaatggcgtgaatccgggaggcagagcttgcagtgagccaagatcacgtcactgcactccagcctgggtgacagagcgagactccgtctcaaaaaataaataaaataaaaataaaaaaataaagtttcctaaaacatatattatttttaaaacagcagaatctctagaaaggtaggatagccttgaaaaggtacagattcgaggaacacccttccaccattttgtggacttatacacccacccaggactgcccctagttgctatacccagagggcagcccctctgtcactaaggagcagtcatttatgtgaatcattattactgttgactcactgattcctggctcacaagcccctctgaggttaccaaaagagctccctgtttccctctctggagcaaagagtatccacaacttcattttactcccatcttctaagtatatttttctggaacctgggggaagcaagcctacttccaagccagcctttcatagcctgaggttccatccacatggaaacttatacataatgtgacacatctttacattcttccattcaaaacgcttcaaagttactgccattatgaaggaataacttcttcaagatcatggaaccccaaagggtttctttgtgttctttttgacagctaattttatagatggggtctttgaaaatgtgattcttggattgctctataacttcccttgcattatctttttagtcctctccaagtggactttcactcttcactgggccagaaccactcctgccactcacccccatggggccgaatccgggggtcatttctcagtcttcatcttactctgtctgcatcattgacacagtggatccctctccttcttaaagcactttattcagttggtcaccaggacatctcactctcctggttttctgcctccttccttggcctcctttgctctctcttccccactccagcctctgagcatcagagtgcctggggctgtccttgtttcttttctcctttctgcctacttctctagtctcctctagcctcatagctgtaaatataatctctatgctgacagctcctgcatttatatctgtaggccagagctcactgataaactccacattcacatatccaactaattcctccacatctccatttactttgtttgtctctttcctctcactggaatgtaagttctgtaagggtaagaactttgttttactcattgctatattccctaacattaaaagagtgcctggcacatagtagatgctcaataaatatttgttgaattgaatgttttcctgtagaaagaacagactttaaagaatcagtggctcacacctataatcccagcactttgggaggctgacgcgggtggatcacctgaggttgggagtttgagaccagcctgaccaacatggagaaaccccgtctctactaaaaatacaaaaaaagttagccaggcatggtggcgcatgcctgtaatcctagctactcaggaggctgaggcaggagaatcacttgaacccgggaggtggaggttgtggtgagccgagattgtgccattgcactccagcttaggcaacaagagcgaaactccgtctcaaaaaaaaaaaaagaatcaagatgtttgtacatcttacaataacctctagggacctctcatttcctggaagaatgttctgcccaatttattctgtcattcacctgctttctagtaatagtttgagccctcctggtgccatcttctgtttgagtcaagacagtcttggaaagccaaacacagtggctcacacctctaatcccaacactttgggaagccaaggagggaggatcacttgagcccaggagttcaagaccagcctgggcaacatagggagatcccatctctacaaaaataatttttaagaaagtattagccaagagtggtggcgtgtgcctgtggtcctagctacttgagagcagaggtggaaagatagcgtgagcctgggacgttgaggctgcagtaagccataattgtgccactgcagcgcagcgctccagcctgggcaacagagtgagactctgctcaaaaaaaaaaaaaaaaaaaaaaacttggccaatcacactaccatgtccctttaattgaccaagataatacatattaaacctgtagcacagggcctaacacataatgagcacgcagtaaatggaggccttactctcagctttttctacgttcttccttcttgccacaggaccgcctggcccggtgcaccatgcattgcaacgacaaagccaaagattcaatagatgctgggagtaaggagcttcaggtgaagcagcagctggacagttgtgtgaccaagtgtgtggatgaccacatgcacctcatcccaactatgaccaagaagatgaaggaggctctcttatcaattggaaaataaaagtatttgccagtggccatcagggctgagggcaagaatatattttttataaggaattgggaattttagtcttttaagcaaagtttacgaatgaagaaatgaaggatggccacaagcgtaaggcatatgtcacttgcctctggacactggttattttatgtttcagtccctaaaaaatgaaatggaaaaaagtggtgctaaatcgagtcagagatattacaggagagttttagagcttattatttcctgtggccagtgcttgtcctggcagtaaggctttcccctgtaacaagccagagccctccaaggtaccagactcttcttactacacaggtactaacaggctggcaggttagagttggtggagtctgaggagagatattttctctttgttgccaacatcctgtttaccaaaagtgtcaccccaccatcttccataagctgtgaaacaaaatcaatgaggtcactaacttagaagggaaagaaagttttctgggtctttgttttcttgatttggggtaatttatacaagggcatacaagttgattttaagatgtggaactgggaggtagactagtttggataagaactttgaaatgttccttgtggatccccatttctggtcatcaagatgtggatgtacatttcttaaaattattacatgctgcatctttcagcctggagactgtgcagaaacatgagaggtgatgacacactaattatgggaagcagaattactggctgatggcccctgaggctgtgtgtaacaaaatgacaggacaatcttgcagtaacactttccccttgaagagaagggggttttgattgtgatatatactagtatctaggaatgaacagtaaaagaggagcagttggctacttgattacaacagagtaaatgaagtactggatttgggaaaacctggttttattagaacatatggaatgaaagcctacacctagcattgcctacttagccccctgaattaacagagcccaattgagacaaacccctggcaacaggaaattcaagggagaaaaagtaagcaacttgggctaggatgagctgactcccttagagcaaaggagagacagcccccattaccaaataccatttttgcctggggcttgtgcagctggcagtgttcctgccccagcatggcaccttattgttttgatagcaacttcgttgaattttcaccaacttattacttgaaattataatatagcctgtccgtttgctgtttccaggctgtgatatattttcctagtggtttgactttaaaaataaataaggtttaattttctcccc

SEQ ID NO: 250 - DNA, 12511 bp, Homo sapiens
  source 1..12511: mol_type = other DNA
atacagtgacctcgggcggcgggtcacgtcggccgggcatggctgcatggagcccggccgcggcagcgcctctcctccgcgggatccgcggggtgagcgtgggcagggtcggggctgctctccccgggacgggagctgcggagggaccgcggggccggcggctgtcggggcttgaggactggctcccggagggcgcgcgcggcactggcaatggggggctcctcttcctttctctcattcattctttcattcattcattcactcagcgacaacggcattcgaaatttcaagctctggcgcgctctaggggagctcccgagctgggtggaggttggaggtcaggcggacagacacatgaacagtcataatactgcgggcacaggaaaaaaaaaggattggtttaccgagcagaagacaggagtcatagcccagagtcaaggcgtgggtgcgagggactgcagcggggccggggccttgggaaggtcgactgggcctctgaccttgatcctcctccaaatcccacactaccggagcagaacccaagcagggggcacttcccacgcgctctcctaatctctccccctttctgaaccatcctttgcttcagctcataccattctttctcttaactttcattttccttctcccctggttctgaacctgcctgccctgtgcatgaagagaagttcttccactgcggtgactttcagcgtggacagtgatcatctggggatgtcagttgattgttccactaaaggccgctgcccacagatccgctaagatgaaaggcttctcccaaggattctgcaacgctcacctctctcaccccttagtagctgccgattctgtctgccatctggttactctctgcctttaccctcaagattctgcccccagaagcagctccaccccaccctcactcctggcaatcctgtccagcctctcaacatcgagtttctgtccctccacacagcaggcagacaatcacactctggacctttctcctgtcttgcatttctgtccctaattgactagttcttcccctgctcattcattcatccagcaccaagtgcctctgagggcctgccctggggtcagctctgggatgctgccggactcattcctggcctataagaccagtggtgagagagccagtgcacagctcattttaaaggaggtgctctgagattctgtgacacaggaccctgctctgagctatcaggaaggactgaggggtagaggggtgggaccttcagcaccagcacccatgaacggccctagtgtcctccaacctgtcatccacgtctagtcagggaccagtgcccggtgcttccatcattgtaatgcctcttacttgggcatctctcctgactcgctccagaaggcactgtttcctgcaggttactttggtcccatgagcctgggttctatcacctggagtcccatctcctgtcccatacagtccacaatctttagcctggcattcaaggcctgccacactccattcccagtctgccttttcagcatgcactcagcccagccaagtgactgccgacctgcttttctgctccttcactactaactgttgagacgtgttccatcagaaacatgggctcccctggccgggcgtggtggctcatgcctgtaatcctagaattttgggaggttgaggtgggtggatcacctgaggtcaggggtttgagaccagcctggccaacatggtgaaacctcatctctactaaaaatacaaaaatttgccgagcgtggtggtgggtgcctggaatcccagctactcaggaggctggggcaggagaatcgcttgaacccgggaggtggaagttgcagtgagctgagattgtgccactgcactccagcctgggtaacagagcaaaactctgtctcaaaaaaaaaaaaaaaggaaacacaaacacaggttcccccatggtagccattggggaaggggtgttgttgccaatggtaaacaacctacagatactccttcttcaggttctttcatagaattctgactttgctcccagtgagaaggagtgcatgatgaaggatagctggctaattgagcagtgggctgtgaggtcacatcccactggggagggcgagacatgttaatcaggcctaaaggcgagggagtgtggaatttggccccaccatccagggcagtggatggcctagtggtatggatctgaggcaggctatccagcttttctggctctgtatcttaccgaattcaaccttgggcacattactgtgtgcctcagtttccttacctataaaactatcggcataatagtgtcacaacattatatggaagcaaacatctcttgaattaggtttggggcctcttgtctctggagtcaaattgagttattaacaatcatcctgtccccgccaataaaagtttattctgtgttttggggcacttacatggactcctgataccacagagcccctctgacataacccatggctgtgctggcgagggctcaggggcctgccttgcagggggaatggcaggcgggcctgcacagtggcccagctcaggggcaacagcatcttcctctgccctgaccttcctctctgttctgtggcagcttccacttcaccatcggatgtttgccactcagactgagggggagctcagagtgacccaaattctcaaagaaaagtttccacgagctacagctataaaagtcactgacatttcaggtaaggtttctctcactcttcctacggcgcttggataagattttgccctttggaaggacagagggtcaggggcttggaggagggggcttgctgctggtgagtggcttctcaagatgtgttgctgctggacaggtggagctcggctgcccccacctcatgggatggcagtcaggattcagaaatatcagagggaaactgaggacaaggcgcagctgggaggactcaaggttgccagcctggctcagctcagacaaggtccctctcagtcaccctagagctgaggtccacagtctgtcatttgactttgaataggttttgctctaattttcccccattcttctgacaccctaggatatcagagctggagtggaccccagaaagattttcttcagctgctttactttccctaagaggaaatgagcccagagaggccaaaggaattgcctagctcctcatagggaagagacagtggaactggaaccagaaccgggactcaggggagactctgtcctaagcccagttaccagccccagccaagcgctgtccttctcaggtggccactggcacctagaagttcaggctggcagtgtgttaggagcaggctggagaagcaacttctgcatccacaggatggggaagataggccctttatccacacacacacacacacgtacacacagaacggcccgtggcgtgggccgctggataggcatcagtctgaatctctccatacccagaggcagcctttgccactcagcattgccatgagggctcactgactttactgagaacataacatttccaaggattgaggagaaagtttagaaagtagattttattctggaaaccacaggaaataaatcaatctaaagatctgctggggttttggagcagtggctcatgcctgtaatcccagcactttgagaggctgaggcaggtggatcacgaggtcaggagttcaagaccagcctggccaacatggtgaaacccccccgtctctactaaaaatacaaaaattaactgggcgtggtggcacacgcctgtagtcccagctactcaagagtctgaggcaggagacttgcttgaacccgggaggcggaggctgcagtgagccaagatcatgccactgcactccagcctgggtgacagagcgagactgtgtctcaaaaaaaaaaaaaaaaaatctgctggggccaggcgcggtggctcatgtctgtaatcccagcactttgggaggctgaggcaggtggatcacctgaggtcaggagttcgagaccagcctggccaacatggtgaaaccccatctcaaccagaaatacaaaaaaaaaaaaaaaattagccaggcatggtagcaggcacctgtaatcccagctactcaggaggctgaggcaggagaatcgcttgaacctgggaggcagaggttgcagtgagctgagattgcaccactgcactccagcctgggcgacaagagcgaaactctgtctcaaaaagaaaaaaaaaatctgctggaatggtacatcaggtgagggctctgcaggagtcttggggcaatgctgaggccttgatgttaccaggtcctgaacttgccccaggcccagggcagagttagagcttgactcagctgtggctctgcgcagtcctggacagagtgcagaaggggagttgaggctgagaacctgggtttaaccaaaacttggactcctagagcacattataagaaaaacagaacaggccaggcgcggtggctcacgcctgtaatcccagcactttgggaggccgaggcgggtggatcacgaggtcaggagatcgagaccatcctggctaacacggtgaaaccccgtctctactaaaaatacaaaaaaaaaattagctgggcatgatggtgtgtgcctatagtcccagctactcaggaggctgaggcaggagaatggtgtgaacctgggaggcggagcttgcagtgagcccagatcgtgccactgcactccagcctgggcgacagagcgagactccatctcaaaaaaaaaaagaagcagagcaaagcctgttgagtacgttgcacctctcacacaatggcctggctctgtaaatcatgcaggggacatattcttgcccatgttatttcatgctagagctgtgtgtttatcatcagtcatcagcaccagctctccagccaggtggaggaaagctcaggcagggggtggatggcccaccaagctctgcctcgagggcttcaccaaaaagttctccccccaaaagccaggatgaaatcctggatgctgtgctgtggacccagcagtgccagagacagccccgagcagctccatgcatagcatgtttgctgtgtccctggctctcatgctcccctggttctttcctttctttggacagtattacacagttttcaaaccaaattgtagtgtatttttgcacttcaaaaacactgattgttggtcctttggaagctggaacgctgaaattccgtccttctcatcctcttccgtggcgtttattggcctagtgaaaggaaacactctacactccctaggttgtccatgctttgtgccttatctttcctgcccacaagtggtaaccctgggtggtgcagctgcctcgcaaaaggaagagcacattttggattgtggcagcctgtcaggaggagcatgtggtcagattggaagccatgatcttttcctaatggtcttagcaactttcctttgtgctgaatgataatattcagacctttggattgtacagtacttcaaggatatatgggaccatggctgccatgacttaataattgaaatgcttttgaatcatgtttattttaggaggttgtggggcgatgtatgaaattaaaattgaatcagaagaatttaaggagaagagaactgtccagcagcaccagatggttaatcaggtcagtagaggcaacagtgccccttgccactggccttcagcctccaaaggggcctgccaagcagggatggtggtttttgccgtcagttgcaggagagaataatgcagtactgcaatcacgaaacaggactcaagacctgagaaaaatcgaatctgggagtatctgcattgtggcaaataggaattttattcaaaattgaagacaggcctcccaatagtgattttgtatgtcctcgtataatgctacctatgtttactgttattgtcacatattgatgagtatatctaaacacagacactgctaaaagatacatgtttttgtagatctgaagaggggttttttggcctctctttgggactgctttacagatgagtcagttgatgcatggcatgagtgagaatggctgcagctgccccagacccaatgacagaacatttgggttctggaacatcacgttcaaccagcctaaggctcagtttaaatattatccatatttattttaatttggaatttataccaactttgacccttgtacctgtacctatgaatttgccccctcactgggtgtgtttggcatcgttctggaaggtcttgccattgtgaactagtgttatttttgtaaagcacagcactggtaatgagcgtctcttcggtggcctctcatgcattgagttcaggtgtcctagactgctgttcacgcatttccccccacccttctctgcgtgcaccctcccagccggcctctgcccgctggtctctctctttctctatctgggcctttgcccagattggaccttctgcctgggttgcccttcctcccgtcctccactcagctcaaatgctgcctcccctccctccccagcagggaatgaatgccgttcccccaccctccccggcccccttttttggctgtcggtgttttccgtcttgtgtcctgaaaacggacatctctgctgtctgaccctgcaacctgtcagccctttgtggaccagtgccctttgggatccatctttgtgtttctcatggaacgtagccctttgcagtggatgtgacccctacagccctaaggcatgctggtggtctgctgggtgctccatcactgagccctcccggaaactcttgcagtcccatgtgatctctggggtcagaatcaaggcagaagacaagacagggaagacctggctggccagatgatccccaacccgtggcactttgggttttattctcagatctgtacaagccacctggtgtgactggacccataggtgctggtaatttgagtgtgtcccttggcctgaaaccacagttacaagtggttaaggaagcagtttctggaattggacttcccactttcaaatctgggctttgctactttctagccatgtgaccttgagcaagtttttcaacctcaccctttgcctcagtttcctaattgagagtaacagtacttgcttcaaagtgttgctgtgaggattcgtgataaagtacacgttgaccactgacaacactgcccgacacatagtaagccttccataaatgtgaccgccatcaccatcattgtcatctccaacactggaaggaacctgcaccagtctggggtggggaagggctgtgattcccacagtttgggggagtgtcacctcacggtcttgggattaaggtgtcttctggccccctatagcaacatgtgcctctcctcacacttcctgagtagacagcccagtcacttgtctttcattccccctcgaaagcaggcttactgcaggacggggctgtgtcccccacacctaacaaaggacctggcacatggaaggagcccagtcagtatttcttgagagtttgcagagagtgaggagagttggcttgtgttttcttattggcttacccatggaaattatgttttagtatctgaaaggcattctgttttggagaactcacatcctgacattggggcactttttaaaaatatatacttcttttttttccctcccacagagtatcactctgtcacccaggctggagtgcagtggcgctatctcggctcactgcaacctctgcctcctgggttcaagcaattcttctgcctcagcctcccaagtagctgggactacaggcgcccgccaccacacctggctaattttagtatttttagtagagatggggtttcaccatgttggccaggctggtctcgaactcctgacttcaggtgatccacctgcctcggcctcccaaagtgctgggattacaggcatgagccaccatgcccaaccttaaaaatatacatttttatatttatatagagatggggttccactatgctgcccaggctggtcttgaactccttgacgatcctcctgcctcggcctccctaagtgttgggattacaggcgtgagccactgtgcccagagcagctgcatcctgagttattctagaggcctctcctctgcccccagccagaacagcccttctggctcaggacttgggggggtcatgcagctccacactggatgtctgcaggcagctgacatgagggggtcccctgagcctggccacagtacattcttagggggctgacacttgtgttaaaatatatggacttggtcataggcaattttagatgatttaagtctggagatgttggctttgacagtcgcatgagaagaatgaaaatgaaaatcttcaggaacaagtctgttggccggcagggtctgagccgggacctggagctgccctgctcaggacagctgttgggaatggggttctgacaggcactgccctaggaggaggcagagacctggaatcaaggggaaggcaaggtggtaactggactccactcccagggccagctggtctcttcaggagtgaggtgggggtggggtaggtgccccatccagatgctctcatgcccaggctgtttgggtgggggcctggtgtcctgacggggtgaagcttgcctcatctattttgcctactcaccctatgcgtagtagtgttcatcctggtgctgtagagtcagaattttctgcccaaaaggcctgaaaaggtcgcccaacccatccgatactggcatccctcctgagcttcccatcagactgtccctgcgggattccctggagggggcgccccctgtcggcaccctcaggaatggactcgttcctctgggaccctgctgcgcggggctcagcctctcccagggcccagtgcgtcagccttctcttgggaaatacttactgggcatttgctgtgggccacgccctaggaggcctagatgttgagggttttgtaccaggagcacctccctacctgtcctcctgccatcctggggaggtgtcagcaagggtagagtaggtaggtagccacggtgatcactgagttgccttttgaggtggacagaggtgagatttgagcctcatattggcaaatattgcatgaggcattgaccacaggtgcccagcgtcgtgcctgccacgtggaaggcagttgctaaacagctgttgccgtctccctgcctccggcctctttccagcttaggggattgccctcccctaaggcgcctccaccaatgtctttcccctgctcagagcctttacgtggctcccctggttgcccagaatccagtccagtcttcctagcctgggattgcccattcttcatgtgatctgcctcagtctccctgacatgtgcctacctcagtgaatcacgggagcttcccagcctctcctcactttgctgtcctggggcagatgccctctcactcttgcctgctccacctctggctccagctccagggctgcctcctgtgtgtggcccttgtgcgtccaccccagtcaccagtgcagtagctcacctcgaacaccggaagcagggctgtgctggcttgagtctggcagtcctctgctgcccacattcagcccatttgtgttggacttaatgctactttctctttcattactttcccacgccttttcctctgtgtccccagcacctactatagtgctgtgggcatagcaggtgcttaagaatggttatccaagctgcatcttattacccatgggacttcggccaagtcacttcccccagcagggccccagtttccttaactgtagagtgactcaggtgatctctaagaccctgtgtggctgtaagggactgtagtgtgttttgggaagccctcaggggctgcacagagagcagggagaaggcatcagggagggggagtgcgcagggcctgagtgggtgaagcccagaaggttcctctgtccagggtcagtcacatgaaggtgtgactgggccctcacccagccaaggtggatgtaaggaggagaggctggttgtggtccaggcacagacacagtctctagggagcattccacgcctgcagagagcaagtggcccagggaccttcgcccagtgattatatgaggctttttccagggacatttctgcctgtccgcagagttgagggccctgcacttgattgtggagctggagggtgtgcagtgtaggccaagtggggcagctcattgtcccccaacacaacaggagctcccggatcagggcaagtcaggaacatgatggaaaccaggtatggccaggacctcaggatacctgggttcatatcctgattccattactcgcttgtttgctgactttggacaaggagtagactctattttttttttttaattaaataaggggatgggactagattgtgtctaaggatctataaacctgaccacatatattaggattctttatattgtaagagacagagaccaaattaaaattagcataagcaaacaaagggaattaattggcccatgtaacaaaattatctggtttctggcatatctagattcctctctctctctgagctttcagcttctttccctgtgttggtctccttttctcctgctaaagatgggctttctctccttggtgggaaacacagtccatggccacctccaattaatttcatagcatgttggcccaagaaacaaggctccactctcagaaatcccaagggagattctaagtggcccaatttgggtcatgtgccacctcggtccaatcataggctgggccagtggcacataatgacctcaatatcagaccaattggtggttccaccagaattatacaatagagtggaaaaggaattattccccaagagaaggagatcactaaagagactagaaaagaaaaatgtccactctagtatgattatcagattttggcctagtataaaaggaccttatttcttcctctgtactgattataaacttgagcggtccaagccccactctgattctgtaacctcactttctcccagcactacaggggccaaatatctatttgactctggtagttccttcagatttgggctctgacaccatttgtagccttaaaacaagtcccataattcctttgaaactttatttcctgctctgaccattggggaatttgtgctaattggtatgattttaaagaactgctcattttaaagaatgcttgatgctcgaaataacaaaacacaggaaacagcctaaaagttcgctaggggacaggttgaaaagttataatgcattcatataatggaatactatgctgatgcaaaaaagaatcaggacacccatatatgcctaacatagaaagatctccaagatagatgtttgggggaagagcaaagtgtagagcaggggtgtccagtcctttggcttccttgggccacaatggaagaagaattctcttgggccacacataaaatatactaacactaatgatagctgatgagctttaaaaaaaatttcaaaaaaaatctcaaaatgttttatgaaagtttacgaatttatattaggccacattcaaagctgtcatgggccgtgggttggacaagcttggtgtaatgtgtttgaaattttaaccatttgcgttttaaaaggtcatggggtgaaatatattagcttgaatatgcctggtgaatatgcatttttaagtccctgtaaagatacacaagaaactggccaggtgcagtggctcacgcttgtaattccggcactttgggaagccaagacaggcagattgctccagtccaggagttcaagaccagcctaggcaatatagtgagaccctgcctctacaaaaaataaaaaaattagccaggcatggtggcatgtgcctgtagtcccagctactagggaggctgaagcaggaagattgtttgagcccaggaggtggagtttgcagtaagccgatatcgcgccactgcactccaacttcggcgctagagcgagaccatgacttaaaaaaaaaaaaaaaaaaagatacacaagaaactaacaacagttcttttgggaacaagggtggaaactggggagatggacaggtataggagggagacttccctgaatgcctttttgtacctttgaatctttaaatcatgttagatattattgatttaaaaaaaattgtttttcaaaaaaaggaaaaattgcttaaacaaagcacatacaaagtctccttcagatgcagagctgtataaaaatactctcagagaattactgtaatcaacgtcaaatacacaaaaactgatgatgctgttttcttacttaggcactaaaagaagaaatcaaagagatgcatggattgcggatatttacctctgtccccaaacgctgaccacgccctggctgcatagatgctgctgcttaagaccttggatgaacttcactgacatcattcttccctaagcagtcaccaaaaaatttatatattttgctcatatacatttccatattataattatagaagatgtataatctatttagatgttaattaaaggaaacaaacaactgaagcttttgaagggt

SEQ ID NO: 251 - DNA, 17373 bp, Homo sapiens
  source 1..17373: mol_type = other DNA
ggcgtccaaggtgatatcgcgcgaggttcgcagccaataaggaggcggatgtgacggcccgtttgcagccgccggcagctactgcaaggcaaaagccggagtggacgtgtcttttgaaactgctgctctttcacttctcaggcgtcaccgagagctcaggtgaggcagagggtagtgagaagaatccgaccaccacgtccgggtgctggtgaacattctgctgctccacatccggagcggaggaggggcgcggccccagcaccggtgtcggtgtcctggcagaggctcttgcgcaagcgcaccaggaggcgtcgaagttggggccaccgggactgtgctttcctctgtttccccgggcgcagggagtggccggcttgccattggggaggtacctggggttcagttaaggaccaggccccttgattgttttggcggatacctgtaagggtgtccaggaaatgactagggaatttgaggacgcgctgtgtcccgtcccacccttccagcggagctgtaaaaaggaagaatcagaggctgtggtttgaaaaatgaaaagctaacgaggggttgcatcgtctctttaccccattctcaatgctctgaccaccaacacctacacccagaatagctcttcttaatctcgtctttttccagttatcccataattaaattctgggctcattctataaagttccagggtaggcattctctgtgcttatccctggagcacagcttccaacgttcaattcagtatcttattatcttctccttccagccccctcactgagggtcacagtcctactgacatttttcttgggcgatagggagcgtggaaatctttgctgtgtttgaaatacagcacctttccaattttatagcactcacgaggagcttacaatttggttttttagactcaaatacttttgaaacttaacagtgtagtaatttgaacagaagtcaggcacgtgttcattcaacgttaaatacatgtttattgagtacctgctgtgttctatggagatacaaagatgaaatcaagtatgcttttcaaatccttttcctgtaaagaaaaaggaatcagaattgaagtttgcaagaatatttctcttcagctcaacgtttatagagggcctgtgtgggtcagaatctgtgtcagaagctgagtgaatgaattcacagtttgttgtgaagtttggggtgcttcagtattatttgcaaatgtatcatagttcattgatatgcaacagcctcctgctttgataggcaaattataaatcatttctgcagtaataaccctgagatacacataaacttgccctctaattgttggtataaaatttctcgtacaaaatactccatttcttttaaaagaagtaaaattttggccgggcgcggctggctcacgcctgtaatctcagcactttgggaggccgaggcgggcggatcacgaggtcaggagatcgtagccatcctggctaacacggtgaaaccccgtctgtactaaaaatacaaaaagaaattagccgggcgtggtggcgggcgcctgtagtcccggctactcgggaggctgaggcaggagaatggcgtgaacccaggaggcggagctagcagtgagcggagatgcgccactgcactccagcctgggcgacagagcgagactccgtctcaaaaaaaaaagtaaaattttgtactaattgctagtacaaaatactccatttcttttaaaatatatagtcatgtgccacataaggacatttcagttttatgagattgtaatactgtatttatcgtaccttttctatgtttagatacacaaatgccattatgttacagttgtctgcagtattcagtacagtaacatgctgtacagatttgtagcctaggagtaataggctgtatggcatagcctaggtgtgtagcaggctgtaccatctgggtttgtgtaaatagtctataatgtttgaaacaatatcaaaatcacctaatgatgcatttctcagaatgtattctcattgttttgtgggtttttggtttttggtttttgagacagggtctggctctgttgcccagggtggggtgcaagtggtgcgttctcagcccactgcaacctctgcctcctgggctcaaggtatcctcctcccacttcagcctccctagtagcggggactacaggcacacaccaccgggcctggccaatttttctatttttagtagagacagggttccatcatgtttcccaggctggtctcaaacatctgaactcaagtgatctgcccaccttggcctcccaaagtgctgggattacaggcgtgagccatagcacccagcctagaatatattcccattgttaagtgatgcatgactaattgagataggtcttcctttctaatctgaattagttctattttgaaactctgattttacacagaggagtgatgttggaaaaaaacccaaaatttagaaaagtatttggagtgttttacatcaaagttaacactgtcagtaaatggaaaccagtattaatttttgtgacctcatagacttttttgttaggtaatgggagaacaggaatggacattaatgctcagggaacaccaggcactcttctttacataaatggtaatgagacgtcttaggagttaaatgaaactcatttgggcagcagccatgaaaaaaatctgtgttttgctcaactgtactctgtgtttaagtaaagtttaatatatatatttatgtgtaaaacctcagtaggtataccttcctattgttcgcagttgtttctgatttctctttcccattggtaaagaacactgattgtcagtatatatcactaggtataacttcacaactcatttctctgtggtttggtgatggtcttaaagacttgtcttggctttagtatagtaaaacatatgctaaatcagaagcaccctaaatttgctgtaagtagtttttgagtggtgtgactagaacctactgagaattaaatttaaaaacacataaaaattgttaagcccagcatcaagtgcttggatgtcgttagaatactccatagagtacacattatacacttgccagaatttttgaaaatggtagagaaaaccttgcttattgtttgcattttttaaaatgtattttgtaaatcttctccccagcacccaggctgaactctgtaccatttggaagaatggaagctgatgcatctgttgacatgttttccaaagtcctggagcatcagctgcttcagactaccaaactggtggaagaacatttggattctgaaattcaaaaactggatcagatggatgaggatgaattggaacgccttaaagaaaagagactccaggcactaaggaaagctcaacagcagaaacaagtaacctctctgccctgctttctgaaattgctataacagtatgcgcctaacaacttatatatacatgtgctgtagtagttacatttcgttctttgtgtttagggtttttaaaattcagaatacctattactgttaaaaatttgcccagaaaaaaatatgttttaaagacattcaaaattagcccaatctctatattaatccacagtcgagtaaaagaaagatctgcccaagatcgtttttctgagcttggatttgtttggttgaatggagggctagggagtcattggtttccatttcaggtaatattaaagccgatttagctattttcaaagcaaacgagataagacagatgagataagagcaattaagtcaatttatgttgaaaaatgtatttcaggcatttccaatgaaataattatgtggcatattcaaaagaatgcatgctttgtaacaaaggtggccacagctctatcgttgttgcctcttagaatgtttgtgtagaataaacgcagagttgtaaactctgactgaaaccagtggattaaattctgtaaattgaaatttttttttctgctttttgagatggagtctcgctgtgacaccctggctggagtacagtggtgtcatctcaactcactgcaacctccgcttcccggcttcaagcaattattctgcctcagccacccgagtagctgggactacaggcgcacaccaccatgcctggctaagttttgtatttttagtagagatggggtttcgccatgttggctaggctgcccttgaacttctgacctcaagtgatccgcccaccttagcctgccaaagtgatgggattacaagcgtgagctaccgcacctggccaaattgaattttgattaaaacattttttccactgggttacatggaaatactttatcaccaactctggttccttttcagttgactgtgacttaaacatgaggcttaacttttctgaagaaatagggagttttgaccgggcatggtggttcacatctgtaatcccaacactttgggagtccaaggtgagcggacaacctgaggtcgggagttcaataccagcctggccaacatggtgaaaccctgtctctacaaaaaatacaaaaattagccaggtgtggtggcgcacacctgtagtcccagctactcaggaggctgaggcaggagaatctcttgaacccgggaggtggaggttgccgtgagtcgagattgtgctactgcactccagcctggatgatagagcaagacccagttcccccacaaaaaaagagaaggagttttgtttgtattgctgtagcatcactttgatatgtttacaccctcatgtttagaagagttactacaaaaggaaataatcttttataagtgagtccaaatttttatattttgagtttctaaaatagagtacgttatatggcttttacctgtaccctaccgtattttaaaaaataggctgcttttctttttcttttctttctttttttttttttttttgagagggagtctcactctgttgcccatcctgccttgacctctcaagtagctgggattacaggtgcctgccaccatgcccagctgatttttgtactttagtagagatggggtttcatcatgttggtcaggctggtctcaaattccgacctcaaatgatccgcctgcctcagcctcccaaagtgctgggattacaggtgtgagccaccccacaccaggcccaattggcttcttttcatagtatagggctgataattagtatgcaaaggacggattattggaatttaaggtaatatatgtttaggttctgccacaaactcatatttcatagtcacatttaagtactaattgctaatgtgcaactaaaaataattatttgtaactaggatatttttgtagagagactgaattcacctgatttgcagtgatgaacatacgttaaataatgtcttaaaggaactttttggcagttcaaaacagtggtctgaatataattaaaaccaactaaggcagactggctataagccttttttattattaatgtataaatcaatttaaaatgaatttgtcatcgagtaattcagagggtcttattttagaactttcactgcattttagtaggtcttttattaaaatattttctggaaatagtcaagaaacctagtgatttgtatagatattctttttataagagattatacagtaattagattatgcagtaattttgattttctgatccacgagggtattggggagatcattgtatgcattgacttacagtcggcacttaatagacctaggtgaatctatattcttctgtcagccaagcaccctcctactgttaactagagctggcacacttaggtagggagcagaatagagggataaggtaagaaataggagttaagcagaggcttgggtgacagccactgacagccaggtgctgcccagctgccatgcctcaggtaggcccatcctgcttgattctgttctgcagataccttaggagcacatgctgtccaaaaggggctatgctaagagcacaggggtgtagtgaatgtgtcaggagaggccctgagcattggtagaggtttggaatgggcacatcctccctcaaaggagcccaggacaggttcgggtcttcagcctcttggttaaatacctgagaataaataatgaaaagaaatagcagctttttttttttttttttttttttttttttgagataagagtcttgctctgttgccccggctggagtgcagtggcacaatctcggctcactgcaacctccacctcccaggatcaagcaattcttctgcctcagcctcccaagtagctgggattacagacgcctgccaccatgcccggctaatttttgtatttttagtagaggtggggtttcgccatgttggccaggctggtcttgaactcctgacctcaggtgatccgcccacctcagcctcccaaagtgctagtattacaggcgtgagccactgcgcccggcctagaaatagcagctttttaaaagacaaatacttttttttttgagacagggtcttgctctgtcacccaggctggagtgcagtggtgtgatcttggctcactgcaacctccgccttcggagttcaagcaattattgtgcctcagcccccgaggagctgggattacaggtgtgtgccaacacacctggctaattttcatattttttgtagagacagggtttcgccgtgttgcccaggctgttctcaaactcctgtcctcaagtgatccacctgcctcagcctcccaaagtgctgagattacaggtgtgagccactgcgtccagcctaacaaatactttttaagggcacatatcattggtaagttgtgaaagcagtcatgaaatgtcatatgtcattagggaattgtatttgagagttaaactgtgtgtagaaatttcacataagaaaatatcagggtatcctgcaagtgtcagctcgatgtaaatggatgtgattttgacaccgcagtcatcaatatagtctgggccacgttcactgacgtccagaggaggaagggagatggccctcctggctctttggttggaccccttctggaggctggattcagacctctgtcacattttaagaagacattggtgaattagagtgtgtttagttgatatcctggaagagtaggaactctagaaatcttttcatatgagaacagttaaaaggaactggaagtgttcagtgtggagaagggaaaacttaggcaatatgtgatgtttgaagggcccacgtgggaaagagattaaaactttaatctttatccaagctggaatccacagaccagaattatggatatattgcagttcagtgtgagatgacctttctaacaattagtgcaggtatagagactttttaagcatttataaagtggttatcaaaagcagacagggctcttgagcttcagagctgcagtatcctccttttctccccaagacgaattgggtttatctcataagcattatttttatttttatttatttttgagacagagtctcactctgttgcccaggcagtggcgtgatctcagctcactgcaacctctgcctcctgggttcaagcaattctcctgcctcagcctcccaagtagctgggattacaggcgcctaccaccacagctaggtaatttcttgtattttttttttttttttaagtagagacggggtttcaccatgttggcgaggctagtctggaactcctgacctcaggtgatccagccgcctcagcctcccaaggtgctgggattacaggcatcagccactgcacccagcctcatgagcattatttttaaaagacttgtagtaacttggatcaaatgcttctggttttagtagtttaagagtacatggatagagttaagtggatatttacattctgagtctctcaagtctaaatttttattttgaaagttctgagaaaatagatgttttaagctacaaagacaggtaattgtcttgaacccaggccatgctgtggagacgttcactgtccgtagactagttttgcattgacagtagaaacaggaaagtaaattgctaaaaaacattcatttttctttgacttcagccaggcacagtggctcatgcctataaccccagcacttttggaggacaaggtgggaggattgcttgaaccgaggagtttgacaccagcctgggcgatatagtaaaaaccccgtctctaccaaaaaaaaaaaaaaaaaatgccaggcgtggtgtggcatgcgccagtggtcccaattccttgggagactgacgtaggaggatctcttgagcccaggaggtttgaggctgcagtgagctatgatcatgccaccacactccatcctgggcaactttagcaagacccattctcaaaaaaaaaataaataaataacacttttgggccgggcgcggtggctcacacctataatcccagcactttgggaagccgaggcaggcggatcacaaggtcaagagatcgagaccatcctggccaacatggtgaaaacccatctctgctaaaaatacaaaaagtagctggacatactggtgcccgcctgtagtcccagctactcgggaggctgaagcaggagaattgcttgaacccaggaggcggaggttgcagtgagccaagatcgcgccactgccctccagcctggtgacagagcaagactccgtctcaaaaaaaaaaaacaaaaacaaacaaaaaaaaaacttttttttttaattgacttcattacaaaatacgatggtgatttggacacttaaaatgtcaagtggttctgaaagagatatctcacatgtgtaatgttttgcctctctccaaattaggaatggctttctaaaggacatggggaatacagagaaatccctagtgaaagagacttttttcaagaagtcaaggagagtgaaaatgtggtttgccatttctacagagactccacattcaggtaactttgtttccatctgtgactttttctaaaaaaacacagtgaattgtttggctggagatatactggcttactagagaaatgaagaaaactaaaagaaaaaacttcctaagttgtttcattgtactctctcatatgttatttagtattaagttaagcaggcaggggcccagtgactcaagcctgcaatctcagcactttgggaggccaagtggggggtggatcacttgaggtcaggagttcaagaccagcctggccaacatggcgaaaccctgcctctactaaaactacaaaattagccgggtgtggtggcaggtacctgtagtctcagctactggggaggctgaggtgggagaattgcttgaacccaggagacagaggttgcagtgagcggagatcgcgacactgcacttcagctcgagcgatagagtgagactccatctcaaaaaagaaagaaaaaaaaagttaattgttattttaaagagtaacttaaagaacagttacatgcaaaagtataaatgaatattactgaaagtcaatattcccatataaatggcttatatttttgaattgtattttcactagctaactaaaaacatcttagaaatgtacacttaaaattcttatcaccatgacagtaattatttccctctagtattgtgatgtagccatgatattgggaacgggcaacagctgttgagagtcagtgttccttcagttcctccttgaaggaactagcaactgtggtggggagatggtggcttggccaaacctttcaccagagcagagttgggactgccagtcttggctagaaggagaagtgatttttcttagaccaccctaggtctccaaatttctctaaggaagcagatctcttataaaatgttaatacctcctcagaagaggtcacatcgtaaaccaaaggacccaagcctttgtggttttttgtgcacagatttgattagttgccaacacttaaaaatcgagagataactccttttgaaaatatccacacttagaatttttctttaaaaaatcagaaaacttgctaatagcatagctggaactatgatggcagtcatctgctgactggcacctgcctacccaggacagacaagcactgtgctctagagtctctggcactcactgtggtttcagccctgctctctttctcatttctgtggccttcttgcccctttgtcttgatctcacaacccaacagcttcattgttagttaacacctttcaagaattgattgcctggtattcattgactaagagaataaaaatgaaacaaaatattgagatggtgaaatcccttgtgaggaacagtgagagaagggattaggcaggtagaaaggtatcagagaaacctctgcccttatggtacacaaccatctcgcattggcacacattcctcaagttgccaacctctgacaaatatgatgaggtgatatataaatatactagtatgtaaaatattatttgtccacttgttttttttttgttgtttttttttgtttttgagacagagtcttacactgtcacccaggctagagtgcaatggcaggatcttggctcactccaacctccacctcccgggttcaagtgattctcctgcctcagcctcccgagtagccagggctacagtcacccaccactacacccggctaacttttgtctttttagtagagacagggtttctccagattggccaggctggtctcaaactcttgacctcaggtgaaccacccaccttggcctcccaaagtgttgggattacaagtatgagccacggcacccggcctcacttgttttttttatgtctttcccaactagattgttcgttttgtagaggcagcgcatttgcctgtattgtgacctactgttctctgggatcatagccctaaagcaactgcctgacgcatagtaggtggtcaataaatacatttgatggtgtataaacagtgcatcaccaggagtactcaccttcaaacagaactgaaaaatcaaaatcatccagtgaactttatatattagcaaagttcctagcacatagtaggcaggatgctttcatgtatattatccctagaacattcacaataatcttcagaggcacttattattattcctgtatttcatgtatggaaaccaagatttggagaaattgactcacctagtatcactcagatactaaatgataaaaaaaagagagagattggaacccatgttttaagcctattgctatttttttaatttttaacttttgtgggtagtagtaggtaaatatggggtacatgagatattttaacacaggcatgcagtgtttaataatcacatcagggtaaatggaatatccatcacctcaagcttttatcctttgtgttataaacaatctaattatgctcttttagttatttttaaacatacgtaaaggcctatagctatttataccatgactgttgttttggatttttaaaaattgattgacgggttgggcgccatggctcatgcctgtaatcccagtactttgggaggctgaggcaggtggatcatgaggtcaggagatcaaggccatcctggccaacatggtgaaaacccatctctactaaaatacaaaaagttagctgggcatggtggctcgtgcctgtagtcccagttgtgcaggaggctgaggcaggggaattgcttgaacctgggaggcggaggttgcattgagctgagatcgtgccactgcactccagcctggcaacagagcaagacactctgtcttgctctttaaatacaaattaaaattagccaggcaatggtgcgggtgcctgtaatcctagcttcttaggaggctgagccaggagaattgcttgaacccaggaggtggaggttgcagtgagcagaggtcgtgccactgcactctagcctgggcgacagagcgagactccatctcaaaaaaaaaatacgttccttactgcagttaaagtatggagttgatttatttacaaattttcaggaacatatttctcatataaaggttgatttatcatttgttttgagctttatttaaaaaccatttattaatttgttctctcttaccatttttcactgaaatctcgttactgaactacatgagtaacatatgaaaaaacatatccggggaaaaagtgatgaggcaccaaggttacacataacttatgttagagccaaacttagttcaggaaaaactacatcaagtgcacaaaaagcttactggtaaaaataaccatgaagtattttgtgtgtgagtcatctagaggtagttctcaagctttatttgagcataagaacagctgtatgtttcccaactccactgccagagaattttgattcatctggatattttaaaagttgacggcaggctgggtgtggtagctcacacctctaatcccagcactttgggaggctgaggcaggtggattgcttgaggtcagcagttcaagaccagcctagtcaacatggtgaaaccccatcgctactaaaaatacaaaaattagccgggcgtggtggcaggtgcctgtaatcccagctactcgggaggctgaggaaggagaatcgattgaacccaggaggcagagattacagtgagccgagatcgcgccactgcactgcagcctgggtgacagagtgagagtccaactcaaaaaagatgaataaataaaagttgatcataatgaacacctggggttaagaaccaccggtctaaaagattgttacaatagtctgttttagaaacactcgtgaattggccagttgaaaatgaattttttgagacagagtcttactctgtcgcctagcctggagtgcagtggtgtaatcttagctcactgtaacccccacctcccaggttcaagtgattctcgtgcctcagcctcctgtgtagctgggatttcaggtgcccatcatgacgcccagctaatttttgtatttttagtagagatggggtttcaccatattgaccaggctggtcttgaactcttggcctcaagtgatctgcccgcctcagcctcccaaagtgttgggattacaggcgtgagccactgcatcaggccagaaaataaattttaatgtaaagaagatgtcactttttttgtttgttgagatggagtctcactatgttgcccaggttggagtacaacggcacagtttcggctcactgcagcctccacctcccaggttcaagtgattctcctgcctcagcctcccaagtagctgggactacaggcatgcaccaccacacccagctaatttttgtatttttagtagagacagggtttcaccgtgttggctaagctggtctcaaactactgacttcaagtgatccgcctgcctcagcctcccaaagtgccaagattacagatgtgagccaccgcacctggccaagaaaatctcacttctgtttccgtcttcattggaagatggcttaataaaagttactactggtaggctgggtgcagtggctcacgcttgtaatcctagcacttcgggaggccgaggcaggcggatcacaaggtcaggagatcaagaccatcctggctaacacagtgaaaccccgtctctactaaaaatacaaaaaattagccgggcatggtggcaggcgcctgtagtcccagctacttgggaggctgaggcaggagaatggcatgaaccagggaggcggagcttgcagtgagccgagcttgtgccactgcactccagcctgggggacagggcaatacgccacctccaaaaaaataaaaaataaaaaagttactactggtattttttaatttcctagaagcataatggccacatttatttaaatattattagtaacccttagccttaatgtgcttcttactgacagcgttgcatatttaggagtaagaagtttttcctcggtaatgctgttcagtttttcttcatgacttccaaatatggcaccatgtgtgcacttctgattcttgtaagtctcttccgagttttgtcaagtttcagtttgttcctcttcaagtttcctgtgtaggagataggacaacttcctttatgacttaaagcatatatttaatattttaaaagagaatatcattaatgcaaatctgactttctagaatcttataggctgttttcccatctcgtaatcaggcagctaacctctgatctggaagtgaggtcatctgacacaagtttaagttggctgccatgttatgagagtcaacagaaaaactacataattagatttcccttgatgatatttattttgaaaaaagcgatctgtggttttagcttataattttctatgtgtggtcacttacaggtgtaaaatactagacagacatctggcaatattgtccaagaaacacctcgagaccaaatttttgaagctgaatgtggaaaaagcacctttcctttgtgagagactgcatatcaaagtcattcccacactagcactgctaaaagatgggaaaacacaagattatgttgttgggtttactgacctaggaaatacagatgacttcaccacagaaactttagaatggaggctcggttcttctgacattcttaattacaggtaacttttaacaaaagaagagattgattttaattcatatatagttgatatttttacaaaagatttttgtattgtaacatttattttatgaaattaaggcattttggctgagatgtggaaagtttctcaaaggaaaagcatgtttttttgaagtgtgtaatattagcgtgattttacggcaaaatcagatttacagattaaactgatttaataggtaaaactgagtctcaccgtactcctgactataaaagttttcagcttaacgtatactattgacactaattttgtattaatctggaaacttaaaatggcaatccagtgttgactattccccaatttaagccagattgctcaaatgaattctgacttaagtgattctctttgataaaataaaaattaaaagcagactcttgcaaagaaagttatattttaaaatactagatttttaacatggatatttctgttttacttatagaggctgatgaatagaaaaaggtttctatgcctagcttacattgcttgctatgaagaacagttttagtttgaaaacaatctaaaatccaacttccatttctttgtccacttcttcagacaaataatttatctaattccacaaatcagagcatatcatcttgtcttttttgccttttcttgatttgcaaaagtaacaggtaaaattgtgcacttaccattccagagtcatggtgcctttcaggaagtagaaggttctctcacgtttttctttctcccccatttccctcccgtcttttctctgactctcctagacatgccgaaatcattcctatgttgtagaaattggtttcatttccttaatattaacataaaatattaatatttattaaataaagttatatattttgaagtaattttaagccttaaacaaattgcagccgggtggggcacttgtgtaatctcagaagattacagactttgagaggctgaggtgggagaatcagttgaggccaggagtttgagaccaatttgggcaacatatagtgagatgagacctcgtctctacaaaaaactagtagaaacaaccccctgcagactagtacaacgaatcctcattgaccctttgcccatattacccaattttaaacattttatatttgttttatcattgtctttatagatactatgaagtattttgggaaccatttgagtggaaattgtgaatacagtgtccctttactcctaaagacttccatatatattttctaagaacaagaacattttcttacgtagcgacagtacaattattgaaacaggaattattgtgtaatttaccgctcttatttcaagttttctcattgtcccaataattgtccttcataccaaaaatgcagcacatttagttattacgtctttagttaccattgttattctttggttcttaagactgatgtttttgaagagtacaaactgtttattttggagaacatctcccagtttgggtttgtcttaaatttcctcaagattagattcagattatcgatttttgacgggcatattatggaagtgatgcatcatatcgggaggtgtgtgatggtttctctcatttccggtgacaactgagcactgtgttaaccaaatgttaatccataattaatgataaaaaggaaaataggtctggtgcagtggctcatacctataatcccagcactttgggatgccaaagcaggaggattgcttgagcctaagagttcaagacaagcctgggcaatgtagtgagatgtcatcactacaaaaaatgtaaaaattaactgagcatggtggcacacgcctgtagtccaagctactcgggaggctgaggtgggaggatcgcttgagcccaggaactggaggttgcagtgagctgtgatcacaccactgcacatcagcctgggccacagagtgagaccctgtctcaaaaagaaaggaaaataaaattgatctaaaacattcagtaggacacaataaggtttaaggctattaaccatcaatatcaatataagcattatacctcttccctgacaccagcattttaaagaaattttattctatgttacaggaagaaaacaaagatagatttttgtgcagtttagtatactagtactaaatcataaagaataaaatgcttttttttttttttaagtggaaatttaatggagccaccatttcagaaccaaaagaaatttggaacaaacttcacaaagctggaaaagaaaactatccgaggaaagaaatatgattcagactctgatgatgattagagctcaataattctttgtaaattgtctttttttttctgcttcagatttaaatgtgtttttaaaattctattaatgtctatacattggtcacctaaatactcatattctcgagttttatacagttgtatcacatcgaaaagtgtctttactgttttctgtgtggccatcatgtttaagttgaggaaaactcagttcttaaattatctgggaagggtctggattctctatttttgagattgactttatcacaatatgattcttacatctttataccatttacaattgtgttttagatctacagagttagaaattcgaaaactattccaggactaattcttaatcggcattatttatacaagaggtcaagtaacatttactagcgcaatactgcacttgtaaatgaattataaacgctcttctggaatatatttaaataaccattaaagaactgcttattcattctggacactgcatgttgatgttgaatcaactgatgccagcagaaagctattttgatttgtgaacatactgccttatttaaagggtcctgattgcttgtattttaagacattcattaaaaagaaaccaggaaacacttttgaaataacagcataaggaacttcactgtctctgctcaataaaatacctgtaactgga

SEQ ID NO: 252 - DNA, 13783 bp, Homo sapiens
  source 1..13783: mol_type = other DNA
aaggctgggctgggggaagaggcgtggcggcgctgtgcgcgtgcacaaaagagagctgaggggcgggggcgctgcggcacagctggtttgagcaactgaactggaaacaagatgcaggtgagctaggacgggtctcgggtctgggggctgcggcccgttcctttgtctcgttaggcccgggcgggcagtggacgcccgccctgggggaagctccggcgccgcaggcacgagggaggcccggcgcgtccaggccctgcgcaggcgcagtgcgggaggcgggcgtggtcccaccaggacccacggcctgggcgtccccgcctcggtgtgccgggtcccccaaacctcgtcctccgggactatgtcttctcgcggtctctacccacccgggcctgtgaaggtcttgccggatcccgcctaacaaaagttacctcctctcctgaactcccctaaggcacacctgggcagaggtgttaggaagcggagggtccggcctggggtcttccgcacgtaaagcagcgccacagccggtgttcctggctccactgagagccaggtgagggcttagttacaccctcttcccccgagccctgggatccgcttggggcgtgttccctatctgaccgctcgggttccagagctccccgcgagggtccctctgtttcgtccttttttttttttttattaaaataggtaaaataaattatttttctgtagctgcaatttactagcggaatttggttaaagcctaaggagaatgaatgaaaacaccatggaaatgggcactattgtgggtgaaaacctatgccaactaaattttgtcactgtccaaagatcccgcagtggtcagaaattctaatctctgcttagtggcagatggagaggagagggtgcgggttttgctggggagggaggcattaggggctggaggggagggcgtgtctgccaggagccagacactgttttttttttttttgagaccgggtcttgctctgttgcccaggctggagtgcagtggctctgtcacagctcactgcaacctcgacctcccggggctaagccatcctcccttgtcagcctccggagtagctgggaccacaggcgtgcacccaccactctgggctaattttttgtgcagatggggtctccctatgttgcccagcctcagcctcccaaagtgttgggattacaggatgagccaccgcacctggcctagacactcttaaatggtgaagtggtagcttgagggctgccctggcctcctttgcattccctgtccttcaggtcccttgaggccttccctgaccaccctgtagaaaggattctgctctttttgtttgtttgtttgtttgtttctttttgagacagagtcttgctctgtcgcccaggctggagtgcagtggcgcgacctcggctcactgcaagctccgcctctccagttcacgccattctcctgcctcagcctcctgagtagctgggactacaggcgcccgtcaccactcccgggtaattttttgtatttttagtagagacaaggtttcaccatgttagccagaattgtctcgatctcctgacctggtgatctgcccgcctaggccttccaaagtgctgggattatcggcatgagccaccgcgcccggcctcatttttcttttgatgtatctcagaactgttacacagggttggggttggagaccgattatcccggtgcccttttcacagtgctcctgatttcatattccaaagcaagcctgagctccattagcagtgttcttgccacaccatgcaaaccggtgcttgggcagctgggttctagatctaagagccacttttacatcagtctttgtgacaatgatcctttgtgattttgatgctggctgatttggccagccgttctagcatggcagtgcctctaaatgccgtgcctctcctaggcttgtgaggattcagggacaaggtacaagaaaaagggcttagagtgccctgtattttatgagctactctgagacgtctcagcttttcctctcaggtttggccattagagaattctgtcagccaagcctcatctgcagcctgagatcctcaaaatgtcacagtctctttgctcttgggcagtatgcatgccgcaggccgctctgcctggaagattattttcttgattacgggcgtgcacctggctaatttttgtgtttttagtggagatggggtttcactatactggccagtctggtcttttaactcctgacctcagatgctccacctgccttggcctcccaaagagctggaattacaggcgtgagccactccacccagcctggaagatttttttttttttttttgagacagagtctagctctgtcgcccaggctggagtgcagcggctcgatctcggctcactgcaagctccacctcccgggttcctgccactctcctgcctcagcctcccgagtagctgggactacaggcgcccgccaccacgcccggctaattttttgtgtttttagtaaagacggggtttcatcatgttagccaggatgctctcgatctcctgaccttgtgatccacccacctctgcctcccaaagtgctgggattacaggcgtgagccaccgtgcccagcctggaagattatttgtaagcccccagactcctatcacagattgctttccaccctcagacggaatgtcacctcctctgtagggaacatccctatctactctgtggaatgtgggtcctgggtaattctctaaaatggcagcctgtttgtcattgcacttgccacaattttatctctctatgtatagtttgtatatatacttgtttgttgcctgtctcttcctcttgtctgtaacacaggtgactctcgcattcaccactcttccccattgcctacaataatttacatgtggtagatacttcagttttatctgttgaatgaatcactcagtcattattattattattattttgagactgtgtcttgctctgtcgcccaggctggagtgcagtggcacgatctcggctcactgcaagctccgcctcccgggtttatgccattctcctgcctcagcctcccaagtagctgggactacaggtgcccgccaccacgctcggctaattttttgtattttcagtagagacggggtttcaccgtgttagtcaggatggtctctatctcctgacctcgtgatccgcctgcctcagcctcccaaagtgctgggattacaggcgtgagccactgtgcccggcactctcagtcattattaaaaatattgaacacatgccaagtcagagccttggtatccgtattgatactgatctgcactccctatcctaatttttaccccaagaatagctcctccattcagggaggggtagacaggaaaaacaaaacgggggctatggatcttttgacactttctcagaaatagttcacagactggtgtgcattcctcccttcctgtcacttttcccatttggccccttgcccaacgtggcaccctacatactagacttagcactcatggtaaccttggtcccgctcttctaggaccccaacgcagacactgaatggaatgacatcttacgcaaaaagggtatcttaccccccaaggaaagtctgaaagaattggaagaggaggcagaagaggagcagcgcatcctccagcagtcagtgggtgagttcactcgctttcctctgcacctgtctgggttaggagatggctccctaagcctctgactgccctgccaggagacaggttggagtgccagcatggacactctgtgtctgtgggacctcagacaaaacacagggcgtctctcaccttcaccttcctgagccatagacttaggggacttcagatatgtcccacaagtccttgtccatgtcacatgagcactgaagaaaatacttctttctgctttctggtctgtgattccctttgataatgtcatggaaatttgttcaaggtttttagtacttgtattttcctgagcatatactttattttctgtggtttcattgaggatattaactaaaaattgcttcatttggggaggcataagatgtttgcaatgtgtgggagtctgaggggggttttctcaaaggcagttgtactgtctgaattggagtcccttggagtgctggtaaccccacccacctagtgtttactgaagcagtctctggaatgaggcccaggaatctgcattttaaacaagtgccttaaaggattctgatgcgtgtcatagtttgagaagcactggtcccagggactagtacttttgtcctctgttgacacattagagctaatttagagaaggatttattagaaagtatccagcgagtgcttactgcatgattatcattgtcaggtgcttttctggggttggggatttagctatgcataagccagagacaattctctgccctcagagaaccaacattcaagtgggggagacagacaataaacaataaagaaaataaggcagtaaaagggactagaaagggttggaggagaagcaggctcagagagggcctcactgagatgacatttgcatggacctgaaggaggtgaagctggcatttgggtaaagacctgaaggagctgaagaacacatttgaatagacctgagggagttgttgagacctgaaggaggtgaagaagacatctgggtattcctgaagggggtgacgtgagcgagtgaaatatgggccctggcatggctgggaatccctgaggagctggaggcgctgggggagagagttcagagcagcctcagcagacccagaagcttctagtaaggaccttggcctttacacctaatgaggcaggaagcttttggatgtttaaacagaagagtgacattttctcttttttgttttttttttgagatggagtctcgctctcttacccaggctggactgcagtggcgcaatcttggctcactgcaacctccgcctcccaggttcaagcgattctcctgcgtcagcctcccgagtagctgggattacagacatgtgccaccacgcctaggtaattttttgtagcgatgaggtttcaccatgttggccaggctggtctcaaactcctgacctctagtgatccgcccacctcagcctcccaaagagctgggattataggcgtgagccactgcacccagccaagggatgcattaacttggagatccctattagacaaatagccacattaagagggcccttgggtatgtttttctctacattagagaagtctgggctggaggcctatactttgggagttgtcagcatattgatagcactgaaagccatgagattagatgcaatcaccgagggagtgggtgtggataaagaagaaaagtagtcaaaggtttgagcctggggaattttaatcagcaaagggttcaacagtagggcggctggctcactcctgtaatcccagcactttgagatgggcagatcacttgaggtcagaaggttcaagaccagcttggccaacatggtgaaaccctgtctctattaatgatacaaaaattagctgggtgtggtggcacacgcctgtaatcccagctactcaggaggctgaggcaggagaattgcttgaatctgggaggcggaggttctcagtgagtcaagatcgcaccattgcactccagcctggatgacaagagtgaaactctgtctccaaaaaaaggaaaataagcggggcagggtgaggcggaataggagaagagaggggaggaggatctgagggcttgggtaaaatgttgtcagtcaataaattgggattacaggtgtgagccaccatgcctggcctctcagcttctaatgtagtgtggtgccttaagtaatttttgtttaggtaggctaaggatctggtgttgtgtgcatatctttaggagaaaagagaggggaaaaaagaaaaatacatgttcgttcatctttttaaatttttgctttttgccaatgtaaccaaattcagtgaaaacatatgaagatatgactttggaagagctggaggatcatgaagacgagtttaatgaggaggatgaacgtgctattgaaatgtacaggtaagcgccacccagaggggctgtttgtttttttgttgttgtttgttttgttttggttttttttttggcgtggcaataaaatgtgtgggctgagcatggtgactcatacctgtagtcccaacactttgggaggctgaggcaggcagatcgcttgagctcagaagtttgagaccagcctgtgaaaccccgtctctataaataatacaaaaactagctgggtgtggtggtgaacggctatagttccagctactcaggagccctggaagtggaggttgcagtgagctgagactgtgccactgcactccagcctgtgtgacagagccaaactctgtctcaaaaaataaaatgaaatgtgtgtccttcaaaaaattaattttcagctgaaacatctaggagcgactgcaattaaataatattgtgaattttagcaaactgatcttagatttttgccataagaccaataaataaacctgggcttttacaaggattgccttctagacgatgtgtgtgtacacgtgtttgtgacgtaagatgtttctctccttgttttgtgcagacggcggagactggctgagtggaaagcaactaaactgaagaataaattcggagaagttttggagatctcagggaaggattatgttcaagaagttaccaaagctggcgagggcttgtgggtcatcttgcacctttacaaacaagggtgagctgatcttccactccatctatcaaatgttaatttgaatttatgtcttcaggatctcaggcgttacctatatcagagggttaagaaatttttttttctgggccaggcgcagtagctcacacctgtaatcccagcactttgggaggctgaggcaggtggatcatgaggtcaggagatcaagaccatcctggctgacacgatgaaaccccgtctctactaaaaatacaaaaacaaaattagctgggcgtggtcgcgggcgcctatagtcccagctacttgggaggctgaggtgggagaatggcatgaacccgggaggcggagcttgcagtgagccgagattgcgccactgcactccagcctgggcgacagagcgagactttgtctcagaaaaaatttttctggtactgagttttttgtgttttttttgctggtttgcccaaaccttattacttaatttttttatcttaagactttcaagttaataatttgtgactaatatgaatgcctttgttaaagtatagcaatgaagactatgcttttctgtttttgaaaaggaattcctaagttatttattcctttacaggaactctgacatttcaacattctatgtaatgaatttatctcatagatggcaaggttggcctttacagtagtaattgcctgaactgtgtgatactgagggcctctgatttttctcagctctccagtcttgtcttaaactgtagagtccagtgcttatttaggaatttcttttttttttttttttttgtttgagacaaagtctcactccattgaccaggctggagtgcagtggcatgatctcggctcactgcaacctccgtctcccaggttcaagcgattctcctgcctctgctcctgagtagctgggattacaggcgcctgccaccgcactcagctgatttttgtatttttagtagagacggggtttcaccatcttggccaggctggtcttgaactcctgacctcatgatccactcatcttggcctcccaaagtgctgggattacaggcgttagccgctgcacctggccaggaatttctttaaagcagaaaacgttttctgacatttcatactttctaaaccttcagcgttttctcattcaaccttataagaaatgtatagcaattttatcttttacattgaagctgtttttctgacttgttttgtcaaataaattggactttggatttgtgttcttcactttccctcagcatattaggaagtttttaagaaatgttaattcagctgggcatggtggcttacacctgtaatacctgtaatcccagcactttgggaagccattgcggccggatctcgagctcaagagttcaagagcagcctgggcaacgtggtgaaaccctgtctttacaaaaaaaaaaaaaaaaaatcagctgggcatggtggtgtgtgcctgtaatcacacctcccgagtagctgggattacaggcgcctgccactgcacccagctaatttttgtatttttagtagagatggggtttcaccatcttggccaggctggtcttgaactcctgacctcatgatcttggccaggctggtcttgaactgctgacctcatgatccactcaccttggcctcccaaagtgctacttggggggctgaggtgggagcattgcttgtgagccgagatcacaccacttcactccatttagcctgggtgaaaacaagaccctatgtcaaaaaaaacatgttaattcatcttagctagcagcagaattacttgtgaaactgttacaaggttttacttagggtagaagggtcattgagctttgttctgtataaatgtaggatcataattgcttctgttttctatgtgtgttttatagaattcccctctgtgccctgataaatcagcacctcagtggacttgccaggaagtttcctgatgtcaaatttatcaaagccatttcaacaacctgcatacccaattatcctgataggaatctgcccacgatatttgtttacctggaaggagatatcaaggctcagtttattggtcctctggtgtttggcggcatgaacctgacaagagatggtaagggctctgggagacaggcggggcagtgagagatgggaggcgcatttctgttggagagagtgtctatttcctggactcctgttacgatggtgggtcaagttcacttctgcctgtgtatgaggacggaagcacgtttaatctctcatcttagttgcgtaatcaggaacagttacaactgggctctactgattcttagttcaaggaaggcgtgatagacttaaatataaacattttttatattggtgtggaatatattttgtctctacagttggatgtttttgtagcttgaaatcacaacattcacttttgctttaattcacatgaacacagggagacgttaatgtatgtatttgtatttttctacagaaacattctcagttgagtatgttagtagcttttacatttatttacttagttatttattttttgagacagagtcttgctctgtcacccaggctggagtgcaatggtatgatcttgcctcactgcaacttctgcctcccaggttcaagtgattctcctgcctctgcctcccaagtatctgggattactggcacctaccaccacgcccagctaatttttgtatttttagtggagacggggtttcaccatgttggccaggctggtctcaaactcctggcctcaagtgatctacccacttcagcctcccaaagtgctgggattacagacgtgagccactgcgcccggctagtagcttttatttattttttttgagacagagtttcactcttcttgcccaggctggagtgcaatcacgtgatctcggctcactgcaacctctgccccccaggttcaagtgattctcctgcctcagcctccctagtagctgggattacaggcatgtgccaacatgcctggctaatttttttgtatttttagtagagacagggtttctccatgtggtcaggctggtctcaaactcctgacctcaggtgatccacccgcctcagcctcccaaagtgctgggattacaggcgtgagccactgcgcctggccagcttttaaattaaattaaaattttatttaattctgcctgttagctcggaaggatgtggtttttgtttgattgtttgtttttttgagatggagttttgctctttcgctcaggctggagtgcagtggtgcgatcttggttcactggaacctccaccttctggtttcaagcaattctcctgcctcagcgtctcaggtagctgggattacaggcgcccaccaccacgcttggctaatttttgtatttttagtagggacaggttttcaccatgttggccaggctggtcttgaactcctgacctcgtgatctgcccgccacagcctcccaaagtgctgagattacagatgtgagccaccgcgcccggctgtgtttttaaattcctttctacctgttaaacatggaggtatcaaaatacatacccacacagaacgtgaaggagaacctcagcccagaggcattcttgccaagtgaaactctttatctctttattgaaataatatttccaactatgctttaccagaaagacatttttaaacatgactttatatactgtaccactaagatactcatctggcggccgggtgcggtggctcatgcctgtaatcccagcactttgggaggccaaggcgggtggattgcctgaggtcaggagttggaaaccagcctggccaacatagtgaaaccctgtctctactgaaaatacaaaaaattagctgggcgtggtggcgggcacttataattccagctactcggaggctgaggcaggagaatcacttgacctgggaggcagaggttgcagtgagccaagatcatgccattgcactccagcctgggtaacgagcgaaactctatctcaaaaaaaaaaaaaaaaagatattcagctggggaaagtataaatatacaaacatacataaacacacacatataggagatacatcagttacatattccagtgttcaaaggcgtacagcatttcaaactaaatacatgtttgcatcttattttgaccttttttgaatgtaccatgaggggagagagaagtgtgcaattgtttttatttctaaaaaaaagtcttgaagtctagtgaacttacatataacgattgctttgtgtaagtgaacagtaacattaaacacttatgtacgtatgtgtggatatataaagatatatatatagagagagatatatatatttttttaatttttgagacagggtcttgctctgtcacccaggctggagtgcagtagcactatcttggctcactccagcctcagcctcccgggttcaagcaattctcgtgcctcagcctcctgagtagctgggactacaggcatgtgccaccatgcctggctaagttttgtatttttagtagagacggtttcaccgtgttgcctaggctggttgtgaactcctgacctcaagtgataagtgatccacctgcctcagcctcccaaagttctgggatcacaggcctgagccaccacatctggctggatataaattcttgagtcaggaatctgaagtcttgtttttttttttttttaagaaacaggttgaatttatataacattcaaccaaagtacctagagccgaaaatactggtgttactcatcttcgtggaacactttttttttttttacccagcatgactgaggtatgatgaccaaaacaattgaatatatttaagatatacaacatggagatttaatagaggtacaatgtgaaatgattaccacaatccaagtaattaaccatccatcatttcacatagctgccctcactgtggtgagaatccttaagatctactttcctagcaaatttcaagtatacaatacgttattattcactgtagttaccatgttctacattaggtcttcagaacttaccatcttataactgaaagtttgtatccttggccaacatctcccatttccactcctcccctgataaccaccattctattctctgtttcatggaacactttaagttaataagtaaaattcaactgagcacgttggctgaagcctgtaatcctagcatgttgggaagctaaggctggaggattgcatgaggccaggagtttgagaccagcctgggcaacatagcgagatcccatgtctacaaaaaagaaagtagccaggtgtggtggtgcacacctgtagtctcagctgctagggagatgggcgggaggatcatttgaacccaggagttcaaggttacagtgagctatgattgcacccatagcactctagcctgggtgatggagtgagagcctgtctccaaaaaagtagattaagataagacttcagtaaaattggttttcagattttttttattttgagacagtctcgctgtgtcgcccaggctggagtgcaatggcgcgatctcggctcactgcaagctccgcctcccacgttcacaccattctccagcctcagcctcccgagtagctgggactacaggcacctgccaccatgcctggctaattttttgtatttttagtagagacggggtttcaccgtgttagccaggatggtctcgatctccagacttcgtgatccgcccaccttggcctcccaaagtgctgggattacaggcatgtgccaccgcgcccggcctggttttcagattttaatcgatgtgtccagttagcagaactctctgccttgatgttcctttaagcgaagccatttgttgtagaatctcttacgtagtcctttggttctgcctgggctcttctctgaagtaggcaaatacatcacttgattttgcttcacttggtctcagaccacaagaattttgctgattttaagagtgaagtattggagctgagtcttcagttactgattctttattatctggtgcttttttgattagttggaacaaatgtgtaagttctagggtatcaccatacatttattctttgaccccaatagattgagatactggacatgaggctgaagagtttattaaaattggatttaatgattagattgccagaaggtctgtggaaattatttccttcaaatttttcatgctgatttccttcctgggaaattgtagtcatcagaggataggtttattctttgtatttttgagacagggtctcgctctgtcgtgtaggctggagtgcagtgacatgatcatggttcactgcagccttgaactcctgggctcaagcgatcctgccacttcagcctcccaaacagctgggattataagcacacaccaccactgtacccagtgaatttttatgttttatttacttttatttttattgttgagacagtctcactgctgcccaggctggagtgcagtggtgtgatcttaaatgtctgcaacctctacctcccaggctcaggtgatcctcctgcctcagcctcccaaagtgttgggattacaggcgtgagccattgtgctgggccaaatttcgataattgtattttctacttagaaaaaactaggttgatggacttagggcgagggaacctttgcagcacagtgccttaggcaatttgctttttctttaccatatagagttggaatggaaactgtctgaatctggagcaattatgacagacctggaggaaaaccctaagaagccgattgaagacgtgttgctgtcctcagtgcggcgctctgtcctcatgaagagggacagcgattccgagggtgactgaggctacagcttctatcacatgccgaactttcttgtgacaaattgtctggattttttaaaaaaggaaaaagcaagaatgaatccttgtggtttttagttttgtataaattatgtttcaaatctttacattttggaaataatcattgctggagattctgttaaatattttggaactctttttttttttaaattatagtatttcctctaaaaaaaattaaaaccagccatttgtatggcaaatgtc

SEQ ID NO: 253 - DNA, 32742 bp, Homo sapiens
  source 1..32742: mol_type = other DNA
ttagcgcctgcgccgtctctaggccccgccccctcacccctccggtcctggagctcccacagctaacatggcggcgccctgtgtgtcctacggcggagcagtttcgtaccggcttcttctctggggtaggggtagcctcgcccggaagcaaggcctctggaaaaccgcggcccctgagttgcaaacaaatgtcagatcccaggtaaggcctgggaagactggaagcggcttacctctgccgcgcgaggatgtggagccagcgcggacaccttcccccagcgtctcgcgtgccttcaggcagggactctaggatcttaggtatttagtggaggtctgaggttgggggggaggaggtgggtattggcgtgcagtagccgctctagaggttgttacttgtttttttgcggggtgcagcgaggggaacttacctgaaggtagaagtggagcgacctcctccttcatttggctgctgagctaagtaagggtcggtgcctaggtctgtgttgggtccagtcctaccctgccctgctgtctagggaggaggagggccgcgccagagaagaatgatgggaattggattcctgcaggtgcctggaagacaatggagaaagtcacgttgtgtagaggacagtgactttttgaaagtgccttcaatatgcgcaatttctggcttcttaattttcccgaatccccctctatggaaagatgcaggccagaacttgtacgtttcgtttaatccagggagaagtggggagtcaacagctggatggctgatgatgccagtttactgacatgcgatctcagagcaggaaaaagatttgagagggaagaaacgagtttagtatgggattatgtttttaggcatctgggatttccagtaggtctacggatagtcaagtgtatagctcaggaggagaactgatttcgaaatgccctgttaccttgtaaatggtaactgaggccttgtaaacaaattaaattacctagggagagtgtactgaggagtaggcagagggacagggccctgaaggacaaataagaaataagaggcctcaagagattgagaatgagggaccaaagaagcaggagagaaaccagccagtgtggtgtcatggaaaacaggtgaatgtttcaaggagggagagtgataacaagtaccaattattgcaggaaagtcaaataccatactttaaaaactatatttaaaaaaaaaaacatctttttgtatgttctttcctttatattttaatctagatcaaccagtccattctatctattcatgtggacatttgttttttttttttttcttactggaaaatgtgctagaaatttttattttttcatgcatctctttgagtatatctttgctacatacgcatgattatgagagggactatatcatacagagtatttttattgttgacatttaatgtatgtattgggggatggctaactttctgtccctcctggtatctattcttctatgttttttccatgttcttataatcatgcataaacatacatgcacaggtgtactttacaaaaaatggtaccatatttgattgcattttactttctgcttttctcttgtacatatgcagtatattgtaaagtagaaatccttcagggtcccctattatgtttttaaaagcatttttaactgctgcatactattccatgataagaatatatcaaagttaatgtaacaattgatggacatttgctttgtttctactttctttgcactaataaagtttcagtaaacatctggtctagttcttaagtactggtttagtaaaatggatgaagaatgatttctcctgttactttaattttcatctccttgaccattcttgaaacaacctctttcccccatatggcaaatgtttactgagcactttacctgagccaggcactgtgaagtaaacaatttaaagtcaaacaattacaagatagtatccacccttagcactcttaagggatggtcctgaaatggctgaatccccagattcctgaatactactacagcatatattttaccacattaagtacagctcagatataactgaaacacttagctgacccccctttagattcttatgattgcatacatatacctaaagacattgataaagcttttttttttatcgtggtgcagagcttatctgtcttaaacattaacattttttcacttctgcctccaacattaatagatagatttctcttggtagcccatgttttataaaataataaaaattttaatcacttaatgagtgacaaaacactatacctggtcttttgtttgttccacttttaatttccttaattacaaaatctcttcagaggttacagaaaacttgaagggtgtgggagaatagaataataataaagtgcatttcatgcagagtatttttgcattttgtttatatatgtaaatgtatactaggtggtgatataaacagtaaatattacaatgggtcacagtttaacaagtttgagaaacactgttacaataaggaaaaagaagcgagttttgttaagctattcctaggttctcagttgagaccttcactagcagactacctcttgcatagcaatcttgtggtatgcatgttttgtattaatgcctcaatacaattgcaaatgtctgagtgtcccaaatttggggcagaagaggcagtcttatgaatggccaaacttttcagattgtatatccatgaatatcagggatctatggtgtactgtgatatttacagaggtaaatacagaagagcacagaagtaatatgcctgagtcagactagagttgttgaccaggtagaggattgtcatgggcagcttcccagaggaggcaaaggaaaatagcgtctttagcagcaaataggagttatatgaaaacagaaagctattctattcaaggaagatataataggtgcataagggtatagagatgtactgagtaatagtgggctttgtcagcaacaattggttatagcatagggttttggtgagagaatggtgcagagacaggtctggaaagtttggcaggaatcagtatgatctgttttgctatgctaaggtagctgaattttttacctctcacaaatgaaaatagtgttagcattattatgagcagttgacagtttccttccatgctgtactacaaaggttacccatgaattcataaatcctctatcaatatagctaatataggaatgctaatttggttttctataatatttgtgatttttataataaggaaaaacaaaagaccaattgctattttgaaaaatatttctacaaaacactaatagggtgttttcttaattattctctactactgaacactttcctagtgcttaaatattcagtttttgccaagccaagatgcctttgttgatttagaccatctgccagagaagtgatcaatgacattaaatggcttggccctttatattttggtttccactgtaaacacattcctgtctctgtctaaagtatctgtttttttttttttaatctctcatgcttctggaggttataatatcctgtatttatcacagcattctattgatctgctttagtaggatcttaatacattttttttgacaaatggctaaaaaacgctttgaaaaacaaattgtataattgacttgaatttgtatcagatgctctgtacagctctgtaaattagttatgccctaccccgataatttttgaatatatttatttttaatcccagtttattagcaacagaaaagccctttggtaggataaactgttccctttgagatctaatcctgtccttgtaaggatagaattgagtgtgttcctcattgctgtaattaggaaaaatacctctacattaaaatttacagtctttatttggcaatttatatgtttcttatataataagagcttgataataaatgctactatcattctcacctctcttttccttgtaaaacaagataactaaactttcttgtacaatgcttcattgtaattaggatgatgaacgtatcagttatttattgctacataacaaattatcctaaaacctagcagcttaaacaacagacatttgttatctacagtttctgtgggtcagggttctccaggcacactttgttgggtcctcttgctcagggtctctggtaaggcaagagtccaggtattggccggggctgcagtcatctcaaggctccactgtgggtggggagagtctgcttctaggctcactcagtgttgtagttagcaggatttagattcttgcaggctgtcgggctgaaggccccaggtccttgctggctgttggccagagccctccctcagctcctgccacatgggcctctagggcaactcagcacatctggcttccctcaggctgatgaagaaaaggtaagcaagagagaagaacagcaggtggcagattcactgggagccatcttggaagctgcctacaacagtggaagacccacatatacttattttcttgttatctaagtgtctctctcatgtatttaggtctttcttctatggttcttatgtgtgggcatatatgggtacctatgtgtgtgcacatgtgggtacatctgaacacctgctgtatcattctttttgtcagataggattattagcttaaacaaaactgcatctttactatgttttgttttcttatctcattatagcaacattctcactttaacatcactcatttcttctttacaattatttctgttaacatttaatacagagcctggtctataataattgctcagatttgttaaatgaacttgtaaagtagtttatttttagaattttattctgcaaaaccaagcatataaaaatagaataatataatgaactccacagatccatcaaccagcttcaacaattattaataatttcccagtcttgtttttatttctcccctcccaccccccagagtcatttaatgtaaaccccagacattctgttattttacttataggtacttgaatatgcatctctaacataaaggtttttttaaaaaaatagattccttgccaccgccatatctaacagaatgaacagtaatttcttatcatctattacctatttcatgttcaaatttccctgaatgtcccaacagtagctttttgtatatagttggtttattttaattgggagttaaacagggtttatgcgttttatttgattggtaagtatgttaagtgtcttaatttataacagattatagaattaatgtaaatggtaaattttgtttaagtaagtggatttcttatttgtttaacatagtatccgtttccccttcatagtagtatcccagtttccccaggaggaattagttctttttcgctggttatagttgagaagacctagctatagtcccgaataatctggggcacctgactcaaagtaatcctcagatgttcctcctcctgagatcctgagcatagaggcaggacagttggaataccgttttgtcttaatggacacattctgattgaacctgcatggataacttttagctgatagagatcccttggaccctgcctgctttcctttcttttttctttccttttttttagaatttttatttatttttatgttttattttttgagacaagagtcttgctctgtcacccgggctggagtgtgcagtggtgcaatctcggctcactgcaacctccgcctcctgggttcaagcagttctcctgcctcagcctcccaagtagctgggattacaggtgcccaccaccacacccagctgatttttatatttttagtagtgacaaggtttcactttgttggccaggctggtctcaaactcctgagcttgtgatcggcctgccttggcttccggaagtgctgggattacaggcgtgagtcaccacgcccggctgcaatttttttttttttttctaagatggagtcttgctctgttgcccaggctggagtgcagcggtgtgatttcggctcactgcaacctccgccttctgggttcaagtgagtctcctgcctcagcctcccaagtagctgggattataggtgcctgacaccatgcccagctaatttttgtatttttagtagagatggggtttcaccatgttggccaggctagtgtcgaactcctgacagttgatccgcccacttcggcctcccaaagtgctgggattacaggcatgagccactgcgcctggctgcaaattgttcttaacagtggcaaagcaaattcccttcaagaattcttggtgtttttagctaaagatctgtttttttcacactcttagcctcaccttatttaatggattgtaccaatgaataatggactcctttgaatgtaaatatttttgtgtgaattcattgctggaataattctggacttttaataaacatattcaatatcctgctactgatgctgtgataactttgtaaatttaatattataaatttccagaatgccatactcttaagcaatgtgtagaaatgtctttgaaaaagatcctaaggactttttatgaaaaatagcaaattagggccatttttttaaagccctttctaaatggacaacaatgaaaatgtttataaatatgtttaaacctcaattatgttaaaagtaggaaagccaccaccttatgtcacaaactctggagactataggcagacacaattttaaatcaagtgaaaaaccaagtcttcaataatcgagactcttttgcttgagaagatgctaaaatgttgtaggagcaaaaggaacagtgtggaagagacagctgaagaaaatacaaagggatatttacctaacaaaatggaagaattattttaccacagctacttaacactgtcaaggacatttaaaaatcagttgagtgaggaggagctctatgagatgggataagacaagaagatatgattaaaggaaactgttgaggtaagaattttgaggatagaccaatgatataaaaagctaaaaattcatagtggctgcagtaagcagaattgacactgtagaaagagggaaaaaaacatggagtaaagatttcaaaatcatacagaatgcagaaaagggataagaaataagactaagagaagctgatctaaactatggagaacagaagaacagataattgctgtggctgaaaaagagctgaataagtcagtaagaattcattggatatttatttttgaagttgatagtacatttaaacattttattcagagacacatgtattgtcactggtaaaatgagagcaagctgtatatggtccaaattgccagctcaaaagccaaaaaaaaaagaaaacccaattcttttttttttttcatatagcaaaagaaagaaaataggaaggaagcattaaaaaatgtaaagattaaataagatgaatgacaagaccgaatagctgttaaaccccatgtaacttgggtattctcatctactaaaatctcagattgggttaaaaaaacaaaacctaaaaaaaatagtctaaaacttaaatgaaaaagatgggcagtgatattccagggaaatgtaaataggaggttgaaagggttgcaatattatgacccaacagaattgaagaaaaaaaatattacataggagtagaaaactttgtaatgctgaacggtacaatctaccctaagatgtaactctctggaactaaatagcacattgaatataccgatgaaacatacaaaagaaaccaaccatagggaaataaaattgacaaaagattacagacattgtatggatatagattcctgtctggaattattctcctggctcactagtaatgagaattacctctaagtatgaatgaatacttaaaatttttttctctaatttctttgggagacagagtctccctctgttgcccaggctggagtgcagtggtgcgatcttggctaactgcaacctccggctccccggttcaagcgattctcctgcctcagcctcctgaatgactggtattacaggcgcacaccaccatgccctgctaatttttgtaatttttagtagagatggggtctcacaatgttggccaggctggtctcaaactcctgacctcaagtgatccacctgccttggcctcccaaagtgctagaattacaggcgtgagccaccgcacccagacatctctaatttctttctgacagtttttctgtctatactttacaaccactgcatcacagttctttgaatatgaggtgttcagtctgttaaacctaccgccttttgctctcagcagacagaccatcttctatttcatagagaaaatagagggtgtaagacataagtaaccttgcctttctgcctaccttccctcacctacaaacaatttgtttcattactagtagaagacatgttttttgtcctaacgctaatgcttgccattttttctccttctcttttaagtgtcaacatcatgtctcaggtgattaacagacctgtatctgaagctcaggtctgtccatgctcacacccacaaagccacctgcctcctggacatctgtcttcctgggatgtccatcaacatctcacacacattctcaaatttgaacgcatcactttcctccctgatcttgctcctcctctggaatcccttcagtgaaaggagccatacgctccaggaggcacatttcctgagggctgtggttggtgattggcagggagtgtggttgtagtgacctaaaagaaagtctttgtgggttcacctgtattagggttgttttagctgtgaacaaaaacattttgtcatgttatctataaaaaccagcagtgtaatcatccttttggcaatggaacatttgggagaattatctactatatgattgctactttttggcccccaaatcacacctttgctatgattcttggggtagaaagataatttctcttcactttgaatatgtgaagcaacattctccattgcccaaagaagacgtagactcataaagaacaaattttaaaatcccctggaaaacagtaaaaacgttaagatgggaaccactatggtagggagttggtgctggtggcgctgggctgtggcaaggggagcaggggtgtacagacaggctgtgtctataaaagagcggaccatgcattagccagttgtggtcatgcttttactcattgacagcaatactgtatcttcacaaagcattgtgagaaacgataatgattggttagtaatatattttagaaggatgtgatctcctaagtaaaaataaactcaagtttcagagaattttaaattgcccttttcttactcattaaaaagtaagaagaaactctatttttactatcttaatttggaagagtttaaaaacatatatttttttcattaattgggtattgttacatttctcctgtattttttcttatattttcttgtgtaactttagtgacaaattactgtagaggcatctgaatttaggactcttggaagggaaggggatggaggtaggagggatggtgccagtgaatgatgtctgtctgagagagatttatgtttatgaaaaaggaagtgagtggattcctaagattgtggttttaaggcctgaatattgctttaagagtgtttagaattgttggggccaggatgaaggttgagaactacaggtttgagatcttaagaaaagccaggaccagaaagatctgttctagttatttccagctacgggatgcagctgaatgtcatttgaaaacatttttctcgttttttagcatctttgactgaaggcgaaatcttcatgccttggagggaaattcctagtgccacagcataaaaggaccagcagcagcaagtgtgatataattactgatgcctttaaaagatatgcgagccctttgggtatatacccagtaatgggatggctgggtcaaatagtatttctagttctagatcactgaggaatcgccacactgacttccacaatggttgaactagtttacggtcccaccaacagtgtaaaagtgttcctatttctccacatcctctccataaagacacatgcacacgtatgtttattgcggcactattcacaatagcaaagacttggaaccaacccaaatgtccaacaatgatagactggattaagaaaatgtggcacatatacaccatggaatactatgcagccataaaaaaatgatgagttcatgtcctttgcagggacatggatgaaattggaaatcatcattctcagtaaactattgcaaggacaaaaaaccaaacaccacatgttctcactcataggtaggaattgaacaatgagaacacatggacacaggaaggggaacatcacactctggggactgttgtgggatggggggaggggagagggatagcgttaggagatatacctaatgctaaatgacgagttaatgggtgcagcacaccagcatggcacatgtatacatatgtaactaacctgcacattgtgcacatgtaccctaaaacttaaagtataataataattttaaaaaaaagaaaaataaaagatatgcgagcccttatttctgcagttagcatgttgagccaaattaataaatcttctcaatgttcagtcaagcaattttttctttttatcactttaatataaggaccatggaataaagtcttaagctaagccaaaagatggttaaagataggacgtatttttacccacaaataaggtgaataccgacagtgtaaggtgctcttcctcaggccatgccgtttgctgtcgtgttttctgcttgctggtttctggtgcgtgtgtatttgcctccttaagggagtagccttttgctctttatcccatgtgtcaaatatcaaaactcactgacattgaccaatcattatcaaaagtggatgtttaaaatagatcaggaggtagcataccacttacaggtatttttggttttaatgtattgaaatgctagtagcttaaactgcattgtaagcaaggctttgagtaggggacacattctaacaactttcttagcaggtcctttaaacttgctttttggactcctgtcacttgaataccgtaataaaaaaagataactacttgcatatactattttatttaaggacaatggcctagaagatcacagtttaatttattttcttttctttccatctatattttctgttagatattaaggctaagacatactgcatttgtaataccaaagaaaaacgttcctacctcaaaacgtgaaacttacacagaggattttattaaaaagcagattgaagagttcaacataggaaagagacatttagccaacatgatgggagaagatccagaaactttcactcaagaagatattgacgtaagtacagttactctgttgaaaaagtaattgctgtagagttttagatattaaaagcacttttcttcatgagccccttagctctgtgttttaatcaagctgtcagaataaggaaaaatgctgctatacattgtttaagttggagccatggtttcaaagacaaatgtgcaggatttacttagtatggtgagttttaggtgttacctagaaatgagtctataaatgctcatacactattgggaaatgtttaacctgttgtgtagtcttagactcagctttcttacaaaatgatataacagatggtaatgaaaatagagtcaaatttatatcaagtcccataagtaaaccttggcccagtgtttttgtcaacttaaatatatatctgaggtttcaaaatgggggcgtagtctaagtgatttgaaaattaggatcagaattctattcactcttgaattattatattcctgataaaagcagtaattgtcgataatatttttgctagacatcctagagtagctagcaaaggaagttgaatttaacaactttgaatcttgtccttatttttaaaaagtaacatctaatatcccatgatgttttatatttaatcgaagaacaacatctttgtatagataataacattcttatacgattttaatattatttttagtcattttatgcactttagtttaatttcaatctttctgtatacttttcctatttataaatggtactgtagtatcactttcagaccaacattttttattcaaccagaaggatttttttcttttcttttcttttcttttttttgagacagagtcttgctctgttgcccaggctagagtgcagtggcacgatcttggctcacagcaacctctgcctactggcttcaagcagttctcctgcctcagcctcctgagtagctgggcttacaggcacgcaccaccatacccagataatttttgtatttttagtacagatggggttttaccatgttggtcaggctggtcttgaactcctgacctctggcgatccacccatctcagcctcccaaattgctgggattacaggcgttagccacccggcccggtccagaaggatttcttattgctcttctatgttaggtgatttgtaattagggactttgtagctgctgtcctctttttgagttttatggtaatctggacagtattgggggatattttccataaagagatgctattcttcagttaagtataaaataccatgagatgttagatattacattttaaaaattagaacaagattcaaagttgttaaatttaagctcctttgctagctatcctggggcatttagcaaaaaaaattattgaccattattgcttttgtcaggaatgtaataattgaagagtgcaacaggaatagaattcaggtcctaattttcaaatcacctagaacatagactctctagactctaagtttgcctaccccggactttcatataagtagagtcatacagtatttggtctttagtgactgacttgtttcacttagcacaatgttttcatgtttatctacattgtggcatgtgtcagtacttcctttttattactgaatagttttcgattgtatggatataccacattttaagaattcagtcatcagttgatgggcatttggatttccatttttagttctgatgaataatactgctaagaatgtgcatgctataaagttcttgtgtagacatatgtttttatttctcttatgtgtataccttagaaaccattgctaatccaaggtcatgaaaattcacccttatattttcttcttctagttttgtagttttagctcttacatttaggtctttgatccattttaacgtaatttttgtgtgtgatgtgaggcagggatgtagctttgttcttttacatatggacattcagttgttccggcatcatttgttggaaagactattttttcccattgaattattttatcacttatattgaatatcagtgtaactatgagggcttatttctggaccttattttattccattgatctatacatttatccttatgccagtaccactttgtcttgattactgtagctttatagtaagttttgaaattgggaagtgtaagtagtcttctttccttcttgcttttaaagactattttggttgttctttgctcctcgaattttcatatgaaattttaggatcagcttgtcagttcctgcaaggagccacctaagattttgatagggattgtgctgaatctctagatagattttgagagtattcccatcttaatgttagttaagtcttctgatctctgaacatggggtgtccctctatagatacagatcctttttaatttctctcagtgatgttttgtagttttcagagtctaaatttggcacttttttgttaaatttatttctaagtattaatgtcttaacttctattgtaaatagaattgttttattttataatatttttgggtttcttattgcaagtgaatacagttgatttttgtatatttttgattttgaatctacatccttgctgaacttactaattctcatagttcttagtggattccttgggattttctaaatacaggatatagcaagatagcccatatatagaagggtatagcaggatatcccatatatttacgaatcccaaagaatccactaaaaactacaagaattagtaggatatttcacctgaaaatggaaatagttttacttcatttttcctatttggatacctctatttctttttcttacctaattgccttggctagaatgtctaacaatgttgagtagaaatggcaagagtggatgtcccaattttgttcctgatcttgggggaaagcattcagtcattcaccattaaatatgatgttagctgtgcgtttttcatgggtgctctatcagattcagtaagtttttttccatacctagtttgttgaacttttttgttgttgtggttagtgtttttgtcacgaaatggtattggatattgtcagatgcttttccattttgatgatgatttggtttttgtcttttgttctgttggtatgctgtatcacacaaattgatttttgtatgttaaaccaaccttgtgttcatgaaataaatcccacttctttggtgtgtatactctttttttatatgtttctggatttggtttgctagcattttcttgaggatttttatgtctaattgatattggtctgtagttttcttacaatgtttgtctggttttgatattggtaatactggcctcatcgaatgagttaggaagtgttctctcctcttctgtttttggaagagtttgtcaagaatttgtattaattcctctttaagaatttggttgaattcaccagtgaagccatctgggcctgggcttttctttgtgagttgttgttgttgggtttttttaaatgcttactttttaaaatggtcctacctccttgtggtctgtgtgtcccagagtaactgttcttagcaggaggatttcattacccaattgagtttactactaagatgtttttgagcaactcttaactacctttttggtttgtctgtttgtttgactgataaagacaaggtcttgctattttgttggcaggctggtctggaactcttggcatcaggccatcctctgaccttggcctcccaaagtgctgggagattaaaggcatgagccaccacgcccagccccacttcactacctttttggatgtacatggggcatatgtagcttattgaaaaaagcagaatcattcaacaattttgtaattttatctgaaggtataagtattttcacagtgtaagtattaaacatgaattttgttgtttggagtagtttgttcattgcttggatgtttacccagaatattagtttgggatgttaatattattttcatgaggacttaatttatatagagtagctatggtctataatttaattcaattacatagttaaaagtctaggctcactataattttcacatagacaaattaggcaccgttgtattcagattaagctattagttattttatatattttagaaactagttttttcatactagttatccaattactaaaataatgatcgtgaagaccatttatgaattgcatttgagcaaaacatttaagatttaaaacaaccctttcatatattaaaatatcttttaaagtatttacaacagatacaaactggtgattccatctagaatacgtttttaatagttagagaaatctaaaaggatcctgtagcttagtgaatacattcacattcaatcaggtagaaaccaattttaaacaatgtatttagttctggttctcaaaatatagaattattttccagagaagagatacttaacatcactatgtaaagataagtggtggcagctattctgtacttttaaaactctgtgtgtgtatatatggtaaaagcaacttgatgtcatcttgtgtgattgtgttaacagaatattataaaaatctacctttagatttagccaattaagtaatcaaatcatgaattaataggaaaaacatccaattgcttctttaaaatatatagactcttctaaaatgaggttgaatttattgtgtggaatataaatgcagaacatacagaaagctttattagattgatttttttctgtctttttattaaaaattcattgtagttgaaatgatcttgtagaaaaatacaggacctgggatttagagattccttgtgatgtcactaactagtgtcgttgagcaagtcagggctctctgtcacttgattttcttatctctaaaataataataccgacttgtctacctcagaatatatctaaaaggcatgagattaatgcagtgtgttattattcctgttactattaacagtaataaataccatctgccataactggaatcattctccagttctctgctttgtcacacaagtcttccatgccacctgagaatgagtgctggggagaatcatctgaaacactgttgggtacattgatttatcactgattgactatacgggaggttgcttttgtctcctgtaggttgatattgtctcacctagcttggtatctaaaaagcccatatggaagtgagtgttaaccgttttccttgacaccagtgacataattctgctgtgctagactttgctgcaagtgattgatcggcttcgctgactcttgtggcattttattaaatatagcggaccccttttggtatcgcattttattaaatatagcgggccccttttggtatcgcattttattaaatatagcgggccccttttggtatcgcattttattaaatatagcgggccccttttggtatcgcattttattaaatatagcgggccccttttggtatcgcattttattaaatatagcgggccccttttggtatcgcattttattaaatatagcgggccccttttggtatcgcattttattaaatatagcgggccccttttggtatcgcattttattaaatatagcgggccccttttggtatcgcattttattaaatatagcgggccccttttggtatcgcattttattaaatatagcgggccccttttggtatcgcattttattaaatatagcgggccccttttggtatcgcattttattaaatatagcgggccccttttggtatcgcattttattaaatatagcgggccccttttggtatcgcattttattaaatatagcgggccccttttggtatcgcattttattaaatatagcgggccccttttggtatcgcattttattaaatatagcgggccccttttggtatcgcattttattaaatatagcgggccccttttggtatcgcattttattaaatatagcgggccccttttggtatcgcattttattaaatatagcgggccccttttggtatcgcattttattaaatatagcgggccccttttggtatcgcattttattaaatatagcgggccccttttggtatcgcattttattaaatatagcgggccccttttggtatcgcattttattaaatatagcgggccccttttggtatcgcattttattaaatatagcgggccccttttggtatcgcattttattaaatatagcgggccccttttggtatcgcattttattaaatatagcgggccccttttggtatcgcattttattaaatatagcgggccccttttggtattgcattttattaaatatagcggaccccttttggtattgcattttattaaatatagcggaccccctccacctttgtggcacctgagtagatgtaaaagcaaaagaggacagacagtgacaaccgttaccaaagaattaaaattatatactcatatggttttctgttttcatttatgttttttaaactattgtttttataagtggctcagcagtatatatcaactgaaagaaacactatggctgatgagtcagcatttccatgctgcaacaatgggttattcctgaaaacaaaaataatttatccaaaatcaagaaaatattttaagcttcctttgcaattgctgttacatatttagaagttataatggttttaaaatgtttggcttttaatatattaattaagactaggtgcagtagcttttctctaattatttagtttgatcaggaagttagatattccacaaaagtgaattttccagataagggaaacctatttttaagtgttatttgtaatgaaaactactaccacatactaaaaaccttctatgttatgtgtgaagtgccatcttggagccggatgtacattgccacattttatctttgtaaaaaccttatgggataggtatcttttttttttttttttttaacaatactaaggctgtacactgttctttctactctttcagattaattttttaggtaacattttctaaaataaatttcagtctccccaaccttatttagtaggatatagtgagtataatttaaccttacagtgctttagtattttcctttttagtatgtttgttagcccctgactgtggcttgtagagcacaactgtccctgtggtgaatggctcagctatgctgtattactgattcttgtcatctcccttgctgtcaggatgtcttatgtctacgtgtctgcctctagccaccctcacctgtcttccaaccttctggcataactaaactcgttaagtgtgtgaattaaaactaaaagccattggactctgaatgaggccctacgtgcccctcctagtaagtaaaattcatgaatttatgtcagctattgcagttctttataggtctttttcattgatttccagttttacaactttacttcagagggttaagtttgaatagaaatctggccttgctgaatacagcatatataatttatgtgtgaaaattacacctagctaatgtaatatactagtgcttccttaataaggtttattaaagagtacaatgtgagttggtaaaaaggaataagatggataaaattttttaataaaaataattctgcttgtcactagtggtacttattttaaagttttatcacttagaagatttatcattattaaggctacaggattctatatatttcagaatttttttttccagaattagctcaaattggtgctcgacctttttattaagtttacaagaaaaatattatcttattggtgaaaaagtaaagtattataactaaaaaggaattagtaattggcaggtatagaatctcttcatttcaaagtagtttgatttttgcccagtttcttaaattatattgaaacaaaataaactacctattgttcttacccactgaaccatgatggtgctactgataacctttagaagatctaacaggaggaaaaacgggtagcctctaacaaaattagtagtgtatatggtgttatgctgaaagtactttaaatgcaggctaaatatttagcaaatagaccttaatgctgttatcctcaactcctgtttcatcagtctttcacaggttactgccaaatgttgatcagtgtgtaaaaatttttttttggctgttaacagtatacataactgttaggaggaatctgtcagttggaaccttgagctgagtgagtcttgttgtttagtgtaaagaaaatttggtgtgtatggaaactgaagaactaagcccatgagtgtgtaacagaggcagcagaaacagttttccttattgaccccaagactaaagaacagctaggtgaggagtgcagcaagtgccaatggaactttatagaccttgtaacatctccttgtgctagagcagacgtggggtaacaatgattgctaacctgtttagtgaagtttcttaatcctgtcatgtgtaccatcaaaaattcttttactcaaaatcatactgtaaacaccaaaaagttgaggaccactgatatttgcattttccttttccattgaagcatgtagttgttataaagtttagttgggagacctttctgttatattgaatattatgaatacagacttgcacttgcgtttactaatgtctttatttgggaattaaaagttaagttctacattactatagaatttcaggaaaaaagccagcaaattgatatatagcactcctgaagtctaccaattactttttaattggtattatagacctcattctgaaaccagaatgttttattctcctaagtgtgaatatgctgtatgaagtttctctaattgatttgctgtgcccattccatttgatgtatcatttttcacaatatttcataatttgtgctcacttctaatgaacagagtcgttaggacaggcatgtctaagtacaactgacagctaacattaggtgccagatgcagtttatagagctatgtagaactgtagagaacagtttaaataaattagcacctgtacattagtctcacttgctggtaatttataagcgaatcagtagagatgacatttaggtaagtcattgatcaagttaacagctgcaaacccactgcccagctgggatgcctaattaatagagattgcattcctgacccagtgcttctgggttgagtctgcaattctttcatactttgatttaagtctaagaacatactcaaatactttgccttcattttagggaactgttgaatatcagtattctagttaaaacctaaaaatggaagaaacatgtttactaatgaggattaccttactccatttcttatttggattaaatttttaaaatttgcattcttactttttctttcttttctctcagcactttttgttttggattcacattaagtatagatgacatgctgtagtttaatgagtttcttttttttttttttcgagacagagtctctctctgttgcccaggcaacagatcgtgcagtggcacgatcttggctcactgcaacctccgcctcccaggttcaagcaattctcctgcctcagcctcctgagtagctgggattacaggtgcccaccaccatgctcagctaatttttgtatttttagtagagacagggtttcaccatgttggtcaggctggtctcgaacccctgaccttgtgatccacccacctcggcctcccaaagtgctgggattacaggcgtgagccactgcgcccggcagtttaatgagtttctaaagagttctgtacttactaaatatatgctccattttttcttttggaaaaagcatggttttttgcttttgttctgtggggtttttttttttttttggtgaccaaccaaccattgaacctaaattatatgtgtaacaatttcttaaagtgtaacgttagtttgaaacacctaacaactttgccaagttaaatttcataccaattttagaattgaatatgggaaattttaagctaccacttattttgggaaaatgccttttgttttctattcctgtggcagattttcttctgagtgaatttaaaactgaaagattaggacatcggcaaccttaaagagtaaggtgatgatttttgtatgtagttgagctgtatggacgtggatggtgaggatgtttgaatactaatgtgtttactagaggcaccaccaaaatctggttcttagactgggaaaaaggtatcttgaaacactaatgctaaaccaaatacaaacccaaatacctggctagcaggattgttttgaagcttatggaaaaaccattaactgagtcccaattgatacatatgttttcattttttgttttttttgttttttttttgtggaagggttgggtatttcttagtttaaataataatttttcatgaaggttggtttaggagtgaaaaggtgtttatttcagataattatgaaatttctgttaattctgtcatggttggtaaacttgtcccagtgggccaaaccacaatttggatgtgaaatgccaattttcctttaattgtaagatgcttgggggcccaaaccacttgctggcactttttttctagtgcctagtaagtgccacacacgttctggggccaatgaacactgacagtgaacagataggttaacattaacagagagtcttttcctcaccaccttcccccagtgattttctggttgacctaattttacctttcataatatttaaattttgcattatttttcatgctaatatagatgtttctgaatcacataacaggaaaactgctaaaaaaaaaaaaaaaaaaaaaagaccctgaagtattctaacattttatttgccttcatggttctcattttcttttcttatatttctgagccttccccaaccacatctttgccctaatctaaaattttttgtgaagtagccctattaccccaaccatttttgttacttattctttgtaattatcttatttgaaataccctccttagtgttaattttatattaagcttaatgctttatgttggattgggaaattacaattgtgtgtttttgtttttatttttttgagacagagtcttgctctgttgcccaggctggagtgtagtggtgcaatctcagctcactgcagcctccgcctcctgggttccagtggttctcctgcctcagcctcccaagtatctgagattacacgtggcgccaccgcgcctgactaatttttatgtctttagtagagacggggttttaccatgttggtgaggctggtcttgaacacttgacctcaagtgatctgcccaccttggcctcccaaagtgctgggattataggcatgagccactgcacctggccgctattgtgtgttttggaaaaccccaaggactcaggagatcagctcatggaagactttatcttcaatgaagtgttttctcaatatgaggcaaaggcttttgagtttgaggagtaagaacaaagttgtctaccatttgcaatgagaacttgggaaagtctcttgaggcattggcatttgagagaaatagatagaggaagccaaagagcaaattactgggggtaagagtaaagatgaaaagttaaatatcgtgccgggtgcggtggctcacgcctgtaatcccagcactttgggaggccgaggcgggcagatcacgaggtcaggagatcgagaccatcctggctaacaccgtgaaaccctgtctctactaaaaatacaaaaaattagccgggcatggtggtgagtgcctgtagtcccagctactcaggacttgaggcaggagaatggcgtgaacccgggaggtggaacttgcagtgagccgagatcgcatcactgcactccagcctgggcgacagagcaggactctgtctcaaaaaaaaaaaaaaaaaaaaaaaaaaagttaaatattgtattggaagggcttgagcaaatgcctttctactgaaataaacctcaagttacaatgccctaacagaccagcttacaggcagtcaaaactaaaacagtcggatgtgtggcactgagctggttttgcgtagcctggctttgaattaggtctgcataatcgtggtcaaagaagttgaaatcttaacattgggccttgtggggtgggaaggcaatctgagaggaagaaagctggaaagctgttgtgctccctgagtgggccttgctgctgctacaggggtagtatggggtgagcttcctcatacctgcggcagagactccagtgacaagagacagcagtaacttcagcaagacagtgctagtaagattatgcctggcgctgaaatgcagactgcggcagatgcattttgatgtttttctgacacacagaatttccaatagtgcatcactacccgcagcaggtttagagagaaaggtgatagtgccccattcctccccaccatccctgcttttataatggtgatggggaagagttattccagaactggactgaaagttgcactgcctggggggaggagcattggggacagtattccctggagggcatgttgcaagtaagatactgttcgtatgggtgcttagagaggacattattccttcaggtggaccctcctagaacgtaagatggaggtctgtgcttgtcattttgctttgttggtttttcttgcttatgctttgttctaggagaaagaaactgcaaaaacaagcagaaaaggttttcagtatttgtcacaacttgatatttatatgtttttctttctagtagcaagttaaaattaactatgattcaaatgaacaacaaaggatagggggaaaactggagctgatccagtaaggacctctgaatgaatacagactacaagaagtctgattgggaaagtgaaggcttttgtaatattactctcatttttactccatatacacacttctgttacacacacacacacactctctctgtctgtctttctctcttacattttcctactccttcttgtttgtaaatatttccacccacatacccaactttgaagtccaggctgaatgaaatagggtatctaaacccagttctcttacctttactctttaagatagtaaagttaggctatcatgcttagtagcagagggcctctgtagtgttaagagatgtcaggaaacgcagccttacagatggttgtcttgatactgagttacccgtccaagccctcaaggaatcgagtcatagatctaagtactgaaacactgcttccagccttttcacttcacaggagataaagttaggaatggccgttattaccagctttgtcgtagaaatcctctatttggagactacttggttgttaatattctgtcttgtaacaatagatatgtgtttgttaatttagaccaataacattacattacagactttaaccttgtaaccatttaatgaagtttaaaaaaccttgctgaaatacacctcagtaacattagtacagtgctgagttgcatgattaaaattaattggcagtaaataaaatggaattgatagtaaataaaatgaaaatttacttcctcggttgcaccaagcacatgtcagtgagcgtagtagccacataggctactggctgtcattttgaacagcacagattatatagagtatttccattatcagaggaagttctactggacatgttaggattgcgcccttcatttcttcccaagtaagaatttataatttttgctttgcgttacttacaagaaagataatacttggaagtataagtaatatttgtttgcagtttgtattttgtctttcattgaaacaattaaaaacacctgaagaattggcttcaaaaacagttcaaaaatactacaaaagagaaaatagaaatttagaagtatagaacatggttgcttcttttatctgaataaaacagcaatgggcaaggtgccgtggcacatgctgtagtctcagctccttgggcgtctgaggcaggaggatttcttgagcccaggagtcaaggctgtagtgcgccatgatcacatctgtgaatagccactgctctcctgggcaacatagtaagacccagtctctaaaaaacaaacaaaaatttattaaaacaatcacaaattatagaagaacaaaaggttatatgacttttatgtgtatatacatatgtatttatgtattaacatgtatgttgcatggatgttggaaccagaattgagaaatatcaaaacactctaatctaatagcaacagcagtaaatactaatttgtgtactttttcttatgaaaactttcattcatacagaaaaagagaatgtctgtcacctggattaacttcttaacattttgctatatttgcttcaactgtatgttttttggctgcactattttattttaaagtaaaatacaattgcaaacatcatgatgcttcactcttaaatacatcttcaaaaaattaggacatctgcttatataaccgcaatatcactatcacatctaagaaaattaatctgaatatagtctatagcaggaggtagaaaattttatctatgagtttgtatttacatttccctagttgtctatagaagagttcttatagttggttctctcaagggctctgcaatccatttggttgttgatttattctttgagtatctgctgtgttctaattctgaagtgagaaattattgactaagacaaggtcctttgccttcaaaaacacacctgcagacacgaccgaggtaaaatcaaagatttggcaacagcacataggagaaagaagaactggtagaaagcaaaataagttatttgaggaacagttttggatgtgctgtttggatacataaagggaaaaatccctaaagcaattgacaaatagtttagaactacggaaatagatttggtctctctccctacagaaatttgctagaaaggaagagaatcaaagatggaactctgaggaagcagcacttaagggatgagcagaggtgtgtttaggagagatcaagaggaaactttcagagaggtaggaggggaatgtggctgcaagaaggaagggagacagcggtctcatatggatgagacccgaaagtaggtcacagggtttggaaaaagccctcagtgacccttgacaaagtaattacaggaccagaattatggctaggccagattgaaatctggggaagaaagcagtgggtacttcagggagtgggtggatgcttctcaggacaggaatgtgagtgagaattgagttgtttatgggcctagatgccaccaggagcacagtcttgtttagatggatgcttcacatgatccttgaggttgctcacaaatgtggcatcattggtatggaaaagagaaaggtgggcctcacccctttgtgagtgctgtgagcgatgtggaagctgaaggcagtgacaaggatggggagggaacggaatggccagatggtgtggaccttgaaagaggctcgttctctgtttgactaaggtggcactaagagaagtaatggagagcccagtggaatagggaggacttccagacaaggctgcatttggtctacaatcttgaaagatcttgaaagacaaacagcaatgtgttaagtggagaagtagaacaacagtattccaggcagacaaaacaatttgcaaaggcatttgtttagaaaggaagaaatgactggtaaaaagagaaagatgcaaagtatcactgaaaagagtagatgaccactctcctttgtaccctctgtgtaacctgtaagtatttctatcataggtcctgtgtatattattttttcatgccgttttatgtgtactattacagcagcccctatatttgagactatgtatacatctgtctccactgatagaatgaggtcaggagccatatcttaatttttatctttctaaactagcagagtgcctagaactcaggtgggataaatatttgttgagtaaaatgtatttaggtaaataatctatttctttctctttaagcacatttggctttttctcctaattttactactaaatagctggatatccttgatgtcagtgaagaagtgaatctgttatctgagagaagattggttccctggtgtggacaaaggagagtacattatgaaattaaatttcagaaggttcaggttctggctttgccatttacttcagtgtaagctacttaactgctgcttcttggtctgtaaaatggagctcatgaatgcatgctattttatgtgaaataatgtgctttacaaaactgaatatttttgtatagttaattaatatttagtgaatgactactagttgtatttttataaatacctttttaaattctcacaacaactagataaaattgatatccttgcacatcagaatcactgggagtggtagtatttgaaaagtcttcttatggttataataagacacagtgaggattatgttattatttacactttcaccatgttttcgtgttcactgcttcctttcttttgaactctgcaatgtttagtggaagtaaagattttcctgttttatagcacataatggtctgcccaaaacatatctgtaggctgttcaactcagtactaacactcaagattctcttgttatatgtatttgttgtttatctcaaaaggatattcatctacttgtgttttaacaactgtgtggtaactgaaagttaagcagacacagaaagcaacataattttttttcatagccaggtagtcctttgtttgcttcagaatttgtaaaagaaaagaaaaagaaagaaaaagaaaaaaatctgcatagaatgcccataggagataaatggaagtaataggttaggtcctgttagtactattccatgcatactaaacagatggcagacagcgtgccaggaatgtgccttttctgttttgtatgttttgttatttggttttaaaacaactggcttattttatttcctattccctcttttgttcatttttctttcatcttttgtttttcattgttttcactgaatttgcaatagtgctttttatctgacatggtatcttttgctctgtggaccttttccacagtatttggtacaatacttagtatagtgagggattataaattaataagtgtgtattaatttacttttagctgagaaaaatttttaaaggcaaagacacattttctgatactttcagaagacttctagcgaattctttgttggcttgtttttgtctttttaaaagagatattgcctgtaagccccagacatcctttgcaatcaatgctttcttttcagtttccaccaattagcttcctcatgacttttctgtcttagtcttcatgacagatccaactgtaggttggaattcttcaattttcatttccgtctaggattctattcattggtcacctaaattaacagtaattttcatatttggaaatgttgccgatgacagcttgaaactcagttgaattgtctcctttgtggttgcagtgtgttcaccctaagttgaagaattatgcttagtcttccacgccatctagtattctgatccaggccctggcttcagtggtccctttgctaagatgccaaccagccttgggctgccctgtatgactgagaacgaggcctgaggtctagatggcccacaagtgctgtaggctagtgttggctttgctgagacaggttgtgtttgggaaaatcttatttatttttaaatttttaacatttgtcccacctttttattttgaaacttttcaaatttccagaaaagttgaatattcattgaataaatataaacgcatacccccatcacctagatttgccagattttcacattttgccacattttctttatcgctttgtatatgtaaaacattttttattgatccactgaaaactgcacattataaacttaacccccaaatacatcagtatgtacttaacccctaaatgcttgcattcttcatactgttatctcccacaatatcattatcacatctgatacaattataataattctatatgccatatatataatcttcgtgaaaatttcctcagttttccccagaatgtctttgtagctgactaattgttttgtagaatccaggccacttgtcttgtacagttgtgtcacattctggctttctgcttgctttctcgtgatcagacttagaatgtataaaggatactgcttaggtgatattgtatacttctcgttacatccacgaagtctgagaggtacatagtcagtttgtcctgctgttgatgatgatgtgactgatcccttggttacagtgatgaccactagacctctttattgtaaaagtagccttttccctttgtaaccagtctatagggtaatattctgagttcatgcgaattttccattctttagtaacctttcagccagtggctttagcatttgttggtgatccttgcctgaaattgatggttaatttggaagttgtaaaatggtgattttctacttctgtcactccttttacttttataacatattgttctgtaaagtagctttctttttcttcttgccccttctcctgagtgtgtgtgtgtgtgtatgtgtacatgtgtgcgtgtgcatgcacatgaatgtgcatgtcacatattgagtgtgttgtgaagcattatcattattcttttattttcagagacagggtcttgctccatcaaccaggctatagtgtagtgatgctgtcatagctcactgcagacttgaactcttgggctcaagcaatcctctcactttagcttcctgagtagctgggactacagtcatgtgccaccacacttcttaaaaattttttttgtagagatgggatctcagtatctctaaaaagagatagtgagaatgtctcagactcattttgtgctttgtctgccttacacctagaatcagccatttctccaaggtacttggttccttatactgggatgtatgtagaaaccagttgaccctcccattgctcctaaagttccattcctttatgctttttcagggaacagaactaggaaataatattttttgaatattacaggaaatagtttttaagataatagtttatattacttaacattatagggttttcccttgtacatttatatctcttctataataaaatatcagtctccataaaattaatatatttacttatttgctttatgctgcagtgtacataaaatatttcagaattatagtatcagtgttatgactgactataagcctaccaagtaaagatgaagatttctttgcaattattttgttgttgttatttgtttctggttatatttttagagtttctttgtaaatattattctttaatacataaaacatttacatgcttcagggcttaactatacaagggaggcccagaggagtttgcccttatccctatgcccctccctctactctcacccaacccttgagaaatcatttttattggtttctacttaacatttttgtgttttatgtttgcaaaaagaagcttatgtgtattttccccctgtatttatacgtcttttctttttctgtttcttacaccaaagcagcattctaggtacatttcttttgtatcttggcttttctgtctgttttacagctctatagtacttgattgcacagatgtgccctcatttattcagccagcctcttatgcatggggatttggttgttttcagtattttgttctcataaatcagtgaataacacgtgcttatgttcttttgtattcataggggtgtatcttctgggtaaattcattgagtcagattgctagggaaatatatatgtaatgttgttagaaagctcccaccttcccgctgaagaggttatagcacttggcattcccaccagcaaggtggcagggtgtttttttatagcctcgccaacagtgtgctgtcagacttttgaacttttgctagtcctattagataaaatgtgttctctcagtagttttaattgcacttatcttattatgagccatatacttcttttacaaatatagtttaattggtcaatcttttttttttttttttttgagacagagtctcgccctgtcacccaggctggcgtgcaatggcgcgatctcagctcactgcaacctccgccttccaggttcaaacgattctcctgcctcagcctcccaagtagctgggattacaggcgcccgccaccatgcccagctaatttttgtatttttagtagatacggggtttcaccacgttggccagtctggtctcgaactcctgacctcgtgatccacccacctcagcctctcaaagtgctgggatgacaggcgtgagccaccaggcccagcctgtcaatcttttttaaaaagttacttataaattttgagtcatagttatgaaagacttttccattgcttagttataaaggaattcactcatgtcatatgtgagtatttgtttttattttgtatgtttagccctctcactcatttggagtttactctgctgtatatgatgtgaggtttggattttggttgtatctttttccaaatggcaatcagttgcagtatcatttattaaggctcatgtgtgtaatcccaatactggtaggccaaggcaagaagatcatttgagctcaggagttcaagaccagcctgagcaacatagtgagaccctcatctctacaaaaaaaaaaaaaaattacctgggtgtgatggtgcaagcctctagccccagctactcctgaggctgaggtgggaggattgcatgagcctgggaggtcaaggctgcagtgagcatgattgtgtcactgcactccagcctcagcgacagagtgaggttctgatctaataaaagaaaaagtctaccttttttccctgcagcaaaggaagggggtaggtggggagggacctggttaaaacaaaaaagagtttgctaaaggggcacactgatgtttgatctaagttttttatttgtttgtttattttgcactccagcctgcgtgacaaagcatgttgcccaggctggtttataacacctggcctcatcctcccacatcagcctcccacagtactgggattaccagcatgagccaccgtgcctgacctaggttttttgttttgttttaagtgtaattttgttctgaaaaaagttgaataagagaatgaagcttgatccagagacacaattaggctccctaatatgactgaatttatacccccaaattatagacctctccttttggtggcagagtctgatccagcacatttactatgcgggtaggcagagaaggcccactcagaacaggctctctaaatgagcagaagtgtatttaaatgcactactggatcccaggccatagactcttcatcggcactgttcaacaagaaggaaagtgtacattttgttgttgtgaggcggggcattggagaagacactataaaaggcttaagctattgttctcagctgggaggcagtgctgctccctaggacgtaggggcatttggaaaggtgtgggggtgagatttgtcatgagcactggttattactgatgccgactggaaaaaagccaggaatactaaatgacctgcagtatggaaaaagg

SEQ ID NO: 254 - DNA, 32742 bp, Homo sapiens
  source 1..32742: mol_type = other DNA
cactgcggccgcgtagcgccgcgggtttgatgaacgcggttcccggggagactggtacggttgctgtgtgctatggagccgagggtcgtcaagccaccggggcaggatttagtagtggagagtctcaaaagccgctacggactcgggggcagctgccccgacgaggtgaagccgccgcctgaggtccgcgggtgggctcctgctgctggggggcggcccgctccgtgccccgcgcagccggcctgggggcgcgcagcggctctggtcccggccccggcactcccgccgtggctgcggcttgggcctcgtggaagcaggcgggaggggcgggcgttgcgctgcgggggtgcgggggtgccgcttcacctatgcctctgtgttcctggtatactgggcatggtgtggtgttggagaaagtgctattcagcttttttttgcagtgatgtgagtggagttgtgaaaacaattgaattgctttttaaaagcggcttatttcgaaataatttcggacttactcaaaagttgctgcagtattaccaagaattcccttgtaccctcacttgcattcacaaattaatattttgccacattggctttaccattcgttctctccccttccctccctacaaacgcattttttccctttgaactatttgagggtgatttgcaggcatcatgcccctttacctctgaatagaaataacttgtgcatttttcctaagcataaggacgttgtcttttaataaccacagtaatattttcaggaaatttagaattggtataatatttggtaatctagagttcataagaaatttcagcaattatctcgataaaaccttttataggaaaattttttcctagtgcagatccgacccaagaacgagcattgattgtatttgattgtcctttttgttgcctttaatctggaacaggttcacagcctttgttttctgtaaggttgttttttttttgagaagtgtaagaattatttattggattgtttctccgtttgggtttatcttatagatgcttcttcgttagattgattatgcatttttggcaggagcatgagatgagtgatgtgtggcctgctgtggggaggaacatgacgttggtttgtcacattattgatgatattagttttgatcacttggttaagatggtgtctacaagatttctccactctaacctttgtaattaatacataatttgtggggaaatattttgagacagtaaattgatttttagtatacaaattaaatcttttctttttttttttagtatgatttttcaaatttttatcagtctaagtataagagaagaactctaacctccccaggtaagccggtattttgtatatttgggggtttcaaaaatttaatttgaggctgggcgcggtggctcacgcctgtaatcccagcactttgggaggccgaggcaggcgaatcacctgaggtcaggagttcgagaccactcaggccaacatagtgaaatcccgtctctactaaagatacaaaaaattagccgagcatggtggcgggcgcctgtaatcccaactgctgggaaggctgaggcaggagaatcggttgaacccgggaggcagaggttgcagtgagccgagatggcgccactacactccagcctgggcaacaagagcgaaactcagtctcaaaaaagaaaaaaataggctgcgcgcggtggctcacgcctgtaatcccagcactttgggaggcgaggcgggcggatcacgaggtcaggagatggagaccatcctagctaacacggtgaaaccccgtctctactaaaaaaaatacaaaaaattagccgggtgtggtggcgggctcctgtagtcccggctactcaggaggctgaggcaggagaatggggtgaacccgggagacggagcttgcagtgagccgagattgcgccactgcactccagcctgggtgacagagcgagactccgtctcaaagaaaaaaaaagaaaaaaaaatttgagagagaagattttaaaaatagtattatttagacttatggccagtgccagatattttgtgatatattgttgtggtaatctttcatggtttctttgtcgttgacaggtgatttggatatctactctggagataaagttggttcatcgttaaaatattctgatgaaagcaagcattgtagaacaccattgggcagcttattcaagcacgtaaatgtgaattggtaaagtaccctgaaactttactgttgctaccccctcagtatctcaaaaaactgagaaagagaaaagggcaggttatatttttgctctttcctgaggacaagtatgaggacaagtataaggcagtctggagcctgctaaatagttgaagcgagtcacttattaatttttactgagaatctctgtaataaaagcatagacctagcattatatttagtggcataatggaaagttatttatataatgtaaaagatgaaaaaatatatttttatggttattcattcaggacccaaatgaagactctgctccctttctttaaaaatttttttttagaaaaggaactatgggccaggtgcggtggctcacgcctgtaatcccagcactttgggaggccgaggcgggtggatcacctgaggtcaggagtttgagaccatcctggccaacatggtgaaatcccgtttctactaaaaaatagaaaaattagccaggcttggtggtgtgcgtctggaatctcagcgacttgagaggcagaggcaggagaatcacttgaacccgggaggtggaggttgcagtgagctaagattgtgccattgcactccagcctgggtgatgagcaaaactgtcctgaagaaagaaaaaacgaactacaaaaaaaactgccatacaggttttgttaggcagcagcattttactatctctggtgtgtctggtattgtatgcattgtatttaggtgattgagagagattgaagaaggtggtctggggagatggtaactacagggtatgtaggatacagtgctgggttaaaagaagttgccgttctgtaaggaagatactatttactatggggaaaaaatataaaaacagtggaagctaaggtaaaataaagatctaagttggatattatttaatgctaaaaatatgtggcagaaagaaatgctatgggtatcaagaaggagtaagcattttgaaataaagatgtatccatatataacatgaaatgttgaaataattgtggagagaaaaaataattatgcctaaagtatctgtatgttacataattagtatttgggagcttgactttttttaatacagttttctctttctctacttaaataagttaatctgtgtaacacactttgaacagttctgggtaaataataagtactcaaatgttacctattatcattattattactatttcatgttgcactcacaaaatctagttgatctagatttaggatttagacatgagctacgttgaatgtagggtaaggaaagtgaaaattgcttttaaggtaataattataaatttatggaaattattttctttttaactgagttttatcattttttatataatgacctgggtataactctaaactataatctaaaggttttggactatgaaggttttcataacattggacccctagttgtgatctggtctgaaactatgctgtccagcacagtagcaacaggccacatgtacctattgagtacttgaaatggggctggtctgaattgagatatgctgtaagtgtcatatacacactggctttctaagacttagcatagataacaaaaattagccgggcatggtggcgggtgcctgtagtcccagctactcgggaggctgagacaggagaattgcttggacccggaggcagaggttgcagtgagccgagatcgcgccactgcactgcaacctgggtgacagagtgagactccgtctcaaaaaataaataaataggcatggataaaataatgtaaaatatcttaattttgtgtgggtgtatgtgggtttgcagggggcgagcctgttgcccaggctgtgagtgcagtagcataattgtaactcactgtagcctccaactcctgggctcaaacgatcctctcacctcaggctcctgagtagctgggactacagacgtgcaccactactcccagctaatttattttatttatttttctttttgtagagacagagtctcactgtgttgtccaggctgatcttgaactcctgggctcaagagatactcccacttcggcctcccaaagtgctgagatcacaggcgtgagccaccatgcctgttctatcctaataatttttaacattgattacatgttgaaatgataaacttttagatatattatattaactaatatttttaaaatttatttttttaacgtgctactagaaaattttaaattacctatatgacttgtgttatattgcttttgaacaatactattccaaaaatttcaactcagattgtctttttggagacaacacctggaattctagttctgctccactttctactcgttatgtcacccatcagttatttgacttacttaggtttagtttacttatgtatattattttagctaaaactaccttatagataacagattattgggagtcaaaataaagtgttccttagctgtagaatataccacaggtaggtatatgtcattttaaattaagtctatttaatgtgtagaaaaagatgcttgtagtgggttatcaatgatcagtgactgttagtttttacgttttttctttttacatgtttacattttgcagtttaaaaaatgtttttacattttttctcagttatgctgttaatatttgaaaagcagttttatctttttaaagtgctatagtaaacttctagattgctgtgatacaattatttttttaaagcctagatgatgaactggattctttccatgatttgaagaaacaggaaacagaagaagagttaattgaaaatgattatagagttagtacctcgaaaataaccaagcagtcttttaaagaaatagaaaaaggtaaaataaatattttagaacaatcaattcagtagtaactttgtcaagtagagtaaatgaagcttccctcctagtaataacactggcccccaagagtttgcatatttctgtgttctgaacttctgtaagctaggagatagttactgtgcttattattaaactaaaggagcagagaaaattaaacttcattatttttcagtaatattcctgtaccctcaaaatttatcaaaataagttaataactgagtagatgattgtggtagtatttgactacaatattttgagaaaatactccagattatttgaagtatggatttctgggcactgaactgccagcagttttctgtgtatctggctgcatttcatagttgtggcgggatttcaaggaatgagacaaccagaaatggcacccttcaccctctgggctacaagactttgagttgccctgttgataatactggtgctggtattatggtctacacacaacaacattcattttcctcttttccctctcctttgttttcctttgtcccattattctcatcatttgaggaagatgaaaaataattctgtcgggacttgagtttcctgctatatggtcgattttcccagtggaaaacatgggataaggtataaagaaaatgttgcttgtattccattaaaagtaatggcaaaagccacaatgacttttgcaccaacctcatatttgaaagtagacaaaattaagaaatgctcgggccagggattggtgagtcgggaacctagacaggcaagtagagctctgtgaatgtgcctttcacttttagggcatttgctgaactgagtgaagtgaagcttttcattttaaaaaattcatactatgttttatttttacttctccgttgtctgttcaaaatggagtataatggaagacacacccccctccttttttaaagctggggcttccatgagtctagtgcaagttaaaaccactgagcgtcggccaggcgcggtggctcacgcctgtaatcccagcactttgggaggccgaggcgggtggatcacgaggtcaggagatcgagaccatcctggctaacacggtgaaaccctgtctctactaaaaatacaaaaaattagccaggcatggtagcacgtgcctgtagtcccagttactcgggaggctgaggcaggagaatcacttgaacccgggaagcggaggttgcagtgagctgagactgtgccactgcactccagtctgggcgacagagagactctgtctcaaaaaaaaaagcaaggccgggcacggtggctcgtgcctgtaatcccagcactttgggaggcagaggtgggcggatcacgaggtcaggagatccagaccatcctggctaacacggtgaaaccctgtctctactaaaaaaaaaaataacaaaaaaattagccgggcttggtggctggcccctgtagtcccagctgctcgggaggcggagcttacagtgagccgaggtcgcgccactgcactccagcctgggcgacagagtgagactccgtctcaaaaaacaaaacaaaacaacaacaaaaaaacactgaccgagagcattttatactctaattgttaaaagaaaataaattctgacagtatagtgctggcaaggatatcaagcaagaggaactcacctactgctgttgggagagtaaattgatacagccactttggaaaacaatttggcatcactagtaaagttgaatctgcacatataccctatgatctagcaattttgctactacttatataccctcaggaaacttttttttgttttgttttgttttttttttgagatggagtctcgctctgtcgcccaggctggagtgcagtagcgcgatctgggctcactgtaagctccgcctcccggattcacgccactctcctgcctcagcctcccgagtagctgggactacaggcacccgccatcacgcccggctaattttttttttttgtatttttagtagagacgggatttcaccgtgttagccaggatggtctcaatctcctgacctcatgatccgcccgcctcggcctcccaaagtgctgggattataggcgtgagccaccgcgccctgccaccctcaggaaactcttaaacttgtacaccagaagccacgtacgagactgtagcatctgtatagccaaatcagctcaaatttccacctataggaggatgctgtatacagtgtttgcaaaataggatatacagtgaagatttgtgaacctgtttaaaagaagaggttatagaaattatgttaatataattacatataaaatataaaaggcaaaacaagcaaggacttttaagattaagtagtggagattaaacagcaaagcaaagcagcatgtaacacttacttgcattagtggtaaatttggtttaggggagagaggggaacatgattaggggcttttaaggttgctttccatttcttggcaattagtgtctttttatatcctttaaaatattttattttgaaatcatttcagacttacagaaaagttgcaaagatagtgcaatcaattgctgtatacccttcacccaaattttcgatgttaccactttaccatatttgctatatttttctttgtctctcttgaaactttttaatgttatattttgtacttaaagcatctcttcctaaaggttactctgagaatatttgaaacaataagttaataaagtttataatgcaaatgttattttctttgcagttgccttgccaactaatacgacctcatcgagacctcggactgagtgttgtagtgatgcaggtgactctcctttgaaacctgtcagctgtccaaaatctaaagcatcagacaagcggagtttacttccacatcagatcagtcagatatatgacgaattatttcagatacatctgaaattgcaggtaagaactaaatactgaatcgagaattcagaaatatttatgttctaagaaccaagcatttacgaaatttgaatataatatatttcattttaattactttagataagtttgtcaagagaaggacggaaggggacaaactcaaattatagggactaatgaagggaaaaatacagtggctgagagaaaatagagacagtggcgtttttatttgtaggtgtgtgtttcagactgtcttgtattttatttgatttccatcccatccttacttaagtaataaaatctgataaagtatggtttttgatgtagatgctctagctttattgttttaagtacttatatataaaaagtcttcttgtcaactctcatcaaaattgaactcttaacatttgcttattatctgcctttcgggttttttgtttctaaagtgtattttttttttttttttttttttgcgatggaatcttgctgtatcacccaggctggagtgctgtggtgtgatcttggctcactgcggcctccgcctcctgggttccagtgattctcctgcctcagcctcctgagtagctgggattacaggtgcaccccatcccgcccagccaattttttgtatttttagtagagatggggtttcaccatgttggctaggctggtcttgaacttctgacctcaggtgatctgcccccacttggcctcccaaagtgctgggattacaggcgtgagccacagtgcccagcctaaagagtataatttatatattaagcatccacgagaagtagagaaggaagcagaagtgtatgtaatgcgcagtatctgtttgaaattcttcccgttggaaacacatgaaatagttaagcatttctttaaaaccagtatttcgttttgtcaaagtaattcagattgtaattaccatagcattttagaaaaagattattttagcctaaaatcaccaggaaaagtttagggagagacttaatctggtctttgactgagaaagataatagtggaaagggcattccaggtgtaaggaattggaaatgagaggtgttctgaaaagcagtgattgtccaattgtgcatttattagcctgtctggaagaaagaaaataatgaaaactcaggctgggtattttacaagtttttaagcaaaggaatgtcagagtaaaaagtcaggttttaggaagattcctttgataacactttataggataaaaaagaataggcaagattgcaaggatgtatctatcatttgtagcaaacaaagatgtttaataagaaaaaaatgaagtgcaatggattaactggtttaatcagtctatagtttatttttatttatttatttatttttttgagacggagtctcactctgtgcccaggctggagtgcagtggcgcaatctcggctcactgcaagctccgcctcctgggttcatgccattctcctgcctcagcctcccgagtagctgggactacaggcacctgccaccgcgcccggctaattttttttttttgtatttttagtagagatggggtttcactgtgttagccaggatggtctcgatctcctgacctcgtgatccgcccgcctctgcctcccaaagtgctgggattacaggcgtgagccaccgcgcctggccaaatcagtctatagtttaatctgactttaaaatttactttgtaagtacagccactgtggaaaacactttggaggttccttaaactataagtagaactaccgtatgatccagcaatcccactcctgggtatatccccgaaaaaagaaaacggcgtatcgaagagatacctgcactcccttgttcattgcagctctgttcataataaccgaaatatggagtcagtctcagtgtccattggcagataaagaaaatgtggtatctatacacaatggaatattattcagccataaaaagaatgaaatcttatcattgacagcagcatagatagaattggaggtcattatattaagagaaataagccaggcacagaaggacagacattgcatgttctcactcgtgtggggtgggaactaaagaagtgggtctcatagaaatagagatggaatggtggttaccagaggctgggaggggaagggtagcaggggtgaagagaggttagttaatgggtacaaaaatacagttagataggagtaagtttcagtatttactagtacaatagggaaattatagttaatgataatttattgtatattttaaagtggctagagaagaattgtaatgttctcaacacaaagaaagaataaatgtttgaggtaatagatatccccatcaccttggtgaggatgttaagtaggctgtttggacttgactttggagcctgtgagaaagatctgagcagttgtaggttgggaacaattagcatatacttggtaattttagccattgagtggatataattaagcagaaagggtataaggaatgagaaggaaaattgctccagcccaaatcataaggaatattagtaattaagtgacagtagaggaagcagagcctataaaggagcctgagaagccatggccagagagagttggtggaaaactaggagaatggtgtcatggaaaccaatgaaggagagcattttaagttggaggaaagagacggcagtataaaatgctattgagagaatcaataaaataaggactgaaaagtgacctttagatttagtaataggtaagtcatttcaatagaggaatatgggctgaagccagtcttaagtgagttgaggagtgattctgaaatgagagacctcagcaaatgtagatggttgtaaaggggaggaggtgagtgggtggggccaagagagattttagttcagatggggtgggagagattcaaaataatagagggataatcagcagagcagtcttcacaggatggcttaaggcaatatgatcctgagcctgcctttttaatgagggaaggagaagcatgtatatatgtattttatgagaaagagattgatgttttcttatgctgtcttctgttttttccctgtgaagttagagaccaggctattcacaaagagtggaatataggacatgatgtattccaaattagtagaatggagaaggctcaaaatagacactttggagaatgagggagagagagttggctgtgaacatataaaaagatttttggactgcattgagaatctagtacaggattgagaccatgaattcgcaatggggccacttttcacggtgtgtgattttttttttttttttctccagtggtacttagctgagtagcatgggaccagggaaggtgatcagtgtgctaatctagacctcgttctttcagcccaaggtgatagacaacaagatgagggagtggagggtataggtaaaatagtggactatgatgtggaagcagagcatggaatttaagctggatcgggaactaaatctgcatagtgctgatccattttggaccctaaattctcttgcatcatcacagtggactcttactatagtgtcatatcatttaaaatcaagatataatttctgtgcaagtttacttgctatactagtctagctactgtaatccagattgtccttaggtacccctgtattcctgaaaaccacttggttaaaccacagtgtcagccaataggaatataatttgcagaatttgtgacttttcaagagcattaaagtctggcattttgatacagtgtgaaactgcagcacaacagaaatttgctgaagaacttcaaaagcgagaacgttttttacttgaaagagaacaactgcttttcagacatgaaaatgccttgagtaaaattaaaggtgttgaagaagaggttcttacaagatttcaaattataaaagaggtaactatatagcctttgattttagagtggtatatttcttcttttcttcttagattcactagttactaacattttgtcacatttgcttatttctccttcccttcctcctcctctccacgcctacacacacacacacacacacacacacacacactttttctgatccatttgaaagcacattttggcacatttgcttatttctccttcccttcctcctcctctccacacctacacacacacacacacacacacacacacacacacacattttttctgatccatttgaaagcagtttgtaaaaatcatgattctgtccctaaatacctcagtatgtatctcctaagaataaagacattctccagaccattagcgcatatcaggaaattaatgctaactaaataacttatttatagtccatgtttactttctcagttggtcttcagtatgtcttttattgtttgtggggcgggggggttgtttgtttgatcaagcaactagacaagattcatgcgttatatttggttgttatatctttttggtttctttgaatctagagcactcaacctcaccatctttgaagaattcaggccagcattcttatatgtcacattgtggatttgcctgattgcttcgtaacgataatatgtagacaaaatatttttggcaaggatattgtataggtggtataatataccttgcttcatattaagatatattttactgtacatataacttacttggagtaaaattcattgttgtacatttctatgagttttgaaaaatgcattcagttttgtaatcacaaccatcaacaagatcaagagtagttcagctcgccagcagttcccttacgctctcttgtagctatccctttcctccagcctcagcccttggcaaccactgacctattttctgtcccagtacatctgccttttccagaatgtcatgttaatagcatcattttatgatttttctttatctttggttttcagtagcagtttatttacagtgtttcttgacatgcttttctttcagtttgttctgtttgtggttaactgagcttcttcaatttggaaatttctgtctttggccaaatttggggaatcttcagccaatatttcatcaaatattttttccactttctttcttgtcttctcttggatctccagtgactccttgtgctatttccccaaagatttctgaggctccattcctttttttcccattattttcttcagtgttcttcagatagtttcttgatccatcttaaagttcattatttcttttttaatctccatgttgctattgagcccatctagtgaaatttttatttttgatatttaaaaattctaaaatttcaagttgtttaaaaaatttatttttgtttttctcataagcatttctgtctttatatttacatctatatatatttacttttacctcatggagcatagtttaaaaactatgtatcacctgtatcatctcaagatagggatctgttgattatcttttttcttgaggcttagtcacattgtttggttctttgtatgttcagtgatttttagggtatattcaagaccttctggttaatgcatagattttgggttctattgttaccttctggagaatattattgattttaaagcattcagcaattagatttaggcctcactttttttgttgttgttgttttgttttgagatagtctcgctctgtcatccaggctggagtacagtggcacgatctcggctcactacaacctccacttcctgggttcaagcgattctcctgccttaatctcctgagtagctgggaatacaggcgcccaccaccatgcccggctaatttttgtatttttagtagggacggggtttcaccatgttggtcaggctggtcttgaattcctgacctcaagcaatccacctgcctcgccctcccaaagtgctgggatcacaggcgtgcctggccaggcctcagttttttctcacctcctctgggcagtggttctcatctcagtttagcttttttttttttttttttttttttttttttaattatactttaagttttagggtacatgtgcacattgtgcaggttagttacacatgtatacatgtgccatgctggtgcgctgcacccactaactcatcatctagcattaggtatatctcccaatgctatccctccccactccccccaccccaccacagtccccagagtgtgatattccccttcctgtgtccatgtgatctcattgttcaattcccacctatgagtgagaatatgcggtgtttggttttttgttcttgcgatagtttactgagaatgatggtttccagtttcatccatgtccctacaaaggacataaactcatcattttttatggctgcatagtattccatggtatatatgtgccacattttcttaatccagtctatcattgttggacatttgggttggttccaagtctttgctattgtgaataatgccacaataaacatacgtgtgcatgtgtctttatagcagcatgatttatagtcctttgggtatatacccagtaatgggatggctgggtcaaatggtatttctagttctagatccctgaggaatcgccacactgacttccaccatggttgaactagtttacagtcccaccaacagtgtaaaagtgttcctatttctccacatcctctccagcacctgttgtttcctgactttttaatgattgccattctaactggtgtgagatggtatctcatagtggttttgatttgcatttctctgatggccagtgatgatgagcattttttcatgtgttttttggctgcataaatgtcttcttttgagaagtgtctgttcatgtccttcgcccactttttgatggggttgtttgtttttttcttgtaaatttgtttgagttcattgtagattctggatattagccctttgtcagatgagtaggttgtgaaaattttctcccatgttgtaggttgcctgttcactctgatggtagtttcttttgctgtgcagaagctctttagtttaattagatcccatttgtcaattttgtcttttgttgccattgcttttggtgttttggacatgaagtccttgcccacgcctatgtcctgaatggtaatgcctaggttttcttctagggtttttatggttttaggtctaacgtttaaatctttaatccatcttgaattgatttttgtataaggtgtaaggaagggatccagtttcagctttctacatatggctagccagtttttccagcaccatttattaaatagggaatcctttccccattgcttgtttttctcaggtttgtcaaagatcagatagttgtaggtatgcggcgttatttctgagggctctgttctgttccattgatctatatctctgttttggtaccagtaccatgctgttttggttactgtagccttgtagtatagtttgaagtcaggtagtgtgatggctccagctttgttcttttggcttaggattgacttggcgatgcgggctcttttttggttccatatgaactttaaagtaggtttttccaattctgtgaagaaagtcattggtagcttgatggggatggcattgaatctgtaaattaccttgggcagtatggccattttcacgatattgattcttcctacccatgagcatggaatgttcttccatttgtttgtatcctcttttatttccttgagcagtggtttgtagttctccttgaagaggtccttcacatcccttgtaagttggattcctaggtattttattctctttgaagcaattgtgaatgggagttcactcatgatgtggctctctgtttgtctgttgttggtgtataagaatgcttgtgatttttgtacattgattttgtatcctgagactttgctgaagttgcttatcagcttaaggagattttgggctgagacgatagggttttctagataaacaatcatgtcgtctgcaaacagggacaatttgacttcctcttttcctaactgaataccttttatttccttctcctgcctgattgccctggccagaacttccaacactatgttgaataggagtggtgagagaaggcatccctgtcttgtgccagttttcaaagggaatgcttccagtttttgcccattcagtatgatatcggctgtgggtttgtcatagatagctcttattattttgaaatacgtcccatcaatacctaatttattgagagttttcagcatgaagggttgttgaattttgtcaaaggctttttctgcatctgttgagataatcacgtggtttttgtctttggctctgtttatatgctggattacatttattgatttgcgtatattgaaccagccttgcatcccagggatgaagcccactttgctttcaaagcctttgcaatgttgctgtggagttgtcttgtgcctgtgcctcttaaaggttggtctgagacttgggtaacagtttaaaatcctaatgcatttctcaaagcttttgctatgctgctctgggtgttttttgtgcaggtaaagaggcattaaagtgttagccaagacttaggtaatagttttaaactgagctccattctccaagcgtttgctctactgcttttggtctgtcctgtgcccgcctgagcggctcaaagttgagcccaatttgtacaggttcgtaaacaccagagtgagaggatcctctgtttgagtctctcttctgcgggattctccccacactctggctcatagaggcccctcttcctgattatcttgccaggaagactggttttctctcatttctttagtggacattttttagagctttagtggaaattaaaaaaaaatttttttttaattgttttagagacagagtcttgctgtgttgcccaggctggagcgcagtggctatgcacagacgtcatcatagctcactgcaccctcaagtcatcttcctccctcagcctcctgagtgcctgggactacagatgtgcaccactgtgcccagctagtggaagtttttgttctacttctccatgtctgggacccaccctgaggcaaaatgttgagagaagagcaaaaacaaaaatgcaggaaactttacccttgagggttgcttctacaagttttctctcccatcacaatgtcctccccttttttcttttcacagttgtcagttagttgttttatggtttatttagggcttttagctataatcagtgggagaagagtgtattgagcttatcctgctgtgctagaaatggaatgcatatgtttttagtatcttttagatatggaaaaagttggacaatgaaaatattagttttaaaaataactgtatttgtgactatatcctaagttatttaaggaatcaatatagtaataaagtcatacaaagattaacttcttagaatattggatttttttcacagggctaaagaatgcttagattctctgatctctccatttttgtcttattcttgattctctttagatttgtgtatctatttttattaagtataaggataactgccttattttcatcgtatttatatcactacttggaagaagggaattaattcaattttttgatttcctgtagaaacttgttttaaagctttataagtaagttgaaagtgaaaggtgaaactattaagtattcacatttaaaatctaaaacatgctatcccatttaaatgtaattagaggggaagttgatttgaattatttatagaactgattaagaagagtcaaatagtttggggctaagaaattttattatgtatctaacatattttgagatgaaaagcaggcatcaaaaattttagctgctttatgaggacaagaaattagttggttttatgaaagatttctttcatttctcaaaggtaatgtaaattatacactttataaagccataaatagcttatctcttgaagagtatcagaaattctttactgttttattattccatgatgtcaaagaaaatatttccatgagtttgtgtgagtggatttttctgagcagaagcagaaaatagactcattgctactttgtaaatgctaatatgttttaataagtatgttgtaaatgcctttgatgttttgttgttatcttggtagattgcatggtttttataaattacttgccacactagtcacttgtgcttgcatacactgattaaagtttttgtgattgaaggagttcttacttgtaattaattcacgttccatagtattagtgatatacagtccttacaagttttagatgagagttttttttttctcctcctagcagcatgatgcagaagttgaacacttaaccgaagttcttaaggaaaagaataaagaaaccaagagactgaggtcctcttttgatgcattgaaagaattgaatgataccttaaaaaaacaggtaagacctgttttaatatatactgaacataagacattctaagaagtatattttatatataacaaattaaagtcagccttagaacacgtttcagctagagaaaatttggattacatttgttagctttattttaaaatacttccaaatgtaaataaagtattctttagctctttggtctcttctctttatttgttctggcaaccaactgacaaacaaaagaaaaaaacctgataacctgagaactgattacatttttaggtactgatctctggctttaatacttattatttatcactacttatttaacattcatttatttttgagtatctattatatcctaggcatcatgctagactcagaccttcacattgctcatgttctcatggttataaactggtatcacattgcagtatacttatttatataagtattgcaggccaggcgcggtggctcacgcctgtaatcccagcactttgggaggctgaggtgggcggatcacgaggtcaggagttcgagaccatcctggctaacacagtgaaaccccgtctctaccaaaaatacaaaaaaaaatagctgggcgtgatggcgggcgcctgtagtcccagctactcgggaggctgaggcaggagaatgtcgtgaacccaggaggcggagcttgcagtgagccgagattgtgccactgcactccagcctgggcgacagagcgagactgtctcaaaaaaaaaaaaattgtaatttagattaatatataataccagagttgcataacataaatagttttgtgagttatgtctatttttttccttccatctgccagtttttggcagaaagatgtgaaagtaaaggagtatgttaaagagagacaagagaatgattatgtatatattagattgtgtggggagtagatgttggagcagaaattggagtaaaccccgtcactttgaaaatgaaagcattgggctgggaatctgtatggattatgtaacttaagcctcagactctcctagagttcctttgccagctgtccttttctgtttctgcttttgtttccctttaatctctacttgttgtgatcctcctccttggcagtgatacataggtaccctttttctcacctgatctaattctttagcttcctcatttcatttatggctgttactattagacttatgaatttgacagcctgttgtctgtttggaatcccactttatccatggagagattgctctttctcattacagtctcattctaccactctcttgtgaggattttaaaaattcctagcatagataaactgttgcccatacctatctcttaggtttctgtaatccttaataattttgcatgtagttgcatgagtgtgtggtaattggggtggatatgtggattattaaatatttggacctattgataattggatttatgagctaatgtgtacaaactgaaaaaatttggcagaatgcttttttatggtttctgtgttaagattagatcagaggtcagcacgctttttctgttaaggactagatagtaagtactttgggctttgtaggccatgtggtctctctttcagtgacccagctctgccatcgtaatgcgaaaacagccataggcaataagtaacgagcgtggctgtgttccaaaacgactgtattcataaaaacaagcaatgggcatatttagccagctcctggctagatgaataacatgtactttgaaattgctgaagaaaaagatatgttatttctgtgactgacttacatagtaatttatgctaacactggatatacattttctaataatttaaaagcatttctcattaagtctagccaagctgaggaggcaaggattaatgttcaagcttcatcatagggagatagtcccagtgaacaccccaggatctcagttgaaaggagcagcattgtgccttgggactgggtgaattagagggagacagaactttcctaaactgaaacctggccttgattaagtgcagttcctgatcagattaaggtgcttactcctcagtttaaatgcctagcagaggaaaatatgtctttcattctatacaaaattaataagcatgtcaaaagacagaattgcataactgagaatgaagaaaaaaaccccagagaatataagcatacttgcgagtgatccagatattggaatttaacaggcaatgactttaaaataatgattaatatgttcaagaaagtagaaaaatagattgacaacttcattagagaattcctagcataggtccatttttgcctatataataagtctatggaaaggaattaaattgaaatttgaaaactaaaaaatacatcaattgaatttaagaactccattgaatggggttttaaaattatttttaattgacataattatgcataattatggggtacagtgatatttgatacagtaatgtgtaatgatcacagtaattagctaatccatcagctcaaacatttatcatctctttgtattggaaatattcaaaatcctctctttatctatgtgaaaatataccataaattgttgattgtagttaccctgtagtgctataaagctagaacttattcctcttatctggttcttctttttgttttgttttgtttttttgagatgagtctcattctgatgcccaggcaggagtgcagtggcatgatctcggctcactgcaacctctgccttctggactcaagcgattctcctgcctcagcctcccgagtatctgggattacaggcgcccaccaccacacctggctaatttttgtatttttagtagagatggggtttcaccatgttggccagggtggtctcaaaccaagtgatccacctgcctcggcctcccgaagtgctcggattacaggcctgagccactgtacccagcccctcctatccagttctaattttgtgtttgttagccaacttctccacattccttcctttccacagccatcccaacctctagtaaccaatattatattctgtacttctgtgagatcaacttgttttttagcttccacatgagtaagaacatgtggtatttatcattctgtacttggcttatttcacttaacataagtgtgtggtaaggtctttcaggttcatccatgttgctgcaaatgacaagattttgttctttttcatagctgaacagtatttcattgtgtatgtataaagaaaatgtggttataaagaaaatgtataaccacattttcttcataaatttatctatcgatggacacataggttggctactttccatactttggctattgcaaatactgctgcagtaaacatgggagtgcagatatctcttcaatatactgattttctctcctgtgaatatatacccagaagtggtattgcaggatcatatggtagttgtgttttcgtttttttgggaacctgaatacttgtgtttttcgtaatggctgtgctaatttatatccccaccaacaatgtaaaagagtttcccttctccacatcctcaccaacgtttattactttttgtctttttcatagcctttctaactgggatgagattgatacctgatcatggtttcgatttgcattaacctgatgattagtgatattgagcattttttcatatacctgttggctgtttgtatgcctttgtttgagaaatgtctagtcagattatttacccattttttatttggattattatttttttgctgttgagttccttgtattgtctggattttcaccctagttggatgaatagtttgcatatattttctcctattctgcaggttgtatcattattctttttattgtttccaatctcatttgtctgtttttgcttttgttgcttgtgcttttgaggtcttatccatagtatctttgcccaggcgattgtcgtgaactatttcccattttttcctctagtagttgcatagttttgggtcttatatttcaaagtctttaatccattttgggttgatttttgtctgtgatgggagatgggggtctagttttattcttaggcatatggatatccatttcctgcatgatttgttgaggagactgtcatctcccttattaatgttgttggcacctttgtagaaaatcagttggctgtaaatgtgtggatttatttctgagttctctatgctgttccattagtctatgtgtctgtttttatgccaatactatgctgttctggttactacagttttgtagtatattttgagtttaggtagtgtaatgcctccagttttgttgttttcgcacaggatcgctttcgcttatttggggtctttcatgatttcatacacagtttagaatttttttctatttctgtgaaggatgttgttggtattttaataaacattatgttgaatctgtagatgactttggttattttgacagtattaattgttccagtccatgaacatgaaatgttgtgtgtgtgtgtgtgtgtgtgtgtgtgtgtgtgtgtgtgatcttcagtttcattcatcagtgttttatagttttcatcgtggaaatctttcacttccttggttaaatttattcccagctattttattttatttttgtagccattgtaaacaggatagatttctttctttctttttcagttagtttgttgttagtgtttggaaatgctactgatttttgtatgttgattttgtgtccttcaactttaccaaatttatcagttctgagaaatttttggtggagtctttcggtttctttgcattgaagatcatgtcatccaaagaaggacaatttgactcatttccaatttttgtttgtttgtttgtttgtttgtttgtgatggagtctcactctgtcgcccaggctggagtgcagcagcacgatatctgctcactgcaacctccacctcctgggttcacacaattctcctgcctcagcctcctgagtagctgggattacaggcatgtgccaccacatctggccaatttttgtacttttagtagagacggggttttgctgtattggccagggtggtcttgaactcctggcctcaggtgatccgcctgcctcggcctcccatattgctgagattacaggcatgagtcaccacacccagcctgttatttccaatttggatgtcttttatttctttttcttgcttaattactctggctagtacttctagtaccatgttcaacaagagtggtgagaatgagcatccttgtcttgttctagttcttagaggaaaaattttcagcttttccctgttcagtatgatgttaattgtgtgtttgttatatatagcttttaatgtgttgaagtacattccttctgtacctaattttttgagagtttttactgtgaagagatgttgttgaattttatcaaatactttttctgtgtctattgaaatgatcgtaaggtaattatatttcattctgttatactcttcattctgttaaaacgtgattatcacatttttttatttgcatatttgagccttcctgtgtccctgggataaatctcacttggttatggtatattatctttttggtgtgttgttgaatttggtttgctaatattttgttgaggatttttgcatctatgttcatcaggaatattggcctggagttttcttgttgtgtcttggtttggttttggtatcatggtagtgctggctttgtacaatgagtttggaagaattctctacccttcagttttttgggatagtttgagaattggtatttgttctttaaaagttttaattcagcagtgaagtcattgagtgaatttaaaagtacagttcagcagtgaagccatttagttcgggcttttctttgttgggaaactttttactacaattcaatcttgttacttatgattggtctgttctagttttctgtttcttcttggttcagtcttacgttatatgtgcctaggagtttatccatttcctctaggttttccggtttgttggcatatagttgtttcataatgatctctgtagtctctagtgatccttgtatttctgtggtactgcttgtaatgtctccctttttgtttccgatttttccgattttatctgtttgggtcttttctccttttttcttttctttttttttttcttttttctttccttcttcccttcttcccctccctctgccttccctacccccctaaccctgccttccttttctgtttccttcccttccttcccttgctactatttcttctctcccttttctttctttctctctctctttttttttttttttgactgtctccctctgtctcccaggttgaagtgcagtggcatgaccacggcttactacatgtagccttaacctccagggcttaaaccacgcttctgcttcagcctccttagtagctgggactgcaggcatgcaccaccacctctagttaattttttaattttgttgtagagatgaggtcttattgtgttgctgaggctggtcttgaactgggctcaagtgatcctcctgcctcaccctcccaaagtgctgggattacaggtgtgagctactgcactcagcctcttcttttttcttagtctagctcatggtttgttggtttttttattttttcaaaaagccacttttcattttttaagaaaattattttagattcagagggtacatgtgcagctttgttacatggatatattgtgtaacagtgaggtctgggcttctaaaatgtactcttcactcaaatagtgaacattgtacccagtaggttaattttcaacccctacccctctcccctcttcccttttgtagtccctagtatctgttatttccatctttatgtccatatgtgtgtacccattgtttatctttgacttataaatgagaacatacagtatttaattttctgtttctaagttatttcacttaggattaatgacctccagctccatccatgttgctgcagaagacatgatttcattctttactatggccacatagtattctattcatggtgtatatatatcacaaattttattgtaagataccataagtaatataataaaaaaataattggatacccaggaataaatctaaagagagatgtgcaagacatctctacttgaaaactacaaaacattattaaaagaaaataaaacctaaataaattgaagatatgttcatggataggaagactcaatattcttcctttccatatataggaagtcagttcttccatatatatatacatatcagtatatacacagacacatatacacatagtcccagtaatgcaatcccagttatagctcattgtactgcatacttaggattttatacttttctttatatgtgttatagttcagataacagtgtacttattaataaaaacattttcactaaaatatatgtatatgcttttaagacatctggagtcttgtacatttttcataaaatgaagtaaatgatcttacaaaccattaatattttagggaaaaacgacaacttcagttgtgatctaagttaatcatgaatgctgtctctgttttgttacattggttagtaatatcaaccagattagatagtagattgggaaacccttagtatgaaaccagttgaaggtgtatattgaaatatctaactttttctaccctttagttaaatgaagcaagtgaagaaaacaggaagatagacattcaggctaaaagagttcaagctcgtttagataatttacaggtaagttgcctgttcttctctacagacagaagtatgtttttagatgattacctttgagtttactcatttagatacaattgttctttaattcacgcatatatactgttgcagaggaagtacgagtttatgacaatacagagattgaaaggaagttcccatgctgttcatgaaatgaaaagtttaaaacaagaaaaagcaccagtttcaaaaacttacaaggtaagtttgaattatgatttgatatgattgaaaatttctcggctgggtacggtggctcacacctgtaatcccagcactttgggaggctgagatgggcggatcacgatgtcaggagatcgagaccatcctggccaacatggtgaaaccccgtttctactaaaaatacagaaaattagccaggcatggtggcacacgcctgtagtcccagctactcgagaggctgaggcaggagaattgctggaacctgggaggcggaggttgcagtgagccgagattgcaccactgcactccagcctgggcgacagagtgagactccgtctcaaaaaaaaaaaaaaaaaaaaaaaagaaaatttctccaatggaaagccaggaagatttctcttgtgctttaatcttttctctttgatttagcaaacattctttttggaatgtttgctatggaagggattcaccataataattttttaatagggaaatatctcaagaatatttaaaatatactttcatttgtgaaaacaaaactattatatttcagcagtgtttcaggtacgtatcattgacacatcattaatggctttattgcttagtatgttttgacactccacaagcatttgctattatatttcagtcaagactacaacccatccctgaatggatttccatatgtctttttttccctaagaatttttaaaatttgagatataaattacatatggtaacataatgcagaaatcctttagtgtaaagtttgattaattttgataaatatttcatgttgtctataaccaaatacagaatacttccactatcctagaatatagaactttccactatcctagaaagttctctaataccctttcctggtcattcttttctgccagaagttttgcagaaattagttttgcctgtttgagacatttggtcagtggaattgtattgtgtgtacttgtttgtgtaaggcttttctcagcataattatgagtgtatcagtagtttgttccttactattgctcaatagtatttcattgtatgactgtatcagagtttgttccttcattcttctgttgatagacacctgggctttttctagtttttgtctgcaataaataaagctgctacgaatattggtgtacagagtttttatggatgtatgttttcatttcttttggatatataccaggactacaatttctgggtcataaggtcgataaaggtagatgtatgtttttaagaaactgacagttttccaaattggttgtactgttttgtgtacaaatgggagtgtaatgatacactcccattaacagtgtatcaaagttttggttgctccacaaccttgtcaacatttggtgttttcagttttcttcattttgacccttccagtgggtgtgtagtagtatcttattatgggctttgatcattttgatattttgataaattttctagttctttataaattgagaaaattggagtaaattgaaaaggtacagactttatattcagggactgaagataatcgaagttttcatctaaagggagttagtttctatttgaaaaaaattgagaaagtgaaaaattgctcttcagaataatgtggtaatgctactatttatcattttgtctttagtcattctgattgtgtggattgccatcggcttaatgttgcctatttattaatttgcttttatatttctctgtctttgaatttttttgtttttttattttttaatttattaatatttttaatttttttttttttgagatggggtctcactctgtcacccaggctggagtgcagtggtgcaacctttgccttctgggttcaagcctcccgaagagatgggattacaggcgcccaccaccacgcctggctaatttttatatttttagtagagacagcgtttcaccatgttggctaggctggtttcaatctcctgacctctggtgatccacctgcctctgcctcccaaagtgctgggattataggcatgagccaccacatctggcctgcagatttttaaaaaaataaatttaacatagttccctccttaaggtggatatgtgtagtggtatcttattaaaaaaaattgaattaaattagaaatgtgttttgtaataatacttagtctaattaaatttataaattactttgttattttacttttcattttggtaggctgtcagaggacaagatttctaggaaaaaaatgttcatatgtgtattgaatgatatactggaaagacaaagtaacaatttttgtgagaagagaaagataagtttcatagtggaaattctttagctctggaaaccattaattttttttagagtcttttaattgtggtgattcatgctcttaagttaaggctaattttactttttttccatcttatcaaacttggataaagaatttttatgaaaagttttcttttagtaataaggtacagttattccaacttcctgattatgacttttcttgccttctctcagttgtcatttaacatgtttttaatattagttggggaggtttttggtgtttttttttttttttttttttttgagatggagtcttgctcttttgcccagattggtgtgcagtggtgcgatctcggctcactgcagcctccacctcctggttcaggtgattctcctccctcagccttccgagtagctgggattacaggcatgcaccaccatgcccagctaattttatttttagtaaagacaggttttgccatgttggacaggctggtctcgaactcctagggaacttcaggtgatccacccacctcagcctcccaaagtggtgggattacaggcttgagccactgcgccaggcaggttggggaggtttgatttggaattcttttgtttgtttggagaagctctgtccttaacacattttagtgaattactttagtcaaattattcttattacttaacaaatttaaggtttgtctttgaagttttatgaagttgtgaactgaaataaatgatttaatttttgacatataggtaccacttaatgggcaagtttatgaacttttaactgtcttcatggactggatttcggatcatcatcttagcaaagtgaaacatgaagaatctggaatggatggtaaaaaaccacaactcaaatttgcttcccagagaaatgatattcaggagaagtgtgtaaaggtttgttttttaatttgaaatatgtgattcagaatatatgaagattaaaaaaggaaaagccagggccaggcacagtggctcacgtctataatcccatcactttgggagttcgagctgggcagatcacctgaggtcaggagtttaagaccagcctgggcaacgtggtgcaaccccgtctctactaaaaatacaaaaaataggtgggcattttggcacgtgcctgtaatctcagctacttgggaggctgaggcaggagaaacgcttgaatctgggaggtggaggttgcagtgagccaagattgcagcactgcactccagcctgggcaacagagcaagactctgtttcaaaagaaaaaaacaaaaaacaaatttgaggggctgcctctgatgaggcccttcttcctggtctcctgcagagtccagaggtgatgcagggtatcacatggctgggggctgagtgtgctagctgaggtctgtctcccttttataaagccaccagtccagttcccatgataatccattaatccatgaacccttggatgaattaatgctttcatgagggcatccctcataacccagtcacctcttttttaaaaagcttttgtgttagagatggggtctccttgtgtcacctaggctggagtgcagtggcccagtcattgcttactgcagcctccaaactcctagcctcaagtagtcttcctgcctcatccctttgagtagggtctacaggtatacaccaccttgccagctaatttttaaaaaaaatttttgtagagatcagacctggcttcattgcacagaatgatcttgaactcttagcttcaagcattcctcctgccttggcctcccaaagtgttgtcattacagatgtgggccactgtgcccagacccagtcacttcttaaaggccccacttatcaatactgtcatattgggaattaagtttcaacatgacttttggaggaaacaaacgttcaaaccatagcacatggcaaaagggaattaaagttgttaatcagctgaccttaaaatagggaggttatccaggattatgtgggtggtcctggtaatcacacaaactttttaaaccagaaggattcagaagagtaggtcagagactcaaccccctcttgctggcttttgaagatggagaaagagggccatgagacatggaattcagataatcttttttcttttttttttttgaggcggagttttgctctgttgccaggctggagtgcagtggtgccatcttggctcactgcagcctccacctcccgggttcaagtgattctcctgcctcagtctcccaagtagctgagactacaggtgtgtgccaccacgcccagctaatttttgtatttttagtagagacggggttgcactgtgttggccaggatagtcttgatctctcgacctcgtgatccacctgcctcggcctcccaaagtgctgggattacaggcatgagccaccgtgcccagccatcagatatcttctggaagctgggaattgccctcagctgacagtcacaaaggacatacaaatctcagtgctctaactgcagcaaactggattccacatgcaacttgaataagcaaggaaatggatcctcccttagcctccagaaaggaacacagctctgtatatacattgattttggctggctgagacccattttagacttctgaacctacagaagtgtaaaataatgaatttgtgttgtttaaatgttaagtttgtggtatttgttacggcagcaataggacacaaatacacctttgtttagaattttgtctcttagtacctacatcaattatttccctaaatctagccttattttagaagtaactgccaattaggaaggcctgccgtattaaagttctgcagagaaattttatttgttagaactagatgagggctgggcacggtggctcatacctgtaatccttgcacttcgggaggttgaagtgggaggattgcttgagcctaggggtttgagatcagctttggcaacatggtgacaccccatctctacaaaaaatacaaaagttagccaggcctggtggcacgcgcctataaccccagttccctgggaggctgaggtggtaggatcacctgaacctgggggggtcgaggctgcagtgagccgtgattgtaccactgtactccagcctgggcaacagagtgagaccctgtctgaagaaaaataatggaatcgggatcatgtaatactgtgtttttatattagtctaataacacaagagaataatatttagcacgtgtatttctcaggattcattttaacatctgtaaataaaaagttgtctgttgacatgttcaggatttacagtttctattaagcctagatcctttcagttaaaatattgttttcaacttaattactatataataataaaggtagaacaattttaaggtgtataaataagcttttaaatataataatagaagagtaagtagtaccagattaactaattaaatacttgtggccatcgcaagcaggtattcacatctctttaggaagatgtaaaatttgtaattttaaataatgtaaccttatcttaaaatcttttttttgttatcggactctgttaaccacttgggcaagcattttatttattctaagaatactagtataactcaaaatattttagcaaagtaatctcttcagaaattacctttggaaacttctgacttttttttttttgtatatttgatcacagttataatttacttaaggatggatttaatatttaaaaacacctaaagccattgaggagtaaatttgatatactgggtataccttataagactgattttcttgtgtgattcagtaacataagggtggaatattatcaaagaaattgagatacaaaaattcagtacaacctgaggtggaaggtactatgtgttacaagtaaagattgtaaaatttggctataagactaacgtcatcaacatgttggagtaggaagtttcaggcccttattcctccatggaaacaccaagttaattgcaatataatgacaaggacatgttagtgagaattatagagaccagttgagaagctgcagcactcaggctaaaacattaaaaagaagggactccttcaaaaggagtggaaaagtttgtggcattttgcatgtgtgttcccctgccggtatagcgcagtgcaaccaggaggaaatttcctattccctaccgtctcccttgggacagaaacaaaataatggactgcatgttcaatattttggcttatccaaagtctgcccacaggactggtctgcatctcacctcactcagagtgctgaagggaatggtagcatagtttggaagctgcaggaaacagaagtgattgctgcagcac

SEQ ID NO: 255 - DNA, 32742 bp, Homo sapiens
  source 1..32742: mol_type = other DNA
ggcgccctgaaacgttcggcgagccgactgcggctgcgcggggtattcgaatcggcggcggcttctagtttgcggttcaggtttggccgctgccggccagcgtcctctggccatggacaccccggaaaatgtccttcagtaagtgtccgtctggtggggtggggaagcccagggggctggggcgcctggggttcgggcccggcccgccccagacctgccttcttttgcccccttcgcccccttcctgggtttggaatgtgtcccacccagcaaggccgtgggctgcttgagagccggggagggctccggcaccttgggttccgctgaggcccggcgcttgtccgcccatctgcgccgcggtggccgtttggagcaatctggataattcgttaggccctcagagctctcgtttattctttgtaaggaatcccctcctgacagttcaacctaacaaaaatcctgaaccttgtgtttagattttgtgatacgttttcaaagtcacgtatttaacaattcgactacagtagggaacgaatttaaagttgctctcctatccataatctcactgctattttttaaaagtctttgaatacagggtactttaagaaaaaaaaattgaaaaaaaatagctttgctcattattgagtgatgtgtgccaacctgctaacatcactcactttttacttaaagttcccacgcctttgttttatgacttagatgatttacccagactgttacttaaaggcatttaaaacaattaagtcataggttcaggaagtaaaactggtccgttttatcagttctttgcgatcagaagaccgagattgttaaatgcagtcaaaacaaaaatccatttgctctaagactttttctgtaaccttcaacctagccagcaaattattttctttcagaagtcccccgccccttttttaaaggtaaagcagatattcctggtcctgttttgacttactaaagattaatgtgctttaatgaactggatgttttactattacagtgcatttaggtcattttactagagaaatgtggttggtgttagaatatgaaatgtttaccttgggcgagcctactagacatattttggaagaaaggttctgaaatagggatttgtccctctgctataagacatgagagacattcaaacttcagaattattattttttttagttttaaaaataagcaatgcgtttatatgactaaaagaagatttagaacagtatttaccgagaactcctgtacctgactactgtcccactctgtcacatgtaaccgtttttctagtttctttttggaaatataaatatttacattattataatatattaaatgtctgcacgtttgtatacattttttgcctttaccacacataaaatataacagtatatatatacgctgctcttttgcctaacaatatccctggagatctctaccaatacataaagttctttcttattctttttttacagctgtgtaatacttcatgtaccctaattgatctaagcagtcaacacaggttgttgacaatctgtttcaaatagtggcacggtgaaaaatcttgtacataacattttgcggatacacatgtgtatgtgtcttctagatctgcagaagcggtttgttggatcaaaagcaaatcagtccagttttggtagataattcccttggcaggaattgagcacatgcccacctacaagcaagatgcgacagagagcctgtttcttattgctgcacctacacaatcttttcacatgttttttagttttgccaatctgatgagtgaagaattgtttctcagcgaagtgaatttctgttatgagagactgaacatttttcatgtttgtgagccatgtatctttttctgtgaaataatttattatgccctttgctcattaaaaaaaaataggttaatagtttttttctcagcttctaaaagctcattgtttttccagtttatcatttctcttttgactattttgtggtttttttgtttgttttggttatttgccatggagaagtttttatttatatatagttgtctttatttagcttttcttttgtggcttctggattttgagtcataagaaacattgatttcattcatataccgaggtgatagctagaagtaaatattgctttttaggcaggacatggtggctcatgcctgtaattctaacactttgggagaccaaggtgagagagtcacttgaggccaggagttcaagaccagcctgcgaaatatagtgatacctcatctcggcaaaaaataaaaaattagccagacatggtggcatgtgcctgtagcctcagctactcaggaggctgaggcaggaggatctcttgaacacaagagttcgaggttacagcgagccatgattgcactgttgcactccagcgtgggcaacagagcaagattccatctctaaaaaaataaaaataaaaatacatattgctttttacatcgttttttcaaaaaaaaaaaaaatcttatagtgtctcagatagaaaacctcggagtcttcctgactggtttcccacttcgattctcacctctacctccttcacacagagggacattaaaatgcaaattaggtcttgtcacccccaccttttcctgctcatcacacttgaaccacactggcttgctttctgttcttgaagttctctcagccttgaccatttccccctcagatagctacgtggctgtctggcactgatcacatgtcaccgcctctgagaggcagggcttccttgaccagcctatctaaaaatagtaactcatcacattctcaccctttctcctattatatgttattttgtttgttcttctgagtacttaatgtaacctgacattactttgcatgtttctttttgtttagcccttctagctctccccaaggggaattttgctttgcctggctgctttttttcagctgtagttgagtatatggaagtgggggatgcagagttctctgggagctctgtggctgatttctgagcactgttatcatctgctcttcctcagggactttgttactttgaagcaatgaaaacaaactgtgtctgggaactctactttgtggtactctgggctgcctcacacccgtttacaatccctctttgactcgttccagccgtgtctcagccatgctcctgggaagcaaaggcaggtgtctgagtcagtgccatgcctggatcccactggaagggcaggtgtctcagtcagtgccatgcctagatcccactggaagggcagaggtctgagtcagtgccatgcctggatcccactggaagggcagaggtctgagtcagtgccatgcctggatcctgctggaagggcaggagtctgagtcagtgccatgcttggatcctcttgttaggaggaggagcaaacttctggcaactgcccctcatggtggtagtgacattggggttccgtgagaggagaaggagactcttggggatagagctgggacttatggaaaaacactggctgcttctgagttttctgactatgtctgagcgaatgcttcttaaaattttaaatactatttggatcgatatttaagattttcattttaatgcatataaatggtgtatatataaaatgattgatatttaagatttttgttttaatgcacataaatggtatatataaaatgaagtatatcttttgcttgtagaaattatccctaatatcccatgtgcatacctttctctcttctaggatgcttgaagcccacatgcagagctacaagggcaatgaccctcttggtgaatgggaaaggtcagcatttagttattttatttcccttaaacaaactatacactgccccatggaaaattaacattatccatatttttctagatacatacagtgggtagaagagaattttcctgagaataaagaatacttgataactttactagaacatttaatgaaggaatttttagataagaagaaataccacaatgacccaagattcatcagttattgtttaaaatttgtaagtatacttaagatgtataatcaaatctataatcatgttgtacttttgctttttaaacttagattgtaagatcattttaggcttttaattccttgtttctagttctgaagatacagagaggaaaatctgttcattctctgattcaacagacttctgtgccactagtgattaaaaagtatgtaggggctgggcgcagtggctcacacctgtaatcccagcactttgggaggccaaggcaggtcgatcactttagttcaggagttcgagaccagcctggccaacgtggtaaaatcctgtctctactaaaaatacaaaaattaactgggcatggtggcaggcacctgtaatcccagctactcggggggctatggcaggagaattgctcgagcctgggaggtggaggttgccatgagccgagatcagatcatgtcactgcactccagcctgggtgacagagtgagactctgtccccaccccccgctcccccaccaaaaaaaaagtatgtgcggacttctctctaccagcaaccagtcaatcaactctgtagttgtgtctccaattcaattccagcactacctgaaaataacttcagattccacagcttaagggttctgttccacaagactgcctctcacttacaatgccagttgcaagccacaggttgttttacctgtgcttctgcctgactggctacaaagcagagttcgcacaaccctctccctgggtctgagttcgatcagtttgcatgagtggctcacagaactcaaggaaacacctacggttaatgttttattataaaggatattattaagaatactgatgaacaccagatgaagagatgtttagggcaaggtattggggaaggtgtgtggagcttccttgccctttccaggtgtgacaccctccaggaacctccatgtatttagctctccagaagcttgtctaagctctatcgttttgggtttttatggaggtgccttacacagacatgattgattaaatcattggccattggtgattggcttaaacttcagtccctcttccctccctggaggttcagcagtggggctgaaaagtccaaccctctaaacctgccttggttttgctgatgaccagctcccatccgaagctacctaggggctcccagcttagctggctaactcctcaccagacatagactagcagttccattattcttatgtctttttgttttgggttcgtgtaggctgagtacaacagtgacctccatcaattttttgagtttctgtacaaccatgggattggaaccctgtcatcccctctgtacattgcctgggcggggcatctggaagcccaaggagagctgcagcatgccagtgctgtccttcagagaggaattcaaaaccaggctgaacccagagagttcctgcaacaacaatacaggtagttacaaagtcaaactctctgtgatgattctgactttgaaaagtaatgtttgctgttaaaaattgtatcattagcaatttgtacagggaaatccttctagttttggacaatgtggataatacaggatagtgtaaagaaaaaaactgctcagaaatattactgttaacaataactggcacatttccttctagtatcttttcctgtacctgtgtgggtatctttgtgtttatatattttaacagcaaatcatattgtatgtctagttatacatacaaagaaatacttaagaaattatgagcttttaaactacttctatagtagttgtgaaatctgtcacagtgttgtgtcataatccactctccaattggacattgaagttgtttacattttgatttttataaacagcaccatgataaatactttttttttttgagatggagtctcactctgtcgcccaggctggagtgcgatggtgtaatctcagctcactgcaacctgccacttctgggctcaagagattctcctgcctcagcctcttgactagctgggactatagggacgtgccaccatgcccagctaatttttgtatttttagtagagacgaggtttcgccatgttggccagactggtcttgaacccctgacctcaagtgatcttcctgcctcactcggcctcccaaagtgctgggattacaggtgtgagccactgcgcctggcctgtgatgaatatatttcttaataacattgttcacatttttaaaactttttctatgattaaacatatctcacttagggaattgtgaaaatacagaaaacgaaagaaaaccttttggcattttccttggcgcttttttctcttcttgttacaggattgcatgcatgctttatgtacatatacagctttgcgtcaaggtctttttccttcatcataaaattattttttagtatatttcctatttttacttagtttcttttcatagattctcagaattgaaactattgagtcaaagagtatatgaagagtttttacacttgtggtgcatgtaaccaaactacctacttgaaggttataccaattgtttactcttcccctctcattagtagaatttgagacctattatctactgcaccccttgccagcctttaatatactcatcttttcagtttttctgtagtactcatgcttttttaaaacgtcattgagatttttcaaacacacataaaaaagaaaaaattagtataataaacttccatttatctatcaccaacttttaataattaacattttgtgtttctcaatgctgacaaattttaaagccgatccataacagcaaaatatttttccccaaaccctattgtaaacatctctaaaatcttatttcttacagagccttattcgataatcatacctaagaaaactaacaataattatttaatatgtaattttcagtctttcctcatcacgtaaaatggcttcttaaccattggtttgtttgacttaagagccaacaagggttaccacttggttgctttatagtgtgcactttggctcgcatcgctcagaaatgtcaggcatgggaattgcacattacccgacaggtagagttgaaaatgaaatatgccatgaaatgacatatttgagaacttctcacagagtatgaacaatgatgtctgccttttgaagcagtaatctaagtacttttgtactttcacttctttcttccaaatatattcattatgttccaaatgtataaagaacctaaagtaggaggtcaaacatcctgtgttagaacatttgcagacttgacacgtggagaagagggtgcatttttatatgaatttgagaaatactaacataaactaagcaaaaggaggaatttttgtaatacagataatgtattggatataaaaatatttccagaattttattttttaatttcgaagcaactctaaaatgcaactgtacattctctcttgacgtcagactttactagcttataataagttgtctatggtatttagttttcactctaacagctatgtactgtaagtttataatctacattgatgccttttctgctgtcatttaggttatttcagacacgcctcactgaaacccatttgccagctcaaggtaaaatcaggctttctaaaatgcctgttgttgtccatttagtcttggatttgtactagtattttcttttctttaaaaaacaaacccggctgggcatggtggctcacacctgtaatcccagcactttgggaggccaagatgggtgcatcacctggggtcaggagttcgagaccagcctggccaacatggtgaaaccccatctctactaaaatacaaaaattagccaggtgtggtggtgggcatctgtagtcctggctactcaggaggctgaggcaggagaattgcttgagcccgggaggcagaggttgcagtgagctgaaatcatgccacttcattccagcccgggcgacagagtgagactccgtctccacaaaaaaaaaaaaaaaaaaaaaaaaaaacccatccaatttttaatgaaaaccaaattgcactctcaggtaacagagaaagcattctgatcatcataatgcccactaaatagccccaaagagcagaggctttgtcttagcattttaaaagctcaaacctgcaaaaaaaaaattgataatttcactgtatttgtaggatttttttttaattcaaaattgaccaaaatacttaatctggactccatctattttgaatggaatcaaatgtgtttaatgcaacttttaaagaaatacagccatttctttttcttagaactaagtatcacatttcagcaataagcattgcctatcctatctggttgtttaaaattattagttaggttttacatttcttttgggtacttcctggcatgttgagttgatcagaaaattgtataatacttattttaaaaacgttttagttgaaatttctgagacagtgtgaatgagttgatttacttcttatgattcctactggaaggatcaggggaatttattatgtgataattttacttacggttttacccttaatttctccgtattttatcctcttttccctcatagctagaacctcagaacctctgcataatgttcaggttttaaatcaaatgataacatcaaaatcaaatccaggaaataacatggcctgcatttctaagaatcaggtaataatgacatttgtagcttgtgtggaaactgggaatggtattgaatggccagcctggctgccttctacatccactttgacatctcatttctttgatctttctcttcatggctctgagctccatgtcagccacctgctcctgtggcaacttcctgggcctgttattctcccacacagctcacctcaaatacaatttgttgtctaacccagaggccctcaccacacggcctcctgtctttactctccccaccagcttttcccttaccaatgtcctttcctctgttctgctggcctctgcataggctctggaaatccctactgggaatggatccacctgggggcttctgagcctggctttcaaaactcagagcctcaaagattgctgcctgttacctcaagtaacagggaggtctcatactcccaggcaatgggtcatactcccaggcaatgggacatgcttccagtgtctgattcactctttatgttttgtgtatctcttatgtttccaggttcactctagcgccaaactatagtgattttagacttcttttcagtctcttcaaacttgggacctcgctacctctagcctctctctcaggaacttcaaaaatactatttcaacagatagcagatgccatcaagtgacatctatcagttttctgccaccaaccaataaatgtaactgcatccttccctgtgagaaaaggtggccttctatctgtgcttgtccttatcctcatcaaggtttttgccctgtggagatctcttctgcctccatggtgtatcaacatgggaaaatgctcaagtctctcttcttccctcagcctcatgtttcccaactatgtttcccatgttaccctccacagtacaactttctttcaaagttcatcaaggacctccttgaagcaaaagccaatggaaacgcctgtgtgcttagggtgtatgtacaggtttcattaatgtaatacattcttagaagtagaatatgcgctcctgactttgacaggtagtgcagcttgtcccaatttacattttacgtcctacacatgcttgccaccctcctgaccacctattgtcctgtctaagctccagacagtagagatgggtcttgattgcagtcacatttcccagacctagctcagagtgtgacatggaggtgtctggcaaatatttgtttagtgaaggaatttgagaactcttgagggcagagtagtacctgaggaaaattttaattaaaaaaaaaattagcagcagttgggaatgtcaatcccataatgttcagacactatactctagctactagactatgaattgaagggaaatcagctatggttcttctctactgctgagtaggactttattaaaaacaaaacaacaaccaaaaaaacctctttctttgattagattaagttacaatagttattgtaaggttgttgatacaaacaatcttttgatattaatcataatttaaaattacataaatctacttgggattaaggtccctcttcccctcaagcattttcatattgttttgtgaagtaatttgggtgaagctttcttctcagataagtgaatgctcatgtttgttttctgttttttagggttcagagctttctggagtgatatcttcagcttgtgataaagagtcaaatatgcaagtataatcagtgcattaatctattattagtttcctttaagtgctcttaggtacattgttgtaaataatgtattttcccccattgtagggaacgaagagtgatcacgatttctaaatcagaatattctgtgcactcatctttggcatccaaagttgatgttgagcaggttgttatgtattgcaaggagaagcttattcgtggggaatcagaattttcctttgaagaattgagagcccagaaatacaatcaacggagaaagcatgagcaatggggtacttgcaatcttgtatttttagttattcttatgtcacataaaaaaatcctcatctctgagtaattacttttttaaagaataattgactatgttgaaagactgcaagaaagtcttcatctcatcctatcagaagcccagaaatcattattaacccattttgcgtttgccccgagaaaactgcgctggcagcaagctgcactttttttttctgaattggaaattgcttaaccactagtgtagcagccaagttagtccaaggactaaattgatgtcttggcagcaaactcatagttgaaagagtactaaattagatatccataccagtgtcatcttagctttagtgaaataaatatttaaaaatttttcagtattatctgtatatagtaattctaaacctctaggtcagttatttgaacctttattccactcaggacttttatactatctaagttatttgggctatagccattctgggcctttcttttctgttcattacttttcatactcggttgacaacagagaagacaagtcagttaacacagaggactcattttgtgctgggcatagatgtgtttttctttcacatgctgtgaccagaagttttaagccagactctttgacttgcctgtggcatgactctgttaaccagttgttggaaatgggactgaccacagcatgcttgaagccctgatcatttagtgcagttcacttctacttagaaagtctctagaaatttttatcttataaaaacaaataaaaatttattttaaaatgatttgcacaatcatgattgtttacaagaacagtcatgtatatgatggctacaaaaatctttactattatactgtgctattattattatttttgatcagcatgtagtttttttttttttttagtaatttacatgtcctaaacatgtagtagccaagctgtgggcaggtaaaaattaaaaggtaatacaagtttcacttctaaaaccaaatatgagaaagactaataaaaaaatcggccccctaaaatataaccctttcctcattttgcatgtattcctatgatgacctggatttaaattttgcatgcaaaccatttctatctttcctaaagtaaatgaagacagacattatatgaaaaggaaagaagcaaatgcttttgaagaacagctattaaaacagaaaatggatgaacttcataagaagttgcatcaggtggtggagacatcccatgaggatctgcccgcttcccaggaaaggtccgaggtatgttgtgctcctcatgacacatcctgtgcccagcagcaggaatggcagtttgatttgttcctttctatgtgctgttttagagttaattctgatgttaatttagctagtaactttctgaaagtctaaaataatttgacatagacgttcacaatgtagagtgagagtggaaagttacaaaacagaatggtagtatgttttacatgtttgtgtatgtgtacatgtctatatattcatgtatttatatatagacctttttctggtttttgtacagtgactattgtgtaatgaaaattggagtatagtactctcaataatttatcatttagatatattttttgtttgccattatttcatcttggaaaagcagagaagtgatgagtgtgttagagccacatatattttcttaaaattagtagtgaatgaaggagattggaaataaactcatttaaactgtataatggttgcttaatctttcatattatatgtttgtctatgacataggatacgatgaagataaaatactttattttcttacatatttggaaagtataaaaatatgtgactagatggttttttaaaatatcacatgaaaggtgtgtatatatgtatatatgaaggagagcattcatttgtatatatgtatgtatgtatgcatacacacacacacacacacacacacacacacacaaacattctttttcttttttttttaatttttagacggggtcttgctctgtcacccatgctagagtgcagtggtatgataactgttcattgtatcctccttagtagctgcaaccacaggcatgtgccaccacacccacctaattttttattttatttttatagagatggggtctcgccatgttgcccagcctggtgtcaaactcctgggctcaagcgatcctcttgcctcagcctcccaaagtgttgtgattacaggtgtgagccaccacgtctggtctgaatgttctcctttattgctaactgctatagtttgtatttttccagacttattgtgtatgaaaacacataaatatgaatacaatagaacgttctacataaataagacttattttctgctttttctacctaacacctctgatagatctttcactgctattgcatagatatctaactaattctacttgcagcatagtcttctgtcataccttataaaagggagtgtatcatgtagaaactgttagaaatcatgctacctttcaagtgtatgtacctaaaatgctgtcagtctgccctctataaacttcggactgtgcactcacattaacagtgtgtaaaaggacttgtttcttgtacacatttggctaacattaactatactaaatcttttcaagcacctgatgtagtttctttaattataggtagatttggacattttttggatacatttcgtggctgtttaacttctttcctttaaattgactgaatggctttgtccatttttctattgagtcatttcattttttttctgatttgtttggatttctttttgtataatttatattttccctggatagttgcaagaaattgttaataaattgttctccctggctcctttcctgtggtatatccctggttcccatgtcgttatctctccttactgtcctcatttcgaaggcacactttctccagtagcttatttaaaaaaaaaaaaaaaaaaggcaacagcagcatgtttgaggggttagtttttgaggtctcttgcatgtctaaaagcatctttattttaccgtcacatttggttgataatttggttgggcacaatgttctaggagggaacttacattccctcagagtttttaaagacactccttcattgttttttggcttgcgctattggtgtggaaaaacccagagtccttctgattgttggttctttgatgtgatgtttgtttttctctagaggggtgtagaatcatttttccctgctgtattgtgacatagtgatgtatctggtatttatcttttcatccattatacttagtgcttaaatgttctagttttgcaattctggggaattttcttgatatatattttcagaggtggatattttttcctcatactctctgttaggctatcctggactggtcatttaattttcttaaatttcaccattttctatctttgtccttttttccccctaattttctttgagattgccttaatttttatggccatcttattaaattctttttttttttttttttttgagatggagtctcactgtctcccaggctggagggcagtggcatggtctcaactcactgcaagctccgcctcccgggttcacgccattctcctgcctcagcctcctgagtagctgggactacaggcgcctgccaccatgcctggctaattttttttgtatttttagtagagacagggtttcaccgtgttaccaggatggtcttgatctcctgacctcgtgatccgcccaccttggccccccaaagtgttgggattacaggcttgagccacagtgcccggccagcatctgcttttaaacagaattttacaatgttcctatcttcacctccaccttcacttccattctgaggtgtagctagcattgtagatttctgaacttgtctagcaattagggacacaccgctcctagcctccttcaacagctatgtgaagtgttagaattccttcactgtcatgttggtgagatttttggagtatatcaagccactgtctttaactagaagcctccctttttcaaacttctctgtatgaatagcatcaggatatattttccaagtagattgcctgttgtctgtaaatcatttattgatctgctcagcctttccccattgatttaaaatatctttaccatgtactaaattttcatatatacaagatccaattctaaaatatctatacctttgctttagtcagtagatctcttcttgatcatttcataggtgtatttactacaactttctttttttttgagacggaatctcccactatcgcccaggctggagtgcagtggtgcaatctccgctcactgcaacctccgcttcctgggttcaagtaattctcctgcctcagcctcctgagcagctgggattacaggcgcccgccaccatgcccagctaattttttctatttttaataaagatgaggtttcactatgttggccaggctgatcgtgaactcctgaccttgtgatccacctacctcggcctccaactttcttatgtgttttggtgtctggtggagaaaatctctggtattgttcagaatatttcttcagaattgaatattatgatgatttttaatctttactaatttggtaggtgagaaaatggtgtaggttatcatttttgctgacgaatgaggatgaggtttttatatttttttccattagtctgtaaaataactattcttgccctagacatttggtagtgtgtgtttgtttgtgttttgaggcaggggctcactctgtcatctaggctggaatgcagtggtgcaatctcagctcactgcagcctcctcctcccaggctcaagtgatcctcccacctcagcttcctgagtagctgggactacagacacatgcttccatgtccagctaatttcttgtatttttttgtagagacagggttttgccatgttgcctagcctggtctcaaactcttgagctcaagcaaaccaccagcctcggtctcccaaagttctgggattgattacaggcttgagccacccatgcctggctggtgtttttcttaacaatttataagcatacttttatatggtgagaaattaactcatctaactttgtaacactaaagcatacaattacagtcttacactgatgtgagtagcaaagcaaagattttaaatttagagcttgttatgcttcctgttgtgagacaggcttttgtggcagttattattgcaatttatatttgtgtttcctattcttcaaagtgaaaacggctatgaaaagtattttatttatttatttttttccctttttcaagccctatctcatataccaatctaagggtattttaatgggaggaaaaccgtaatgagcttttgataacactgatttgtcgaccttttcccaaaattaagtaaagagaaataagataatacttaaatgctgatacaactatagagacttgttatttcagtggttagaaattataagctgctgatggtgtctgtggttcagaagctacaaagcatccattttgtagagtggtctttttgttgttgactgtacatttcagaatgcttgaagaaggagtatggggaaacttcaaggaaaaaggaatccattgaagacagatgccatgctttgagaagatgtaatgcctgattagtagtattctggacttcatggttttgtttttgttgtttgtttgtttaatatgaaaggttaatccagcacgtatggggccaagtgtaggctcccagcaggaactgagagcgccatgtcttccagtaacctatcagcagacaccagtgaacatggaaaagaacccaagagaggcacctcctgttgttcctcctttggcaaatgctatttctgcagctttggtgtccccagccaccagccagagcattgctcctcctgttcctttgaaagcccagacagtaacagactccatgtttgcagtggccagcaaagatgctgggtaagctgaaggtagtcctagagatcacagtgatgtgagtggcacctgtcaccttctttacatgacctgcattatcaggaacagtatgtaaaagatgaatgatgtctgccttttatttttagataggtatgttgttgaaaaagcaagtggcaaaacattgctcccaatcctttaggcttacttattccatgcttcttttagaatatttattttatactttcgtgaattaaaaattttcagtacctgaaagtcaacagtcactttgtaactgaagaatatacagctgttaggctaaaattccctttgctcactggctttgattgaatacctacagggatcataactgtctagacaattacttgacatgtgttctcatattccttctgtcttcccatagagagcagtttgggattaatacacatgattctgtctctcaaaatgtacctctgcactggaagtttttaccccaattttgagggatttttccagatttcagaaattatagttaatgtcatatcactcgtttaagttacatttttacctccagtcattttggctctcttttagctcgtttttatagggatttgtaaaattaaaaatgctttgcatgttttactttataccttaacagggtttattaagggaactccagcaatgttaaatagacatgttagatccactaccccaagtgcacttaaagtgtgatataaatggcttgtgtgtcatttttttctttcttgataaccattacttttaaatgctagaggacattgcactgtggctgctggcttatcacagcaaaggtatcctgcacagctgaggcgcaccagtgcttctccacgtcctgactctggttagctgcctggagccgggctcaactctttaacctctgtaatgaatgggatcatttgaatagtcataggactctaccacatatagagatggttcttatccctgtaatccctgtgtcacacaaatgtttagtacctggtcttttctgtaagaattcttttcctgaaatggaactgaaaggaaaaaaaaaacagtttatttactaacactgtagaccctaagtagttccatctgtattttaacaggcttgtaattattgactgattcttttttctttctactattatttcttgagagtcagttaaaaattctaatagatcaagcatttttttgttttgttttttttttgttttgagatggagtctcgctcttgttgcccaggctggagtgcaatggtgcgatcttggctcactgcaacctctgcctcctgggttcaagtgattctcctgcctcagcctcccaagtagctgggattacaggtgcctgccagcacaccccgctaatgtttttttgtatttttagtagagaaggggtttcaccatattggccaggctggtctcgaacttctgacctcaggtgatcctcccgcctcggcctcccaaagtgctgggattacaggcgtgagccaccaccgcacccagcctagatcaagcattttattctctagtgtgtctcaagagttttctcttccagatgtgtgaataagagtactcatgaattcaagccacagagtggagcagagatcaaagaaggtaatgtttaattataataaatgtgtttctgtccagattcctctgtatcactcagaggtgtattttgtggctgtggtttatgaaggcttcaggccttaatgaacctgagtgttagatttcctattcttagagtataggttatttatccctgaaccatttcaaataaatgtagaaatccacttgttagtctcatcttctttaacattctttggaaatgtaatttgtgaatacatttctagtaaatttctcaggaaattaatccaaaacagagtcatctttagtatgttaggtaggaaaggttatcaaaagtttaattaggagtgttacactgttattcggtactactttgttagaggcatttgcataggagataagtcttataaataataagatgcacaggttgggctttcacttctccgctgtgtgactgggacattttttttctggacagtttggtgaggaggagggctgtttgaaatagctggaggttcattaactgaaccaagacttactgagcctgctctgtaggtgccaggcactgttatacatagttagggatgaagtcatgaacaaaaaatctccacccacacagagggggaaagaaatgtactattggagttatggggttgaaatttcagtcaaggtgatatttgggtaaagggctaaagttagggagctaccatgccattagcttgggcaacttttcagacagagggaatattaagtgctaagccctcaagcaggaaaatctctgatatattctaagcacagcaaagggaccaatgtggggaggtaagcagggagaggaggaaggtgaggcctgaccaaacaggacccaggctgtgcagggccttgtattctatgcctgactgcagtggaatgagatgggaagccaatcttaagatttacattgtgactatgaacttgggatacagtggcactaagggtataatttatgacaaagttgctaatctggtataatccagaccaaccactcaatctctctcagccttcatttccttttctgtaaaaggataattttcacctcatttacttcataggactattataaagataaaaatgaaatatatgaaagcactataatactggaaattcttagtgataatttttaacaatgacaaactgttttaattgtaacttacttaaattgtgtgtcttttaagttattctgatttccctactgataccacattttgtctccatttctttgctagggtgtgaaacacataaggttgccaacacaagttcttttcacacaactccaaacacatcactgggaatggttcaggcaacgccatccaaagtgcagccatcacccaccgtgcacacaaaagaagcattaggtaaagtattttatctgagtgtgtagcacctgatgacaagttaatgaaagctcttttgcaacctgtttacaattattctttttgttctttaaggtttcatcatgaatatgtttcaggctcctacacttcctgatatttctgatgacaaagatgaatggcaatctctagatcaaaatgaagatgcatttgaagcccagtttcaaagtaataactatttaaaagctactaagtgcatagcattataggtggttatcacagaaaatatcaagaattatttaagaggtgaccctgcccttgattagcttgtcacataaaggcagggaatgcatgaaataaaaataagacagttcttgacaaggtactcaatgtgtgtgatagatttgcttgattaaagggaaaaaaaaaaaaagaatagtgctaaagaaggacaaaacccccatggataagaagggctgagtactcaaggtgtgacttgagccttcactggtagaggaatggctggggcagagtattagaggaggctggcagctagcccacatttgtctagagtcaggggattcatgctagaagccagagatcatgataaagataagtagaagccaattagactcaggaggacttgaaatgtaaagctaagagcttaattctttcttgaaggaaatggaaaacgaaaccctgagagcgtttattgagtgagtcaggtgacaatagtactgatttaggagaatgattaacaccttgctgatatgtggcagggactcgtgacctgggacttgagtacaaaaccctgttaccatagttaagtcacttcatctcactatagtgacttactgcctagtatttgaaaagctgatattagttcttttctgtcagctgttagtcctttttcttatttgtagttgaagtttaatataaaggatgttttttcctagtacaataattagatgctattttttattctgttgcagaaaatgtaaggtcatctggggcttggggagtcaataagatcatctcttctttgtcatctgcttttcatgtgtttgaagatggaaacaaagaaaattatgggtaaaaaaataccatctagttaatgggatgctgccgagttttctctgggaccagaggtggtggggtggtgaggagagaatgtgaactgccaatcacatggtcaaatgagccttttgaccacacaaccaggggggtgttgccaaagttctccagatttacagtactgcaggaattcatttttggcttctaaaagttatgtgacagaaatttctgtacttcccaccctcaagtaatgataggtctacttttataagtcatgttaatttgattacactcagttttgctagaactgctataaaagcaaggaatatctatataaagattaactcattaaataggataagtagagaacttttctaatggtcaagtgatagcatttatttccttagcatattttactatttataatttagcaaatctttccttagattaccacagcctaaaaataaacccacaggagccaggacctttggagaacgctctgtcagcagacttccttcaaaaccaaaggtaaacaaacctgttttatctatgaaatgggtcctacaacccatccgctttattctaccaaatgattatgccagtcagaggatattgtgtatgtgaaactatgctaaaaactatgaaacataggaagaatatgtttcttttaggacattatttaataattattcaagaagaaacagggtatgtgcatattttccaagtgtcctaccaaaattatttattaatattcattactgtggtggtttcacatttatccacaaattctttgaatttttttcctccagtttaattcatctccttttgagtgtggctagatttggtgacttgcttcagacaaaaagcaaagggaaagggaaaattagattacagtagggaaacatgggagattctgcctaatcaagtgattgggttaaccaggaataagtcatgttgacagcagatatcccctaatatgatgtaatgagaagaacatttcacctctgatatccttcccaaaaatctgtaaccccagtctaatcatgagaaaacatcaaataagcccaaactgtgtagggacattctacggagtttctgactagtgttcaaaagtgtcagtacaaaaaagactcggaaaggccaatagacaatgacagactcaaggaggctaagaacacttgagaactaaaggtgacatgggatcctggattggatccctgaacagaggaggcacattagtgggaaaaaaaaggtgaaatccaaactacagttaatagtactatttcatttttacaaatgtgccacagttctataagaagttgacattagaggaagcttggtgaggagggtatgtggaaattctgtgctatctttgtaactcttctgtaaatcacaactttttcaaattaaaaaatatatatataatttgaaaacaaaaatgtggctcttgctgtaatgtaactccactgattttccagttctggggaaaagaactgaaccatgatattgtgggctgtattagccaggggttgacatctgtttcttctttaatcctcatttctttggatcttaaagtgttattgaataaggtttcatggactaaagagggagattgctgcttttttttcatttcatcttctgttataggaggaagtgcctcatgctgaagagtttttggatgactcaactgtatggggtattcgctgcaacaaaaccctggcacccagtcctaagagcccaggagacttcacatctgctgcacaacttgcgtctacaccattccacaagcttccagtggagtcagtgcacattttagaagataaaggtgtgtgttacactgttttagtgtctgtcttctgccaactttgattctttcagttttcttcatgaagtttgattcttgtagttttcttcatggaaattccacatgggaactttgaaaatcataaagaagaaacttaaaatctgttcattgtatttttgttcataggtttttttttcctttggcatattgtcttcctaaagtctatgtatttttaaaatataatagcttagattataggtagaatgggagaaaatctatagaagcatttaaaggaaataaggtccaacccatttgtatagatagagcatgtttattttgtttcatagcaaacaaaacagccactacagacattaaattatttgaatgctaaaaataatgaacatttatattttctaatttaataagagtaacagccaattttagtcctagatgtgtgtctacacacatatatgtcaactttattagacatagccaagtacgatagtcagaaagtcttatttttcctacttttagtgatctgactttaagaaagtaatgataaaactcacaagtagtccttatttctaccgtttcaaatctatcaccctatatatttaaaaattcatcatatatctgaattgaatcctaacatatgacattgtcattgagcacagataattgttaactattaagtaccaacctacaaactagacagtcctcttggtatccacagaggattggttccaggaacccctgcagataccaaaatccaggtggatgctcaagttccatagttgaccctgcagaacttgtggatatggaacctgtgaatacagagggctgactgtatactaactatcattgctcacgcttttaaaatatagcaattgtttaccaaagcaataatagaagagctgccaaagaatttcacttcattggatgaaagcatattttaatgtgggttctgagcctatagacctaaacatttttgaccaaggatttcttagagtgctaatccaatataataaatttcttttctgaatcttaaaggagaggtcagttgaaactttgacaattgccaagcaccatcacaagcttgcttttaattaaaaaaaaaaaaaaaaaagattaaagccttttccatccaggaaaagtagtttaatgagtctaaagaatccttcaaaaagtcaatattggctattcttaagagtatttggcactttggctcgataaacaaaaactaatgttctagtgctaaaaagtagtaacacctgttcagtgaaggagtatctgataaaatgtaatccaatatacttggctgtgtgcagtattataatcacttggtagaaatttattctgtatttctgttcttcctagtttacctatctatagatagattttttttttaattatggagagtaataaatattgccaggttgctttctgatttaaacacaaaatcgtttcaataaattaaatgctaatttagtcaatcaactaattgactacaacatgttaaagtgaaaaacccaaaatctctgccctccagaagcattgtagccttttactctccatgttcttgtcttcaggttctcctgaagctgggtgtagccctgccatccgtaccagtaacttcccatggtctggtcatcctgcccacaatggacttgccactctctcgaccccttttttcttgaaggattataggaattagatgtagagttgaaatgctcacatatattagtagtagattttatttgtttgtttgtttttaagagatacggtcttgctatgttgcccaggctgagtgcagtgcagcctcaaactcctgggctcaagtgatcctcctacctcagcctcttgagtagctagggctacaggctcctaccaccacatctggttaattttaaaaagttattttagggatagggtctcactatgttgctcagccttgcctcaaactactggcctcaagtgatcctcccacctcagcctcccaaagcactgggatataggcatgagccactgtgcctggccagtagtggatttttttaaagtgattttttcctcccatttttttaatcttattatacattttacaatggaacactattttgaaatcataatgcaagtcagtgtcaaaagaaatcctagactttgtaaccatatcaaatggtgtgtgttgtgcacacatgtgcatctaacatatcttgtctctaatttttgaatctttcagaaaatgtggtagcaaaacagtgtacccaggcgactttggattcttgtgaggaaaacatggtggtgccttcaagggatggaaaattcaggtattgtgagggtttatttggttctgccattctcttcattttcattctaacattgtttaccattttcattctagctttgccttttaggctgtaatagaatacctaattttagccttaaaggccaataaagattttatggactagtagctttaagtcagaaggtactctccgtgaatatacatacaacagtgaacctaagcacttgatacatcaggccggtgcttgatgagaaaacatcagagaaacccaaattgaaggacattctccagaatacctggccagtactcctcaaaactgtcaaggtcttgggaaactaagaaagactaagaaactgtcacagatgaaagaagagtaaagagacatagcaactaaatgcaacctggtacccaggactagatcctgaagcagaagttccttagtgaaaagagtggtgaaattgaatgatgtctacagtttagttaatagtaatggaacaaatgttggtttattagttttgacaaaggtaccattgtaataggaaaggataatcttagcagaaattgagtgaggagtatacaggaattctctattatctttgcaacatttctttatacctaaaattattacaaagaaagtatagttgaaaaaagtttacaacggaaaaatgtgacaagtgaaaatagcagtgtatgaaattgcatgtataaatttatttgtataaaaatacatacttcagtatgtttaggtagatattgattgggggtgtatgtggagatatatgtgcagtcagttctcattattcactataattctatagagtcaccacaaacactgaattagtgaataccgaatattcttaaggggaatacagacagcatccttcaagcctctaataacaacattttgttaaaaaacaccttatttattatatattgtcaattcattaacattgaatttatgtccagcaacactgacttacatctaaataaagcttatctaatacacatattttcacaggtttctagtgcttaggaacattagagagcacttcagcactatactttgggaccattttcaataccaaaatcaccaagaaaaagcacaaagacacaaaaattgtgacactaagtacagctcgaaaaggatacttgtttgcagtatgagagctggaaccggaaggctgagtgtcaccttgttcaaccttagctcagaacatgtatgttaggtggctcaatttttcatcactctgcgttctgtaaatgactgaaaaatcactatgagtattgatttgaagcttacaaataaattttagcatgcaggtgaattcacaaatatgaaatccattaataataaggatcaactgtatactgtgtgtgtgtgtgtgtgtgtgtgtgtgtatggatgtatatgtatacatatacttccatgtacagtcatgcagttgcttaacaactgggatactttctgagaaatgtgtctttaggcagtttcattgttacatgaacatcagagtgtatttacatgaacttagatggtttgattagtttactacacacctaggctatatggtataacctgtggctcataggctaaaaacatgtacagcatgttattgtattgaatactataggcaatggcaacagagtggtgtaagaatttgtgtatgtaaacatagagaagatatagtaaaaatacagtgtaaaagataaaaaatggtgttctgtatagggcacttcccatgaatggagcttgcaggactgaagttgctctgggtgggtcagtgagtgagtgagtggtgagtgaacgtgagggcctaggacattactgtgcactgctgtagacttcagaaacactatagttaggttacactaaacttataagaaaaatttttcttcagtaataaattagccttagcttactgtgagctttttactttataaacttaaaaagttttatctttttgacttttgtaacaacacttagcttaaaaaacaaacacattgtacaactatacaaaaatattttttctttatatcattctataagcattaaaaaaattttttttttcactttttaaacttttttgttaaaaacgaccacacaaacatacacattagctgaggcctacacacccagggtcaggatcatcagacatcactaggagactggaggttttcggctccattatgatcctatggggccaccattgcatatgctgtcctctgaattgttgttatgcagcacatgactatatatatggaagtgtactggagtgttgtattgtgattgacattttctgtttgtttcaatgttataaaagcagccatttttggaataaagttaaatattcagtcttgatgatagtagtgtcgcatagatgcagcttggagaaataaacccactcctgacatttcctactaaagaatatcccatgtattacctcacctatttatctaatataaccatatcttgattttattatttctgttcatattgtactagctgtatattttcatagatttgtttgtctaaaaatgctttaatcaacttttagtctgtgaggctattgtgaaatgtcatttctagaatgagaagggaatttcatgtgactgaatccaacagatttctaatcatgtggtgttttggtttctttattcctttcacacgtccagtccaattcaagagaaaagcccaaaacaggccttgtcgtctcacatgtattcagcatccttacttcgtctgagccagcctgctgcaggtggggtacttacctgtgaggcagagttgggcgttgaggcttgcagactcacagacactgacgctgccattgcagaagatccaccagatgctattgctgggctccaagcagaatggatgcagatgagttcacttgggactgttgatgctccaagtacgaacactcactctttgttatgcccttgaatcaggacaggagcatggggaaagctgtcccatgaaagaaacccacagtgggacttgaatgtcactgagtagaacagatgtcagtgagttcagatgaaacttgcataatgcatcacaatggagtaacagtagcatacttgaagggcaaatcaattttaattttagaaggtatcaaaataactactgttggaagagggaattagaatttgacagcctactacgtgccaggcttttaatctaatactattatattttacattttacagaagtaaactgaggctgaaggttaaagagacacccccccccgcccacccccttgttacacataaacagtctggcatagtggttaagagcacagagtctggagatggactgactatgttctaatcctagctccctcacctaagtagtcacgtgatcttgaccaagatcatttcaattttccatatccctcttttctgtagagttgagctgatgctagtacctaccttagaggcttattgtaagaaccaagtaaattaataaagcactgagaacagtgttctgcatgtgcttagcgctgagtgagtgttaaccatgttggattagtatttgataactgccactaatataattttttgtaacattccaggttggagagaaagctttttcttacttttagaaattatttctcttttgtggacccaaagtatatctcatatatgcaaattgcacataggtagtataagttttgtggatataagtggaaaagaaattaaataatatgtgtctatctgcgcacattagaagtaactaatgtccacatctgcccttaagacatgtatccctaattgtgttaaagatagaatctagccgttccagttgagtggagcaaatgcacctagagttgattccctttgtcacaactaaatattgatccaaatttgtagatctaaaatggcaaataataaactgtgcagagctaccaattttgacttttaaaaatagttcttttttattttgaattaatactcttataaggctttgaaagcttacttagtaaatatctctactcactttgtctataatttatttggtaaagttcttgagtactcaattcatgttccctttttttttttttttctcattcctttaagacttcattgttgggaacccatgggatgataagctgattttcaaacttttatctgggctttctaaaccagtgagttcctatccaaatacttttgaatggcaatgtaaacttccagccatcaagcccaagactgaatttcaattgggtaagaattatttggataatataactttaaattcttgtttctctatgagaagttgatggtaacgtgtgtgtgtgtgtgtgtgtgtgattctcctatttgccccccaacctccaatagggagttgtatctgtaatactaaactgatcattttgttaagccatgattgtaggattgtgcttgctgttgggactataactcctataactcatagagggcaatttgccaatatctattaaaattaaaaatgcatttacttttaaagccagctatccacttttaaggatttcctatagatattattatatacttctatagtaaaatactatagtaacattggcaacagaacaagaaagctcactctgtactgatagggaatgagctccaaaacataccatactgttaaaagggcagagccgtatgtattatatgccacaattaaaacagttagctgtaggtgggagtgggaaacaatggtagcaagacttcacaatattcccttttaagttttttaatgaatagactttatttttaagagaagttttaagcttacagaaaaattcagcataaagtacatattcctacctccccatatatacacacacagattttcgtgttactaacatcttgcatgagtgtggtacatttgttaaaattaagccaatgttgatgcattattaattgaagtgctagtttacattagggttcactctttgggttgtatatcctgtggggttttttacgaatgtagtacagtgacatgtatccatcattacagtatcatacagaatcatttcctcaccctaaaaatcccctgtgcctcacctattcatcccttcctccttgtcccccaacgcctggcaaccactgattgttttgctgtctgtgtagttttgccttttccataatgtcatatagttggaatcatatagtatatagccttttcaactggcatcttttacttagcaatatgcatttaaggttcccttgtgtcatttcatgatttgatagcttttttttttttatcactgaataatgtttagtgcatgaatgtaccacaccgttaaacctttccactcatctaatgaaagagatcttggttacttccaagttttggcaattatgaataaagttgctgtaaacatctgtgtgcaagtttttgtgtggacataagttttcaactcataatttgggtaaataccaaggagtgtaattgcagggttatatgatgagagtatgtttacttttgtaagaaacttccaaagtgactgtaccatttagcattcccaccaacagtgaataagaattcctgttccccagtcttgccctcattaggtggttgtcagcgttttgggttttagccattctgatacgtgaacagtgatatctcaatcttgtttgaagtttcaattacctgaagacatactgtgttgaatattttttcatatgcttatttgccatcagtatatcttcagtgagatgtctatccagatcttttgtccattttctaattggttggttggtttcttatcattgccttgttcctgatcttagggggaaagcatctacatagtttattacctataagtatgattttagctgtaggttttttgtaaatgttctttgtcaagttaagaaagtatctctctattcctagtttgctgagagggttttttttttaatcataagtgggtgttggattttatttatcgtgctcctttcaatattttctgcatttattgatatgattatatgattctttgttgatgtgatggatttcattaattgaaattaattaattaagtgttgaactagccttgtatacctgggataaattgcacttggttgttatagtgtataattctttttctacattgttggattggatttacttataattctttttacacattgttggattggatttactaatattttgctgaagatgtttgtatccgtgttcatgagaggtactggtctatagttttcctttcttgtaatatctttatctggtcttggtgtcagggaaatgctggccccttagagccccttaggatgagataggaagtattccctctgcttctttcatctgcgagagattgttgagaatggatataatttgttcctcaaatgtttgacagaattcactagtgaacccatctgagcctagtgcttcccgttttggaaggttatcaattactgattccatttctttaacagatataggactgttcagattatctatttctcttttgtgggctttggtagattgcgtctttcaaggaatttgttcatttcatctcaattctcatttgtggatatggcattccactattgatttctactgtaatgtttatttcttttattctgcttactttagttttaatttgctcttttttctagtttcttaaggtagaatctcattgatttttagatcttcttttctaatatatgtatttagtgctacaaattttcctttactgcgtcccacaaattttggtaaattgtatttccattttcatttggttcaaaatatttttaaatttctcttgagacttctttgaccaatgtggtattcagaagtatgtttaatctccaagtatttgggggactttacctttcatactgtgtatgatttctgttcttttaaatttggtaaaatgttttatggcccagaatgttgtctattttggtgaatattccatgtgagcttgagaagaatgtatattctgctgttattcgatgaagtattccataaatgtcaattagatccaattgattgatgctaccattcagttcaaccatgtttttactgctgatttcctgcctgctttatctgccccttcccgtccctccctgtcccgcccctcccctcccctccccttcttttctttctgtgttgaaacagggtatcactctgtcatccagactagggtgcagtggcacaatcttggctcactgcaacctcaaaatcctggattcaagcaatcctttggccccagcttcctgagtagttaggactacagtcatgcaccacaacatgcagcttttttttttttttttttttttgggtagagatagggttctcgctatgttgcccaggtctcgaacttctgacctcaatccatctttctgtcttggcctcccaaagtgctgggattacaggtgtgagccaccacacccagttgatctgtccatttctgatggaagggtgttgaagtctccaactataatagtgaattcatctttttctccttgtagttgtattagttttcggtaacttttgactcacatattttgacactctcttgttaggcttatacacattatgtcttcttggagaattaatccctttaacattatataatgcaggccaggcacagttactcacacctgtaatccagcactttgggagccaaggcaataggatcagctgaggccaggagtttgagacaagtctggacaatgcattgaggccttgtctctacaaatatttttttaaaaaaattaaccaggcatggcaacacgtgcctgtaagtcccagctacttgggaggctgaggctggaggatcacttatgcagaggagttcagattagccagggaacatagcaagaccttgtcttacacacacacacacacacacacacacatacacgtaacgccattttctatgctgataattgttttgctctgaagtctgctctgtcagaaatgaatatagctattattacattttcttttattagtgttagcatggtatgtctttttctatccctttacttttttttttttttgagaaggagtctcgctctatcacccaggctggagtgtagtgccgtagtactatgatcttggctcattgccacctcc

SEQ ID NO: 256 - DNA, 28327 bp, Homo sapiens
  source 1..28327: mol_type = other DNA
aatgaggacgcgtggacgcgcggcacgccggtcctggctacaggcgcggcgtttgaagaaaaactgtcactgaagagtcatggtggggcccgggcctaccgctgctgccgctgtcggtgagtacgaccgctgttcccgttattctcaggcgttggaacacggccggggaagtaggaggccaccgagtgagttcgtcccgcgggaggtgcccgtccgctcgcctgcctaagtttcccctgggcgttttccatcccgggagcgcagacgggacccccaggtagacgtctgggtcctgggcgggggaggctgtgcgcaggcccagatacctcacgggcgtatttccagaaagccctgcagcagccttgcaaagagatgtcattgtcaccacgttccggataaagaaactgaggccccttgctcgggttttcaccagcagtgggaagctgcgcgctgttttgatccacatttggctccaggcagagccgggcgtggtcctctgtgccaggaggcggggtctggccgaagcccgggtctcctgcctctggcggggctctcactccacacctctcagcctgcggtggttagaagttgattggttaaatctgcacccagggctaaggcttctgcgttccctaatctcttagatgtgcttggagccctttcctacctttcaaaatactcctgctcagatgccactttctccaagatacgcaccgttgttttgtttcatccattattcctgttgatgcctacgaggtcctaggcactttacataacaagctttaaagatggcatttctgtccgccttataggcttagcagcagcaaagtttgctaatttgctagaagtcacggaggtgggactccaaccccctatgtcagcccctacgctctacattgcccgccaagctgtctctaaggatagatacatgagcatcagagagcaaaacagggcaactccgttcagatgaggttaagagtcgtttggcacccctgtcgtctttttgtcttccttcacatcattatttacttttaaccttttctagccacctactcccctcatttatgccctacctctgaactcccatacttcttttcgtctcttatggcccttagattttaccttatactgtaattgttgctgtgttgattttatctccactactagtttgaaagttcttgaaggcagaaattattgacttgtcatcccctcacaaatggcttgcgtagaaagtcaccatagtataggtgtctgccgtgagcagaccgggcgtattttatccttagtaccaacaaaggaagccatataagggtttgtgggtaaaaatcatcatccctgtaaaaaaacaaaagacgtaagaccaggcctggctcaccagctcaggtgggccagtaacagaaattcttcaaaacagactgttgtagctgagaacagtggctgtgagctccagggttagaaaagcctgttttcaagtcctggaattgccacatattagctgggtaactttgggcatgacatttactctctctgaatttcagattgcaaaaactcattggattgttttgtggattgaaagcaataatgtaaatttaggccgagtgctttgacttacgcctgtaatcctagcactttgggaggccaaagcaggagggtcacttgagctcaggaatttgagaccacccctggcaacatagtgagatcctgtctctacaaaaaatttttttaaaattatccagcatggtggtacacgcctgtattcccagctactcaggagactgaggtgtgaggattgctagaacctgggagatcaagtcaacagtgagccgtggttgtgccactgccctccaacctcagtgacagaggaagaccctgtctcaaaaaaaaaaaaaaaagtagtaagtttaaagaacttagtgtaggcctggcatataaatgatattgttgatgttgatgttagcttgaaggcacatttataggactagggattttataacattatgttgcaaaggcaaaatcactagagaaaagtgtcatcttttagaatattaatgaactggttaaaatcttgaactaaagttatgtcgtttgtttgcttgcctgtgttgcagaagagcggcagagaaagcttcaggagtaccttgcagccaagggaaaactgaagagccaaaacaccaagtgagtttatctgtccacagttacgcaagttttgttgccttctttgtactagcaatttaaagcctttttgaaaaatgtcccttttgcttagagtctactcagactgcactgggattctatgataacgcaaaaagagcatttcagtccaggcatgacaaaaacccctgggcagtgcttagtccattggcaaagctttatgcattattactgtgtgaatctccaaaggaaggagggaagaagggtcagtattacctaccatgctggaagctttgcctgtttctgctttttttttcttggggaagttgattctcatgaaggcagtttttggtcaagaacttgaatgaccatggttctggcatttcttgctaaggcaggagagccagttacaatcaatcctccgtagcagagtgataccctctgctcttgggtcattctcttagcatttactgttaaggtagacagaacatgtccacttcatttttatcctttgtagattcttaccatctttgtcgtgttatttgtcctttcttagcattaattaattttttccccatttgagttgctaagtatttatttgaaaattaatttttacaaagttagctttcaccctttattttatcttgggtgtttactcacctctatttccttgattaaatgaacctaattcacttattcaacaaatatttatttagtacctataacatctcagtcacttctgatgctagagataatggcgcttaacaagacagacattcctgccctcccagggcttatgctgtagatgggagagacaaacatcaaacaagtcataatcaaagtccttgttagtctagcaattgtttttggtccatgcagattgattccttctaaattcacctctgttttccaatcctttttctgcatttcctgtctcactagctatatttcatgtgtgtcttggtttttttttttttaatatttctttacccccttaaagttagaagagatagtatttgaagatactgaaaacaaggaaattttttttttttttttttttttttttgagacggagtctcactctgttgcccaggctggagtgcagtggcgcaatcttggctcactgcaagctctgcctcccagtttcacgccattttcctgcctcagcctcccgagtagctgggacaacaggcatgtgccaccatgcccagctaatttttttgtatttttagtagcgatggggtttcactgtgttagccaggatggtctctatttcctgatctcatgatccgcctgccttggcctcccaaagtgctgggattacaggcgtgagccactacgcccagccggaaattttttaaagaagcagttaatggttttatttggcattgtgtcttcggtgtctggcacattgcagtgctccaggaatgatgtgtgaatgagtaagactatataaatatgaaggaaacacatatatctcattaatattgtgagaatgctagatttatgtatagacagtctctgtaaggatcacaaggcaaaaaaaaaaagagtaggagcagttggtggtctccaagggggaggatacagaactaaagaaatgatgataaggagactttattaaatataattttgaattattttgccattacagaaattctaattatttaaaattctattcataatttttaatcactgtacttcccaagcttagcttagaatccttctgtgctgaggattaattttaatttgtcttttataggccttatctaaaatccaagaataattgccagaatcaaccaccttctaaatctgtaagtagaaattagtctttttaaaaatatgcattcataagtatgattagtaataaaaataataaagatgttagcaacctaaagaacatgtatttgaaaggtatttcttacagatataaaaacagtttggtttaataagagacaatcattttttgaaaagtatgacattttttgaaaagtagtttagttttattaaccaagaaaagcctcaagtgaactttagtcctcttgatagctaacatttattgaatgcttactgtgtgcctgatacttttctgacttgcattacctcactgagtcctcacaatcttatgaggctactattagtagccccactttacagataagcaaactaagtcacagaaaggttaaataggtcgtatagctattaagtgacaaagctgagagcctgtgatcttaaccactttggtatgctgccatgaagttaaatagctcagtagtcattaaaagagaacatttgcattgaaccttccaagccacttaacaagtatatgcttcctaatcaatttaatttagctacattagatagaatggtaaaggatccttaacttaaagtttaaatggaagaaattagccctctgaaagaggcacagattattcatctgcaataaaaatctcacctttagttttttaaaacatagtttttatctgtgttctgaaatgtaactaaaacagtgcttcctgaagtgaaaaattctcactggtgagaattttaataagttttaatgattcaccaaatcacttcagtcatatttcagtcatatgcatatgcatatatagacatataagtttttatctgtgttctgaaatgtaactaaaatagtgcttcctgaagtgaaaaattctcactggtgagaattttaataagttttaatgattcaccaaatcacttcagtcatatttcagtcatatgcatatgcatatgtagacatatatatgttgtatgtatacatgacatcattagacactgtgaaggatagcaaaatgtatataaggcaaaatttatgaacaatggtttaacgtttgggaagcactgggttacacttttactttatgcagattgaaccagtatagtatgcaagtcttaaggaaaaatctactggaaagggccctcattcagacttcccagaggcttctctggaagttgacaatactgacttcagtacatcagctcgtaaatgaggatgatacctaccttatctgctttacacagttgtaaaagtaaaaagtgaactcaggaagggaattacagaatttaggagaaactaaaagcacgatgtaaataatagtcatcattacagttatataatgcttgacaatttatataacactttcgatacatgacaacaataactaacacccagacatgtttatatacattacctcactcagaacaaccatgtgaggaagttggccatatgctttaatgtccaaaccaggacactttgagagtaaaaagcagtactctttgaccaacaggcataaatcaaaactatcttgtgaaaaccgggatatatggcatccttcctagataatagatacttttactattattaattttgctgtgaatctaaacctgctctaaaaaagttaattttaaaaagtaatgaagtactgatacatgctacaacatgggtaaatcttgaaaacgttatgctaagtgaaagaagccagacagaaaaggccacatattacatgattccatttatatgacacatctaaaataggcacatctatagacatacagagacagaaagtagactagcggttgccaagaactgcagggagcagaaaatggggagtgactgccaacaagtaaaccaagtttctttctagggtgatgaatatgttctggaattagacagtggtgattgctgtataatagtgtggctatactaaaatccacagaagtgtgcacttactaaaatggtgaattttatggtttgtggattatatcaatttgtttttaatatataagaaagcaactaaaaaaacacatttggaagctttcatgccaacgtccctccacctcttcagtaagcaatgatggagagatccgaggtgtatataaatgttggtgctcaaagattaatccagatatagccattgtgggtataccatccatctctctgcctcccactcccaactccgctgtttcactcctagtaacaccacacacaccgctatcatccagagtagacatctctttgccctcaatgccaaatggttctggttagaaatcctttacatactcgccaagtttatgtagtgattcttcacaatatttgtcaaatcaaaaatagagtggtaactctagcattcccatatcttaccctggaaacatattccataaatctctgtgaaattctcctttctgagtaattgctttcatgagagatgctcaggaattcatagtggcttgcccaattacttaccatatgaattctaaactcccttccctagttttcaaaattctctgtaatcgagtcctacctttcttatccaaacttaaatcacatgactaaacatttgtttattattaacatagactctaaccttaaaaccctgtcctggctgattttacaaatatgactattaagatgttacatgtttattgagagctgtggcagcatatctcaggcctcacatcatctgccacctatctccttgtcactgatctccagggatgagacagaggttcttgagtgatactgtgatgtttacaaaggcagtggtttaaaaaacatatagtgtggctatacaaagtactaggagagatttgttgggaggtaccctaacataagttcattatgtatgtattttttcagggttctttggagggcacttaggatataataggcattcaacaactactgtttgaggcaaattcatttttgaaagagcaagttttgtatattcactgcatctctgcttaattctgtcaagctaaaagattctaatatacttctgataggaactcaagttgtaaaaactacctgttaggacaggtgtggtggctcatacctgttatcccagcactttgggaggccaaggtgcgtggatcactggaggtcaggacttcaagaccaacctggccaatatggtgaaaccccaactttactaaaaatacaaaaaagtagccaggtgtagtgacatgcgcctgtagtccagccacttgcgaggttggggtgggagaattgcttcaacccaggaggcagaggttgcaatgagccaagattgcatcactgcacaccagactgggtgacagagcaagatcctgtctcaaaaaaaaaaaaaaaaaaaaaacacaaaaactacctattagtgagtctttctttactttctgaggattcaactttcttagatgaaattctaaaaatgattattttttttagcatgtgttaaacacagttattattttaaaaacaataagatatgttaaggattttttaatatgtattttctttgttttttcagactattagacccaaaaatgatgttaccaaccatgttgttttgcctgtcaaacctaaaaggtccatcagcattaaactccagcccagaccacctaatactgcagggtcccagaagccgaagttggagccaccaaaacttctgggcaaaaggctgacttcagaatgtgtttcttctaacccatactctaagccttctagcaagagttttcaacagtgtgaagctggatcgtccacaacaggagaactgtcaagaaaacctgtggggtcacttaatatagagcaattgaaaactacaaagcagcagttaacagatcaaggaaatggtaaatgtatagactttatgaataatatccatgttgaaaacgaatctttggataactttctaaaagaaacaaacaaagagaacttgctcgatatcttaacagaacctgagaggaagccagatcctaaattatataccagaagtaagccaaagactgactcttataatcaaaccaagaacagtttagttcctaaacaagccttgggcaaaagttcagttaatagtgctgttctgaaagatagggttaataaacaatttgttggagaaacacaaagcaggactttcccagtaaaatcacagcaactctctagaggagcagatcttgcaagaccaggagtaaaaccctcaaggacggttccctctcactttattcggacccttagtaaagttcagtcatcaaagaaaccagtagtcaagaacatcaaagatataaaggttaataggagtcaatatgaaagaccaaatgaaactaagatacggtcataccctgttactgaacagagagtgaagcacaccaaacccagaacataccccagtttgcttcagggtgaatataacaacagacatccaaacatcaagcaagatcagaagtccagccaagtttgtatacctcagacatcatgtgtactgcaaaagtcaaaagccataagccagaggcctaatttgacagttggcagatttaattcagccattccaagcacccctagcataagaccaaatggaaccagtggtaataaacataacaataatggctttcagcaaaaagcacagactttggactccaagttgaaaaaggctgttccccagaaccattttctgaacaagacagctcccaaaactcaagctgatgtcacaaccgtaaatgggacccaaacaaacccaaatattaaaaagaaggcaacagcagaggatcgaaggtactttgctttaattctaagcttttgcaacttaagatgattaggcaaattgaccatcaagaagactaggtcaggaaataggccataaataatggctcctaagtaatttttaactacagtctgaaaaaagatttgaagcaaatataacaaatattaagacttgacagggctaggtggtacatacacatgttataaatcattttctgtaatcgtatgtttacaatagctttttttttttctttttaagaaattgaaacagaatggatgagtaagaagtagggggtgcagatgtagacactcgttcaataagtgccgtgctagactgaacagcaatagagcagataagtgagttcacatagctaggaagtgagaagatggtaatctcttgtcaagcaaaccagtggttaagttcagaaaagttaccagggaagaaccagaaacttccgtgagtctgagtgggccaagttttggccagtaagctcaagcaggagcagtcagttcaaatacagagttcagatggtagaaatcaagatcttaggccgggcacgctggctcatgcctgtagtcccagcactttgggaggccgaggtgagcggatcacctgaggtcgggagttcgagaccagcctgaccaacatggagaaaccctgtttttactaaaaatacaaaattagccaggcgtggaaatcaagatctcaggttggttaatattaacatacattgattaaaactgagccagtggattttgtacactttctacccaggaccaaatgtagtctcatgaagtgggtgagcctcccaggagaagcacatatgtatacctgcttgaagtagaaaataaggaaatttctgacgagtgaagggagcatgtaaaattagatggttgctaaaaagtgtagcagggtgaagcaaggtacagcttggtacagccctgaacaccaccaccaagctccttgccctcctgaagagacagtaagtaaacaacttaattcagggtgctatgatcaagagagtagggctggaatggctgctttagataaaaggatcagtagaagtactttcaacagcaatgtctgagctgagacctaagtctgagaaaagactggtgacaagaagaaaaacaatcctgagcagaaagagaagtgagtgcagagaccttgaggtggtgaataaggaagtcagggtcccagccctggagctcagcctaggtcagacaacagaggattggtcataagactgtgttgcaggttgaacatgtttgattacaaaagagaaggagtctagagagggagagattcattcactcattctgtaggtgtttcttcagcacctgcagtgtgccaggcgctaggagacacagtgatgagcacacagtgagtctttacctttctggagctaattgtttggtgtatatatagaaagtactagagaaacaaaattatggcatcgaggtcctaggagtaagttgcctttagaaagggaaagttcactcttcgtttatgattagaaggaaggctaaggagatagggaaaatgctaggaacatggaggaagcacatgccaaatgtctcaccttgtatcatcaagtaggtggttggagtgaaggtgagggggcagtatttggggctgaaataataaatattgcatggatgttgctctggagtcagaaatgagagttaatagcattcattcattcaaaacttagttattggcattctggaaaaaccaaaactataaagacaaaaaacggatcagtgattgccaggaggggggcgttaggggtgagactgactaccaaggagcatgagggaattagtgatagtgttgcaaccatcttatagcttgataatagtcagacttaaatgacttgatgcatttgtcaaaactcagaattgcacactaaaaggtgaattttactgtgtgttattaaatacctatgtgtgctaggcactgtgctgggaactggactgccaaggtttctgccttcatagagcttacactctagtggaggagacagaaaaccaacacattgactaaataagacacggtaattacaggtaattgcgtcttcatggaggtgtcatttgaggggaggactgaagatgcaagaccttaaggcaggaatgagtctggatcaagaaacttcaaggaggcagggtacaatggttcacgcctgtaatcccagcaccttgggaggctgaagtggtcagatcacttgaggtcaggagtttgagaccggtttagccaacattgtgaaaccccatctctactaaaaatacaaaaattagccgggtgtggtggcacgcgcctgtaattgcagctacttgggaggctgaggcacaagaatcacttgaacccaggaggcggaggttgcagtgacctgagatcatgccacttcactccagcctgggcaacagagcaaaactgtctcaaaaaaaaaaaaaaaaaaaaagaaaagaaactttaaggatacctgagctcctggagggggtgagtgacagggagactagtgtgatacgaggttggagaggtaggcaggagccagattacactgtgcctttctgccttggaaaatattttgaattttattccaagagctgtggaaagttcttggcagtgacacagcctggggtgctatttaccaaagtaagaaaaatttgtaacagatgcagagatgaaaatcaataactttgtttgtgacagtattaaatttgaaatgcctgtcagacatcaaaagatatcaactaggcggtgggttttacaaagtttggggatccagggagagatctggactgaaatgtacacttggaagtcattattaatatgtagttgtaatttaaagaaactggagtgtctacatccaaacatgaggtctatatgtcttggtgcccctacccccaaaaagcagtctatcacctgttagaagctggagtggaaaatgtgaacagtgggggacacttggcactatcagagatcagctacttaagagccctgactttataggtctagcttatgaaagagtcatgtctggtcaagagagggctaaggaactaggtgaagtgggtcagtttacacaccaagaccttattgagggtagaatgcaggcttggtgggtttgggttgagtgacagcttatgcgtgagagaaatgaattgctgagttagtcatctcaaaaatagagggatgtcttaggaaagcaagtgtcaagtagcatatagtgaagtgaaaactttccgagaaaaataatgcataatcacgaattctatttgaagtctgaagtgctggccacgtgtgatcttagaatcttggtgtctgccttctcgtgggtgggcgcaacccaatgctgccattacccatttgtaaattgttttttaattccattctcctgattttgtctgtagttgaaagtatttaattatactctatctatacatatcatatactttagcagcttgactatgtttaaaaataaataaaaccactctccctttaattgaatttcaggaaacaactagaagaatggcagaaatctaagggaaaaacctataaacggcctcctatggaacttaaaacaaaaagaaaagtaataaaggaaatgaatatttcattctggaagagcattgaaaaagaagaggaagaaaagaaagcacaactcgaactgtccagtaaaattaacaacactctgacagaatgtctgaacctcatcgaaggggtaagtgaagaagataagctcctccagctttggcccaaagtcttataatttttaaacatattcctaaatataatataggagagatagccttcatctaagtagaaatttagctactcttgtaaatacagagtaataataataatgacatgcccataaacagtgtcttttgtgtatctgtgcttttataagcacttagctaagattatctcacataattatcataaccactgttactatgaccactttacaaacaaaactgaggcacaaagaagttggaaaactaatccaaacaaactggctccaaaaggaactttgctttctttgggtatcaagttctgaagagtacacatttaacattgaaactgaggtcagaaggcaagtttctgtgtaaagttggagtattctgaatactctgggtagctacaaatagtatttaaattttatcttggattctgcagataaggataaaatagatggtaggcaaagagtatgatccttaggagaaatttttcctgaaggaaaaatatattaataaaaaatgatggaataaacttctaagatccttgcctagagcaaaactcattcagtcctttggctggtaatgttgaacatcagcaaaaaaaaggaaaagttcagtttaagtctactccaggcaacattttcacaacatccagttaaatattaactatttctccttgtggaattgaacttgagttctttttcttatcctctttttttgttgttgtattatttaaaaatgagtacctttttattattgaaatcatttcaagtaatgcagataaatgatcagccctctccctctacaaacatacatacttaggcatcccaaacttctctctggaggtgaccaccattgccagtcattcattctgttttcatgcatgtccatacagtataggtatgtcgagaaatgaagtattatatttttgtgagttgcaattcttttattcacatttttgtgtactttggttgtcttttcttgtgttttcctagtaccaatgttatgctgacttaggcagatgagttgagtattttcctttttgccctataaactgaaaatagtttgtatgacatgagaattatttttattttttgaaggtttgataaaaacttgcccataaaaatcatctggaccgtgtttctttggaggataattttgtatatatcctctcaatttgttatggggtcattgttctagagttcatatatcttgagtcaactttagtaattttgtgactttttaaagggattttttctcaatctttttaaaagatctcaggttttattgccaaagattttttctcattaatctttttaaaagacctcaggttttattgattattttttctcttgcatcaatgtctgcatctatttttatatttattgctcttttcctagctttttaattgaaaccttagatcatttaaaagtgagtctttcttttttttttttttataaatatgttcagtgctatagcagatttgcctctgaattttactttggtcatatccctcagatttgactaagtaatactctttatcagtcaggatcaagtctgaaaaacaaaccacagaaagaatgtaattggttacacagtatcttatgtgggttctctagaggtggagcctaagaggagaatccatgtgaaagtagtttattaggaagacactccagggaaaactgggaggggagtgaagttgtaggatcagaaaagcgaatccatggacggtgactctggcacagccccacaggggagctctggagacagtgtaggtcacatctctcagagtcatcctgatcagaggcaagggagctacattgttaaagcttccatggtcatttattcatggctgcctcgggcggacaagaattgtcaggcacttctcactctctgggcacatacgagggagcacagatgctggctgtgaaagcacgcggtaagcctgtgtgcacaagatgctgaagggatcagaaggagtgtgggtgctacacacagggctgacagcacacaggaacctgaggtaatgtgataactgtaggaagcagcttgtacccactgggtctaggagaacaaagagaggttagggtatcagaaccaagaagcaggagagacaaaccctggtagaaatgggactccaactgtaaggaaggcatactacccagcagatgatggaggagaggccctgcagggctggggctcagattttgaggaaaagatgctatccatttggtgcttctgctctgaagctgcacagggaggtgggctctgagggggaaaaaaagatgctagaaccaactgttactgccagggtgagggaccgttgctggggtgatgaaagcaaataggaagaagcaagtgtcttccttctccatccctgcagcctccctctcgtgccccctgctggcagagctgagcagggagctgctgcccagcagaaagttttacagagttttatccccagcatcacaaagcagaggatggggtttggggccaatagacaaaagcttcataactgacatatcttgtcattgttcatttctaaatagcttgagattcccattttgagttctttaacccaaaaaatatcttagaaaagtatcttttaatttccagatgtgtagattttttttttctgctgttaatttctaattatattgcattgtagttggtgaatgtggcctatgtgtactctacttgatggattttgttgaaattttctttgtggccttaatatctgatcattcttggtaaatgttccaaaagtgtttgaaaataatgtatatcctatttgtttatttgatctattgctttctgaaagaaatatgccaaagtctgtcactggcactgtgattaatcattgacaatttctcttcatatgtctgtcaatttttactttctattttttaaagttatgttgttaggtacagaaagattcatgacttgctttgatttcttttgtctgattaatcttgccacacctgctttttgttgttagaatatgtctggtagctctggtagctctttttccatccctttactttaagccttcatgggctgacttattttaggtatgtctcatataaatgcacacagttaaatgttttaaacaaatttgaaactctctgcttttaaaaagcaaatttagttcgtacacatttattatgattacttgtatgtttaaacttatgcctgctattttattttgtaattcagcttacatgaattattttttcctcatttctgtgtttaatctagttttatttcataaaataatacactgaaatgaaaataaagtgatagatgtaagctcaaacatgatttgcagaatatatatcatattcttcttgcagttccttttttcattttttttttttttttaagagacagggtttcactcttttgcctagattggagtgcagtgatgccatcatagctcactgcaactttaaacctcctgggtggacccaagtgatcctccacctcagcctcctgagtagctaggactacaggtacacaccactacacccattatagtttacatttttttgtagacacagggtctcactgtgttgcccaggctggtctcaaactcctagcctcaagcagtcctctgcctcagcttcccaaagtgctgggattacaggtgtgaaccacccactgcacctggcctgcagttacttttatttcaagtctttcatgtgaattctaaagtttactcactagtgactttatgatttttgaatggcaaaccttttgagtctgtattcttgtgaaacttgttatttgccttcatgctggaatcatagtttggctgggggaaatttcttaatttcagcttgttttccctggaaaaatttaagtgactgcttcattttctttcttgcatctggagttgttgatttgttaatgtctcacgtcagtctgattctcattcctttataggtaatccttttcttccccctctctggaagcttgtacgattttctttttatctttggttttctattatatttttttctcccattcatcctgcttaactatctgagagccttttcaacctgaacaactgtttctttgttcatttcttgaaattcttcttctacaaccactttgtgtgttgaacttttttccttctagaaactctcttagatggatattggagttattgagtaatggatatatccttcagaactctaaatgttgttttcatactgttcacttcattgttttattacactggtttctaggaggatttcacagctgaattttcagctcacagatgtattcttcagcgctgtccatgcagttgttctgcctttctgttggttatttttcataacagcccattctagttttaggatagcaatactctctcttatcactctgaagatattgactgtgatactcttaaaagtattcctctttgctccagtgttcattcttgtttgttgagttttatgcctctttcatgtagtgttggttttctcaaatgttagtgattctcaattgtgaacttacctttgcgtctcccccatttctagcagtagaaggtgctgcttggctgagtgtgccagtacctggatttctgggcatggtagtgctccccattcgttgggtccatgtcactgtcctgcttacggcacaagccagaagggaaccaaaccagtgaatccatttcaaattatctttttgtgggatttaaccctctttcataaacacctgcataaatccctgacacttacacatatacacccctatgaccttcgcatgcctgtgtcattctttacactgctattagtcctatggaaattctcatcactactcagtgttctcgttattataaatatggaatattatgaatatgtaaatgtttactctaggatttgttttgtttttgtaccatgtaaaaatgaacatatttcttaccttcagctatgataaacattttctatttggtctcatataactcttaaaatttaatgatgaggaagccaggctcagtggctcatgcctgtggtctcagctactcgagaggctaaggtgggaggattgcttgatcccaggaggtagaggttgcagcgagttgtgatcgtaccactgcactccagcctgggcaacagagtaagaccttgtctcaaaaaaaaaaagaaaaattaagccaggcatggtggctcatgcctgtaatcccagcacgttaagaggctgaggtgggcggatcacgaggtcaggagatcaagaccatcctggctaacacggtgaaaccccatctctactaaaaatacaaaaaattagccgagcatgtggtggcatgtgcctgtagtcccagctactggggaggctgaggcaggagacttgcttgaacctgggaggtggaggttgcagtgaaccgagatcgcgccattgcactccagcctggacgacagagcaagactccatctcaaaaaaaaaataataattattattaatctcaaatcattaaaatggataattaaaacaggtgcattttattacatgtacattgtacctcagtaaaattgaaatttttttaaaagttcaaaaatattagtgatcaaaccaatttctgcatacctgctgtaataaatattaggagatgtgagactaacagtgaaatggtaataattacctctggatattttggtttatttcagggtgtaccttctaatgaaatacttaacatattgtccagcattcctgaagctgaaaaatttgctaaattctggatctgcaaagcaaagttgttggcaagtaaaggcacctttgatgttattgggctatatgaagaggccattaaaaatggggcaacagtgagtatctgtcttgggtgggtaacttcttaaaattctctttcatgtgagttctctgttgttgtttgtaatatgatggttagaagtttgcaacatcaatatccaacacttataaagtcataccttaccataaagaacttaaaaatatattaaacccaatacgtcagcatccttaaatcaataattcagagccattgcatgaaataacttttaattctaaaatttagaaaaaaaaactatataattattatttacaaaaactgcatcaaatagttttataatgcttttccttaaaatgtcattttccatgtcatgttctgtattctgtgtgatacctttttccataatggttcaaaatcagaattgtacatgcacatagtttaagcagtcaagtagtttgataagtttcgttcagtaagacctctgccttccttccctcccattttccccttcctagagcaaactgatttatttttatattaacctctatagtttcagaaaacgtgtttctgtttcttgatttttcagttttagatatgatttatggacttccagctatgcagagtgaagatttagccctctttcacacatacatacacagatccccagcacacacaaatacacacccctatttaccatccttatagacctttgccattccttatactttcattagagtcatggaaattctggtcactatttagcattcacattgttatgaatatataagaaatatatgggctgggcacggtgtttcacgcctgtaatcccagcacttggggaggccgaggcaggtggatcacaaggtcaggagatcgagaccattttggctaacatggtgaaaccccatctctactaaaaaatacaaaaaagttagccgggcgtggtggcgggcacctgtagtcccagctactcgggaggctgaggcaggagaatggcatgaacctgggaggcagagcttgcagtgagccgagatcgggccactgcactccagcctgggcaacagtgcaagactgtctcaaaaaaaaaaaaaaatacatgaatatgttgagccatgcaatatatactatgattactttgcctttcaagcacaactttctacttttcctggagttattgtcttgttttgcctttgcttagttttctgagtatttattatataattaattcacaaactcttcgctaattgtctaagttcctcaatactttgaaaacatcagatattctattgattcctttttcttagataaagagctttctcctagacccttctggcttattccagactgaacaagttactttttactgccgtcttcaccagctgtctttctgggatctctttaccatcacctttagattccctttacatccttcttaagttgggtggatcccttgtttttagaacccatattagttttcttcttcctacattgtctatttcttctccaatgtttttcatttctttctctcttgttattgtttgtttgttctttttgttttgttctctattattctttaaaggctttacacagatgctggtgaaactgggctgtttgcacatataaaaggtgggtctgaaaaagcttatttaaagcccgagacacatggatggggcttcaacacagggtgatctggctgagttgactagttagaaaaccctcaatatcagtatctttaggtctttcctcttaagctggtcaagttatctggagaaatctgttccaatctccttcctgggagctagacaccaggctgccagtgctgtgggagagaagagagcagggagtctcaaccctcaacatagaaacttttgcttatctccttttctcagaaagcaccctatcctaatcttgcatgatatccctcagagacttgcagaatacattcccagttttctgttaggatgaagggagtcagacacagttactaggctgcatagagtttaggggtgcaggatggatttggaggtctgactgctttttgaacagatgctaaagagtcctcctaatttgggccctaccacccattccttagcctttctgtcaggttgtttcttagccacactgccagcttgggattcaactctctcaagtagatcaaattgtttacctctcttccttctgcactgcagcttccaaaaccttattgtcatttcttctctcctatgttttgtggttattgcctcttcttaatccctttattatcctttcagtcgattttcaagagagattagaaataaacgtatatttaatccaccatcattaaccagaaggctatacaaatataaaatatgcttgatgaatgttgtatagaattcactctttgtaatatattctatacatttattcccattcatttagctgaaatcataattctattttggattttgaaaaaatgtacggaaagctttgcttttatgctttattgtcagtttatatctatttgatacagagttccaggtaaggaagacaaacctccaactataattttcttgtgggaaagtgcagcttctgcttcatggcatggtttacatacttgaaaaataaagcctatctcagataattttatcagaaaattacttttccatgaaggtttttttttctaagtatgttaacaaataaaagaagaaagacaggaaaagctggagaaaattactcaaaatgcctacaaagattgtatctgggccaggcacagtggcttacccctgtaatctcagcactttgggaggctgaggcaggcggatcacttgagatcaggagtttgagaccagcctggccaacgtagcgaaaccccgtctctactaaaaatagaaaaattagccagatggggtggcgcatgcctgtaatcccagctcttcgggaggctgaggcaggagaatcacttgaaccctggaagtggagtttgtggtgagccgataccgcaccattgcactccagcttgggtgacagagactccatctcaaaaaacattgtgtttggggccaggtacagtggctcactcgtgtaatcccagcagtttgggaggccgaggcgggtggatcacgatgtcaggagatcgagaccatcctggctaacacggtaaaaccccatctctactaaaaatacaaaaaattagctgggcgtggtggtgggcgcctgtagtcccagctacttgggaggctgaggcaggagaatggcatgaacccaggaggcagagcttgcaatgagccgagatcgcgccactgcactccagcctgggacagagtaagactctgtctcaagaaaatatatctatatctatatataaaatgcattttctgtgtggctagctttacatcattgggccagaatttttatgtaggaatacatatttgacagtattatacaaatcaataggaaaatagaatttgatgtagacaaattacattatggacaactttaaatacatctgttcattaagtcgagtgtgccaacacttaatcagaattttctctgttcctttacttttctcatgaagctataaaactgtcaagctagacaaaagatttatagttagacgagattttaaaaggaaacttttattataaaacatgtatttgaagttaaagttccttagcaaattttttgcatgaatgtttttaagattttgtatgttttcttccttccttccagccaatacaagagttgcggaaagttgttcttaatatcttgcaagactcaaacagaaccacagaaggtactattatttttgaatttaaattcatcttctctagctgtaccagtaaaaatcatccaggacatataggaaaaagaagaaaagaatcatcccctgaaatgcttctcacttcttggtttccatgacctggccctttcagccattgtcatcagctgacttatttgtattattacaagtaaatgcactactcaatactgaacaaaggttgtttccaccaaaacagcctagactggagtgtcccacttccttggaatcctagatggcagaagacaaacagctctttgctggaagagactgaggcagaaaggagaaatgccttaagttacatgtttaatcataataaacccaccaacatactcatctaaatttgtgttacgctttaaaaatagctatctcaggaatctcttcaattggatgaccatcactgtcagtggtcataacctttagaagactcttctatgagacatatattgtgccaaacacgagtgacattataattgcttacgatacttgttatatgaatggaaagaaaaaacaagctatctttagaaaataaattggattcttcttgttatcttaaaaggtgacaaatctttttcctttaatagtagatttaggctgcatacggtagctcacgcctgtaatcccggcactttgggaggccaaggcaggtggatcacctgaggtcaggagtttgagaccagcctgaccaacgtggtgaaaccctgtcttgtctttaaaaaaaaaaaaaaaaaaaaaaaaaaacagaaaagaaaaattagccagttgtggtggtgcgtgcttgtaatcccagatactcaggaggctgaggcaggagaatcgtttgaacccagaaagtggaatttggagtgaatgaagatcacgccactgcactccagcctggacaacaagagcgaaactccatctcaaaaaaaaagagtagatttaactggggaacaatcaagtcatgtagctaagtaacccactacatgtggtaagaaggacataaaatagataatagtagattctttgagaatgaggctacaattcagttatttggttaaaacatggtagtgttttaaaaggaataaaaagagaagacaggaatccatgcctttgttgcaccctattgacctcacttagggtgtcagcctctagccacagtgtgcctggcacagtctgatttccttcctttcattttggtgattgtgtttgggctaccatgaaaactattaatgcaagacagtttttgcccactgtccaaggcagtaaccatgtggtcatcctggggaggaatgggattgggaggttgtgtgagttaaccttagtgagtcaagaaaattgatccaaggtgtggtgtaagggtagaaggccagtgattagtccctaagagagctctcttgagagtgaataggagactggagatatgttcagagtcttgaaagggtgtcaagaatctacgtacagcagtctcgggggctggctacgagggtagcctgatgtagcaagacactgctacagagcttaacgtgaaaaaacaagttataagtcacacttcaaatcaatcactattcagtatgtggagcccatgaagatcactgggaaatcattgtatgtatgtatttttcatgttattgacttctagttgaagtattaaattggtaaatcttactttccttcatgatcttacatacacagggattacttctgactctttagttgctgaaactagtataacatcagtggaagagctggccaagaagatggaatctgtgaagtcttgtctttctccaaaagagagggaacaagtcacggcgacaccccgaatagccaaggcagaacagcataattatcctggtatcaaattacagattggtccaatccctaggtaagcaaactctaaagcagactttgtgttcacagacttaattctagtccaagtctcgatttttccttcacagatctagagtaactgagacctgacctgcagtgaggaaggtgctgccagagtcaggaggggtattagaatgcattcacccccgtcctatggtctcgcctaccttttcactctcatttgtcctgcacttgcagatcctatctgcctttcctgcaagtcctgacacagctgggtatggttggggtgataagatggggcacaaagtcccaagcgggagcaaactctgtagctgtgggagaaaagggacagtgaatacccctctaagaacggagagcagtggagtatgtactagtcagagactgctcataaagtcagaaacgttttattttttaacaaatataaatttaaggcagaatccatagtaatttaaggagctatgtcagggcgtcagtgtcattttctaaaatgtgagtgtagcaccactcttctctgatcatgatctggaaagaattccaaacaagggcaccaagacaacagttctttgttttagttacctggaaagcacagccgaatctcttccaatcctaaactctctgacacacaccattttcccactacagtcagctcataagaggatgaaaacagttcagttcataagtggatgaactacagtcagctcataagtagatgaaaacagttaatccaaaaactacctcttaatggctctagaattcacaaaaccactaattacattagcctaaggaaaactagcaggcaagtctgccaagattgcaccattgcactccagcctgggcaacaagagtgaaactccatctcaaaaaaaaaatgaaaaggctgggcacatggtggctcatgcctgtaatcctgtcactttggtaggccgaggcaggaggattacttgagcctaggagttcaagagtggcctgggcagcatagggagaccccaactctatgaaaaataaaaaattagccaggcatgctggcatacgtttgtgctcccaccagcttgaaaggctgaggtggacagatgccttgatcctaggaggttgaggctgtagtgagctgtgattgcaccactggactctagcctgggcaacagagtgagaccctgtctttaaaaagaaaaagctagaaagaatcttggaattcattaattcaaccaaatttggtattaggccccatttccttaaaacttgtcatctgttttgaaagtttatagaataaatgaacaccaactgccaaatatttgacttcaaataaaaaccacacttcatacttcattcaataaatccttatgcttacaccatccaagaacagatggacaccacccagtacattctggaaatcagggaaaagccttttttttgagactggggtcttgccatgttgcccagactggagtacaatggcataatcatagctcactgcagccttgaccttctgggctcaagcagtcctcccacttcaccctcctgagtagctgggattacaggtgtgtgccaccatgcccagctaatttttatattttttggtaaagatagtgtgttgctatgttgcccaggctggtctcgaactcctagaaaaagccatctgaagatgaaagctgctctagacatatctcttgtatcaccctatgttaaaatgtcttccctgttttattattgaataagaaacaaaaaataataaagataatttttttaaatgataaggtttttaatgcatctcttgctgtctctcagaataaatgggatgccggaagtgcaagacatgaaatttatcactcctgtacggcgttcgtcgaggattgagcgagcagtgtcccgctacccagaaatgctgcaggaacacgatttagtagtggcttctcttgatgaactgttagaagtggaagaaacaaaatgttttatattccgtagaaatgaggcgctgcctgtaacattggggtttcaaacccctgaatcataatttcttgatgctttttttaaaaaaggtgtttcagaaccaacataagacaagaaatattcttgtccaagtgacctggaaaaaaagagaggcatcatggatgcagattatggacgctcaggacttaagtaattcactgggcttactctcaaattttctctccccatgggaaaatctttgctttatgtgtttaagaccagtttgccagttttacagtatacataaatttcaaacttttgaatatttaccctacaactatgataaatatttatactttattgatctactttaatcccaacatagttttttatatcagaaggttggtcccacaatataatgggacttttctttctgcatccaccttagcagagggcaagttctttcatcgtggaagatctgaactttgacgctagcttgacaggctgaatggaccttgacagatggccaagtcaaaacccctcattttacagatgagtttatgctagctgtgcctttgctcagagatcataaatttatgtgtgatctttgactttcatcacagtatccttgtaaatgagagagaattcttgttttttctatgccaggtctcctcagatgaaacacaatcctgaattggcatggtcgtctagcttttatattcaaacctagttttgcatttgttactcagaaacacttcaagtaacaaaaggggggcaggggagaggggtggggagtggacacttgcttcttcagttctttgctcagctagggtatagctggcctgagaaggcagtgcaagccccagagactgttgtaggttgctttttcttcctcctgggcaactatttgtggaaaggttttaccttagtcattatgtaaatataattgtgtagaaaaacctagtcaacacattttaaattttagctttcttaatatttaagtattatcttaaaacaacattaaatttctattagttcctgcttgtttatcttatttattatagaaaaccatgataatggctttgcatagagaattaggagtttgtctaaggatataccagttggctgtcctaagaaacaaggagcattcattaccaaggagaatggactttgatcaaaggtctatcagcctcatccaggaactagatttttttaagggaagcagatctatttctgaaagtcagatttataataaagctcaaaaaactgagctataaacctgtaataccagcagactttcaataagagactcttacaactcaattgtggaaaaactaataattaaaaatgggcaaaggacctgagcagacatttctccaaagaagacataagaaatggccagtaggtatagatatgaaaaggtgttcagcatcattaatcataagaataatgtaaattaaaaccactgtgagctatcacctcacatctataagaatggctattaacaagacatgagataaatgttgatgagattgtggagaaaagagaaccctagtacactgtttgtgggcgtgtagactggggcagccgttatggaaaacggtatggaggctcctaaagaaattaaaaatagaactgttatctgaccctcttctgagtaagtatgtacccaaagaagatgaaatcaccagctgggcgcagtgactcacacctgtaatcccagcactttggagtgggtgaatcacctgaggtcaggagttcaagaccagcttgaccaacatggtgaaaccccgtctctactaaaaatacaaaaagtaggcgggcatggtgacgggcacctgtaatcccagctacttgggaggctgaggcagaagaatcacttgaactcgggaggtggaggttgcagtgagccaaaattgcgtcactgcactccagcctgggttacagagcaagactccatctcaaaaaaaaaaaagatgaaatcatcacctcataaagatatctgcactcacatgtttgtggcagtgttattctcaatagccaagatgtggaaacaacctaaatgcccatcaatggacaaataaagaaaatacggcatatgcatgccgtggaatagtattcatccttggaaaagagggagttcttgccatttgccacaacatagatggacctggagaacattatgctaagtgaaataagccagacccaaggaaaaatactgcatgatctcacatatggaatatttaattttttaagaaagagctcaagtacacagagaaagtgcttaccacagattggggaagaggaaatggggagatgcaggccaaggatacaaaatagcagataaaatgaacaagtctagagatagggctaaagttaatacaattgtattagggatttttgttaaataagtagattttagctgctattatcacaaaaaaactgagatgataatgttaatctgcttcactatagcagccattttattatctatatgtatcccataacatcatgttgtaaatcttaaatatacctaataaaataaaattgtcaccaa

SEQ ID NO: 257 - DNA, 29117 bp, Homo sapiens
  source 1..29117: mol_type = other DNA
aagccgactgtgagccaggaagtgctcttggggagcccaggccaagccatccattcttgggtcctttggaggtgagctaagtgggtctgcctaggttggggctggtggaacctgtgggagcagggaatgtggagagtcacatgtgggtccttgtggcaggggctggggcaggtgggcaggggagaggcgagggctctggcagtgccgtgtgcacctgccatgagcctgggctaggctaggcccctccttcccccttcctgctctgtgtcccgtccccctcctccctcagcctacccctcctcatctgacccttctctgattccctgccctggccccacggacctctgttgtttcccttccctggctccccgcagagcctctggaggtctgcaatagtgaagggtgaaggaagctccttgctaatcctcttgtgagtgtcactgcgtccccagtgactgctctggctgagtacccagtgggggcttttgtggccaaaggtcccaagtgattctcgaccctagactctggagagagggagtctggaaggcctgggtttggggtgggggtggctctgggtgtggttgctgcaggagctcagagtcaacttggccatcagggggctcccagcttcatcttgccttccaggaccatcctggagaagctcgaggagaggtaaggggaccctccttactggtttagctctggcttaggcctgttgtcctgatgggcaacaggaaccactgaactctcaaagtgtgcctgtgtaggaaactaaggcccactgtagtcattattgttatagtgaaggtagctgcatggagggaaagtcccctgacactgccattccccccttattccagggcctaaaattccacagttgaagtcactcctctgctagaatgcagggaagggtggcctgtcattagctgatgataaatactcctccgttcattggaccttggaccagctttaaaaagtggtccccaagcaggcctgtctcccagctgcctaggactctagagcatcccgtggccccctcctcctacagacaaggaaccgcctagcatggggatcagaacacaggctgctgagctctttgttggggaagggggagagacccacagaaggggtgagggatgtggggtgagaggacccagggaggagaggcccagcctggccccagccccctaggggtctttgtcctccccaggcagcagctgtactgggtcccctttgtcattctgtccctacccccgtgatctctcccctggatactctctgcctacctcagaccgccatcctctgctcccttcctgagcctctgctggcctcaccacaggccttcagtagcactgtcttctctctctctctctctctctgtgtgtgtgtgtgtgcgtgcaaatttgcatgatggctctttctgtgtgggcaggatgtggggccttctcgagtcatttctctcacggtgcttcagaccccaggttcagacagaggcctctgtcctgcagctccaggccagggagttccactcatggttcctgcctgcagcaacatctgtaattcggcagcttctcgggctgcagagggacaggacaggtcacctcctaagtccttggaccggccagaagccttcataccttttccataggagggaaaacatttccagggtaaaaggagggagcgtttgcttgctgagtctggaagctcaaaaagggaaacagagacaggcaccctccggatgaaggttcagggctgactccttgaggaggctgagagctgagcctgaccaggagggctatttgtttgtttttgttaattttggcttctctaaatggacagcaaaacaacaaaattaaactgagcaggacacggtatttcctgagcacccaccaagggccaggcccagcactcagacccattccaactttacaacaaacctgtgaagtatagctttattgggtcttggttccttattttacagaaaaggaaccaggtggagtttttcacccagagccacatggcttgtcagctgtagagttaggatgggattctgctctgcattcttcactatgaccctgaagtgggcaaaggagggtggtcagtgcagggcacccaaggccatcaccttcctactcagggcaggctcataccccagcctctgtgcccggtctccccgttcttcagccagggtacaaggctgcaatgccaggctgagggtgaaaaacaaactcactgttagaaagcaccgtccgggtgccaggtgtcagctgggttccttcctgcccccttgggtcaaaaagaaattgccttgaagccgggggtggggcaggtgggagggactctgccttctagtccctcagccattgctttctgtgtgtttcacctcccacaagagggacataaggcttagcccttgcagtattctccatgagaaacatacaccccctccccaccgtggtgaagattctctgaaatgtagtcagctgtgctcaagaagagtggctggttggcagcagagtggagcagtgctctctcttccccacctcggctccctcccctctgaaccctccttaaactttcagagccacctcagagctcagaaaaactgaagggccactttaatgtagaggtaacagaactcaactgatgtgacaggtggcgattcctttgctgcgaattcctttccttctgctttcgttctggttgggataacagacaggagatttcaagagagattttgctaaacaccaggggtggaaaaacacaagtaaaccaagaaaattttagatgcgtaagacctgggctctgctgcccagtttctggcctgcctctgcctagagggtgccatcctacctcagggatcaaaggctagttccatcctccacccttctgagatcagaccgccctcacctgggtgaccggtaggactgcctttttggccttaggaggtgacttcaccttttaggtcatcctacctttccattcaggcaagagcaattaaaaaacagaaggaagacatcttttaaacacacagttacacagtgccccctgcacaaatggagagcacaaacaagacaattgaatgggtcctcctttctgttcgggttgctgcctgggagccaagacccacagggacattttggctgctgacctggtaggaacctacctctgggggagcactgcccttggagcactggacttcctggagaggggaggatgaggtgattggtcatgggcagactggcccccgtggggaagccttcatattataatgatgctaattctcttctccaagcctcggtcttccccgtcttctggcctggttgttgtggagggagagttctgaggatccatcccatcagtgtgtctctccatttgtctgtccattcatctagccatcccctctcttattttcacaaatgttctacaacgccgactctcagtcaaggaggcgctgtacaggagtttgagtgactcaagtgaattcaggaatgtccaagagaattgatcagtggggcaggaggagagaatgatgcttaagagagctgtaacctgggttcgcacaccagctcaagtcacaggggggcctgaacctcttacgtcaacgctaacctttaagtttctaatccacttgaactaaacccctcaagtcaatgctgatctttaaatttcaaatccagttgaactaaagtatgcccccagaccttgtgggtcggagtggttgacaaatcagttacataatgtgactatgccattcaatattttcatactgagacacagtggcgaacaggaaacataaagaacctgccatcttggtgcttaccttctaggcaaactagaaccacgcgggtaaacacactggcaactacacaccgggataaacgctcagaaagtaaaagcgaggggtggagtatagtcacattgagtttaattggtttaaaaagtcatagccggccaggtgctgtggctcatgcctataatcccagcgctttgggaggccaaggtaggtggatcacctgaggtcaggagtttgagaccagcctgatcaatatggtgaaaccccatctctactaaaaatacaaaacttagcaaggcatgatggcgggtgcctgtagtcccagctacttgggaggctgagacaggagaatcgcttgaacctgggagtcagaagttgcagtgagctaagatcatgccactgcactctagcctgggtgacagagcaagataccgtctaaaaaaaaatgtcgcagccagtcaaactacatgccttgtccccactgaatacctgatctgtctccacccttcctgtctccattgccttgggctcccctccactgaccagttcctcacccccacccctcccaggctcctcaggtgctgcaggccccagagatctgctctcttctctttgctcggaaagctgctgcagcctctggtatttattttttttcctctgaaaaaacccagcaaggaacgctggtttttttctgggaaggcaagtccaatcctcacttgtatctagtatcagcattagcgtgtacctagagggctgctttatgtacatatacatatctatttgcaagtacatatgtgcaaagagagacaagtggggtttcctctcatcttatgaaaaattcaggatgtcctttctagcaggcccagccccgcattcccactcccattcccatattggcacgggaacgtttcttgccaagtgagttgactgatggtgagagaaggtgggttggcgttatcctggcaaaatgctctggggctcatagggccatgaggctggcactcattcaggtacaatgtgtggagttgggtgaatgagaacaggagaagggatcagggattttgcatggcaggagaactatttgggcccaaagaccaggactttacagagacgtggagggtggctttggggtctgggaagggaggcagttgagtagagctagggatgtcctatgttctggtacctgtaaaccaggtgcttctccccagctttcccctctatctctaaataaacatgtcttcctagtcatttattataccccatgggctggtgtcttgaggaggcgcagtgggatgtggtggggtgagtcacctccttgctcacactcggttgctctccaccaggcaggtttggggagggagatttggggtccagggtgttttccctagtatagacaatagatcctgaggctcctcatcccttctgccttagaagtagaaccgtctcaggcctcttgcccagagagcactgagggtgacaatgggcagctgcatggggagcagagagtggtatggacttaaggagtaaaccatacaaatcctctgcctgttacctggaggtagtggtgggaggtggagaggcagaacctagaatgatgagtgaaggctggatccataggagaagaatgaaaggcaagactgttaatggaaagggattccaatccagaccccaagagagggttcttggatctcgtgcaagaaagaattcaaggtgaatccataaaatgagggcaagtttattagcaaagtaaaagaataaaagaatggttactccataggcagagcagcgcttgggctgctggattaaggatacccgtatcttgagccgacctcttatctcatcctgtgacttagaatgcctagcttcccgggaatgcagcccagtaggtctcagccttattttacccagcccctattcaagatggagccactctggttcaaacatctctgatgagaccaaatctggtccatttgattcagagcatcaagtacaagattaaacataagaaagggcctctcctctcggaaagtcagcctgttggggaggctgccttaactaacaggtggaagggccctgaaggccggtcagggaccattccgggtgggctggaacatcagaatcctgagggtgtcatccagcaagtctagattcttgttattctaaaacaggaatgcaagggttgggtcagagggaggggtaaaaacccagaaagagatttcttttggaggcacttttagaaaaaggatactttcaaggtgaataagaaactgaaatgcatactggccctccttccttctctcaggtgccctccagaaaaaaggcgtggggcaaagcaatgttttctaggtgaccttgaataacagctggaccccctgaccttcgtgagagagcgctgagggttaccatttactgagtgtctaacagtgggccaagcctgggctgaaggccgcgcgaatcacctccgttaaccctagctccccactgcagtggggctcccagatgctaaggaactttccaggcttatccactcagttgtatgtggcaggacgagggtttgagctgcagtccatgtggctattgattcagcttatgttctctagtgctgggcagggaggagctgacccccatgggtttgttatgtgtgctggttagggccctgcatgccagtcaagctcctgtcctacagcctgcctgtgggaggatctcagtgtgaggtctggagccctggacgaggccacctgggctcactctcttcatactggagcagggaaagggcagagagagctgcagaccggaaggtggatggtctggggtcggagtccggcccctgtcaccagctgtgagtcattaagccagactcaggctaaggcttcctcatctgttaaacagcgacacgcaggggactgctcatctttcaggtgcgaggttgggggagtggtgggtggggacaggcatggttaactgcatgtggaaggggctgttgttcttgggtatctggaagtcacacgtggttataaactgggagcatgtgtgtgtttgttaatagtcttgctccccaaaatattctaatatagctcacaagcacgcacgtaagccttcaagatagaaatctgtgagtgaagaaaatgaggcaaagggaaaataagaaaagacagctgctgggtgcagcggctcacacctataatcccaccactttgggaggccaaggtgggcagatcacttgaggtcaggagttcgagactagcctggctaacatggtgaaaccccatctctactagaaatacaaaaaaaaaaaaaaattagcagagcatggtggtagacgcctataattctagctactcgggaggctgaggcaggagaatcgcttgaacccaggaggcagaggttgcagtgagccaagactgtgccgctacactccaacccgggtgacagagcgagactctgtctcaaaaaaaaaaaaaaaagacagctgccaggggagtgcttacgacatgccataaggacctgtgtacttgaccctgcacttccactttgtggagagccagcaccatgagacaaacaagttacaagcttcacagtgtgctttggatcaaaacaagccagctattctgaggaagcagggctgctctgagagccgtgtaagcggtgggctgcatgcaggggatggaaatgcatgcttctagaaaacaccctgcgaggttcctgggctcatctgataagggcccacccagagtgttagtgcaggctgtgcacacagcagctctgggcagatgtgaggcagttccaggcagacatggctgccacatcccagcctcttcctccctagaaggcagagatctcctccccatgcagcaggcagtctgctgggtggtaggcagcagggctgaagcatcctcccttcatgagggcttgggctgagttaagcagagagccccttgctgcttccacctgggccaaattccaagctgccaacagcttacaaggacaaagaagcaggctgtgagccagcctggtgaacagggtaaggccccaaggataggagccttggaaagtggaagtaaggcaggctgtggccttcatgtcgtgggtgcctgcttcttccatgagtctgttgcattctcctcacctcgtctgtgtctgtttggctcccacatgctttggtttacatgtcctttgtggcttgcagctgcttccttgatacctagaggcatttccgccttcagttcctgctgccaaccacctcggtctccacactctccaatccaaatgcccaagagaaggatctgatttggccagtttgttcttttcagctaagccacatgggctaccttcagccaacagatgggtgtctttggggcaggtgctgccctggtgcaagtttagagattgtgggatcagatggaatatgtggtacactccttactcccagcagggctgtggagggcagtgctaaggagcagcaggcatagatggggaagacactccaaacacatctaacacactacacacgtgcctccagaggctgacagcccttccctaacctgcacttgctttgggcatttccagggtagatatggattcccagtttctccagcggccagtgctccccctagtccacacagtgagaccgtgaaagcagatgctccggggcactcctgggcagcttttgctcagtggatgatgggtgactacagactccctgaccacccccagcccatggaaattctcaacctgtacttgggagacagcctggagccccacccaggagagtgcccaagggaaacgtgcagccatgaggatccaccggagcctttcgaggagcaaacctgggccactgaccctcctgaacctaccagacaaaatgttcctccctggggctccggtgtggagctcacacacctggggagctgggtccatcaggacgggctggagccttgccaggagcaaacccgggccactgaccctcctgaatctaccagacaagatgctcctccctggggctccggtgtggagctcacacacctggggagcccctctgcccagagggagcacaggcagaacacagcatcaccagggtcaccagtgaacagccatctaccggggagcccaaagcagaaccggagcacgtccacacaggtagtgttctgggcaggcatcctgcaggcccagatgtgtgtcctagacctggaggaggagctggagaagacggaagggctcaaggctgggctgaaatgctgtctccccacgccccctgtggacctccccggggacacgggcctgcactccagcccacctgagaatgaagactcaggggaagacagcagtgagcctgagggagagggccaggcatggctgagagagggaaccccagactcttccccacagtggggagctgaggaggagagcatgttcttcagcaaccccctcttcctggcgagtccttgctcagagaacagtgcttctggagagtgcttttcctggggggcttcagactcccatgcaggtgtgaggactggacctgagagcccagcgactctggagcctcccctcccagaagacacagtgctgtgggagctggaaagtgagccagatttgggggacggcgctgctatcagtgggcattgtacccctccattccctgtgcccatctataaaccacactccatctgctgggcctcagtggctgccgctgagggggctcctgcagcacctcctggtcacggggagagtgaggtaagcccagtcttgggaaccaaccggggctgtgctgggaacacagaagggagggtcttcctcgggggtcaccaggcccagaacattcttttctgacgctaagagctttggggataacctgcatcagtatatagcagggtaatagagcagaaaatcaggaccagtgttgtcttcagaatgataggacattttatcaatgccatgatgtcagctgatgtcagctgataattaagtccataaatgtctccatctcaccagctccaaggggccatgcctagatacgtttggagaacaaacagctcctccaattgcagcatgttccaggccattctcagattcttcccctcccatctccaagacattcccaactgtaacagggcagcgctcagcctgcaagggtgacctttgcccctaacagagagatgcctatttcaaaagtccagtcctctctcttcttgacagatttcagcatgttgttacttttagctcaccatctgtcattattcccctgtccagtgtcaatagatcaggcccatatgacaatggcagagattcttaatatcaactaaggatggggacatgctctgtgagacaatagggagcacagttttcccagggaggcctctccttaagagataaggagactcaatatggtagagtgtggctgtaattttctaatatctcaattccctgagaacaatgaagagctattacccagagcagctctattaccagagcagctcttggagcccaagatcagagaagctcctgggtactgatgggagtcctctccaccatgggccagggcccccagtgtggggcagttagggctgtgcctgtggaggtccattttctcaggactttctttttttttttttttttttgagacggagtcttgctatgttgcccaggctggagtgcagtggtgccatcttggctgaccctccacctcccaggttcaagcgattcacctgcctcaggctcccaggtagctgggattacaggtgtgtgccaccccacccagctaatttttgtatttttagtagagataggtttcaccatgttggccaggctggtcttgaactcctgacctcaggtgttccaaacacctgggcgtcccagagtgctgggattaagtgagccactgcgcccgccatggactttcttgttctaagcactaacttctcagagggaagcctgggaacgctataagttgcaggttggctcctgtctgggaaggcagagcccacccagcccagtgcctggggctatcaccctccctaaaacacagcccctccttgggctggcaccacctgaggcagggccatcagggcagactgtgaagggaggaggcttcatgggatttgagaaaggccctgggagcaattttcctctagtcacctctcctctccttctctcctctgtctctctctcgacttctcagggagataggcttggtcctgctccatctgcagcaccgtgtgtggacgaagcattgacctgggaatcaggatgtgtcggatctgatcttggccctgctgcacatcctgtgcaaccttgggcaagtcacttcccctttctgggccttactttctccatctttggaggaggaatatgagcccattcatttccagggcctagcaccaacaatcctaggatgtggggcttctcacatcaggactccccttctgaactgaggctccagcctgggtgggaggaggatggaggggcttctgcctactcatggcatccttcccctcccctcctttccccttctccctgcctggcctctcccccatccacctctctgtgtatccagggctcatgggaatgcctttgcctctctcaacaggcctctctcagccctgagggctggcagagaggaggtcctttttggccccaggtgactcttaactcccaggacagaggtgagccctaataagggggtttgggaaattgggtcctgggaggatttggaatttggagtggggacaaagatcattcttggatccatggttgccattaatgggtcccattatattgtgtttaagccagacagacttggggttaaatcctgcctctttaaaattaaatgaaggaaacgtacaaaaggaccagcatttcttaccgctgggtcttaatggtttagcaaaggtcctgagcccttagttgcctggaggcttgagtcctgggagcccgctgtctgctgcctctgcaagtgggagaggtcactgcccgagggaggacagggcatgctgccaggctccaggggaggagccccagggagggagcctctggaggtggtgcccaggccgttctcctgcctcctgccctgtgcccgcctcacttcatgttcttcctcagatgagagggagggtggacacccccaggaatctcttccctgcaccttggccccctgcccctggaggagcccagcttcttctccagagcctagcagcccagaatctgagagcagaggccctggtcccaggcccagccctgcatcgtcccaggagggcagcccgcagcttcaacaccacagctcaggcattttgcccaagtggacactagatgcttcacagtcttcactcttggagacggatggggaacagccaagttccttgaagaaaaaggaggcaggggaggccccaaaaccaggcgaggaagtaaagagtgaaggaacagccaggcctgcagagactggagacgtccagcctgacattcacctgacttctgcagaacagtaagtctcagactaactggctctcatgctcctaattatggatgcatttaagaatattctagtctggatggagggtgagaaatgcacattggaattaaacatacccatatttattaagcaaggattatatgagtgggtaccaggaagagttttgagaaagaccgtaagattcagaagcatcagaaacaaaacagcagatagttatacacgtggaggcgagatctgagtgtgctggtgcagggcttcagaagaagcatccacagctggagaccaggagaggaggaaggggaggaggtgtccagggaacctgagcaagggcgtgtgcctgcccagaaaaacgggagccatgctggcaggccagggaagtgcaaggtcagagcttgtaatgtggggattatggactgctttgaatttgaggaggtatctgggaggcattcaccaaagaacctgggcctggggcactggctcggatctcatcaagtggaggtttgatggggaccaagggaatggatcttggggcccaacataggattgtgtaaccccagaactgtgaccagaagtaggaataggccaactgagaaaccaacctagatgtccacttgtcccagaatgctgcctcaagactatatgcccctgggatctccacactgaaaaaggcattttgttttctaattggctgaatgtgagtcatgttaatgggactagcaggaaccagcagtggttcatgtcatggacctaatggtgcagtccatgcaggttagctgtggcaagggttccccgagctcagcgccttgaatggtggggcccggaggagctggacccaggcccttactcagggaagagacagagtcacagccagactgacttagcctggcctgggaccaggagaaccccgagaggaaggtattcatgcaaggtctccaggtctggggccctgcgcttcctcaggtaaagcacagccatgttccgagtttatctcacctcaggtggcaggtgcatccctgtgaggcccctagcgttgttttctccaatgcaaggcacgtgggattgtctccctcacctgtcctgtggtcctcctatacctccttgtcccttccccacctcccagctctggctctagcctccactcctagatctggagcctagaaggctgtaagggggctgagaacaggaagctaggtgggctctagtaatggcagcagctggggtagttcaggaggtggtcctcagcctctcccttcccccacctagcagcctggatgacaaggagactgagtggtgacctatgacccagtgtgaacaggtccgggtgacccccagccgactcagaacctcccagtccagcactaagactctcagatgtcactcaatccaatctaaacctgactcttctgcttcccccacaacgtcacaatcaggtattctagttatttaagcattcattatccaagtgacacaggaagttgaaccagtaagcaggagtcatcataatatgaaaacgttccctgataaacagacgaataacattaggtttcacttaagcaccctctccacctaacacagacgggtcagggtctttgctggtgacttctcactgcctcttgaggctcatgaacactacataatgcaggagaagcacaacagaagctaacagaaaagtgtaagtacaaatcctgtcaaaaaacatgatttcataaggtctgtgaaagtgatgttgaaagacctcacaagtcacgtggaaaaccactgacaaatcgggaaccaaaagagattgtccagtgaacaatggaagaggagaaaataaaaataaagaataaattgtcacatctaaagagaattactcgaaaaatcaactgacgaagccctaaaatatgcttttaaaaatgacctagtcaattagtgttgttactaaaataatacttagatgagggagcactttgaaaaaaaaaagtatgcaaatataaattatcataaaattgtaccctttatttttttgttttgttttgggacagagttttgctcttgctgcccaggctgaagtgcaatgttgcgatcttggctcactgcaacctctgcctcccgggttcaagtgactttcctgccttagccttccgagtagctgggattacaggcgtgtgccaccatgcctggctaatttttgtacttttagtagagagggggcttcaccatgttgtccaggctggtctcgaactcttgatcagacttgtcttgaactctcgaatccactcgcctcagtctgtcaaagtgctgggattataggcctgagccgctgtgcctgacctcactttattattttattttattttatttatttatttttttgagatggagtctcactctgtggcccaggctggaatgcactggcgtgatctcggctcactgcaaactctgcctcccaagttcaggccattctcctgcctcagcctccctagtagctgggactacaggcgcccgccactgcgcccggctaattttttgtatttttagtagagacggggtttccccgtggtcttgatctcctgacctcgtgatctgcccgccttggcctcctaaagtgctgggattataggcgtgagccaccacgccctgcctattttatctttttaacttgaattttcttttctttcttttttataatttttatttccataggttattggggaacaagcagtgtttggttgcatgaataagttcttgaatggtgatttgtgaggttttggtgcacccatcaccagagcagtatacactgcaccctatttgtagtcttttatcctttaaccgcctttcaccctttacccctgagtctccaaagtccactgtgtcattcttatgcctttgcatcctcatagcttagttcccacttatgagtgagaacataggatgtttgcgtttccattcctgagttacttcacttagaataatagtttccaatctcatccaggttgctgtgagtgccattaattcattcctttttatggctaagtagtattgaatcatatatatatatattcaataatatatatgcatattcaatcatatatgtgattcaattatatataattgaatatataatagtatatatatatatatacacacacacatacacaccacagtttctttatgcactcattgattgatcggcatgtgggttggttccatgcttttgtgattgcaaattgtgctgctataagcataagcatgtgtatgcaagtatatttttcttataatgacttattttcctctgggtagatacccagtagtgggattgctggatcaaatggcagttctacttttagttctttaaggaatctccacactgttttccatagtgattgtatgagtttatattcccaccagcagtgtagaagcgttccctattgacctcatccatgccaacgtctattttttgattttttgattatggacattcttgcaggagtcaggtgttattgcagtgtggttttgatttgcatttccctcatcattagtgatgttgagcattttttcatatatttgttggccatttgtatatcttcttttgagaattgtctattcatgtccttagcccacttcttgatgggattatttgtttttttcttgttgatttgtttgagttcattgtagattctggatattagtcctttgtcagatgtatagattgtggagattttttcccactctgtgggttttctatttactctgctgactgttccttttgtcatgcaaaagctcttcagtttaattaagtcctggcaatttatctttgtttttattgcatttgcttttggttcttggtcatgaaatccttacctaagccaatgtctagaagggtttttccaatgttatcttctagaatttttatagttcctggtcttagatttaagtccttaatacatctcgagttgttttttgtgtaaggtgagagatgaggatccagtgtcattctccttcttgtggttagccaattatcccaacaccatttgttgaaaaagtgtgtcctccttgtggctagccaattatcccaacaccattttttgaaaagtgtgtcctttccccactttatgtttttgtttgctttgttgaagatcagttggctgtaaattgtacactttaaatgagtgaattgggcggtatgtgaattctatttcaaaacagctgttattattattatttttttgagacaggatctcacactgttgcccagcctggagtgtgaggtacaatcatgaatcactgaagcctcagcctcccaggctcaagtgatcttcccacttcagcctcccaagtaactgggaccacaggcgtgtatcactacacccagctaatttttacttatttttattttttatggagatgtggtctcaccatgttgcccaggcagaccacaaggctggtctccaactcttgagctcaagcaatcctcccacctcggcctcccaaagtgctgggattataggcatgagccactgcacccagcctgttactgtttttaatggcctttatgatcttactgtgaaaatcaaggatgaatgcaagatgtcttatccagccagaaaacttgtgctgggaaaattaaattttaggcattgtgtttactataagatttaaataaacttatttgtacatttaccaagataaagctccaagtaaaccttttcattatttactatgaaagtatgttctcattttagttagatttagttacttctattttgggttgggtgaactttaatttttggcatgaagaaacttcccttttcagaggctggaacttctctggctaccaagcctctgaacctctccacggggcagcctagtttccagatgcataaggaagatggttctttggtttctggcactgattgacattctgtcaccatcacccaaagaccttgtgatgggcatggggttaaccctcccattaaccctgacccagctgtgttagatagtgagggtgtttaagtgaattctaatgttatatatctgtttatcagggattgttttcttttttttcttttagacggcatcttgctctgttgcccaggctggtgtgcagtgtcacaatatcagctcactggaatttccgcctcctgggttcaagtgattctcctgccttagcctcctgagtagctgggactacaggcatgtgccaccctgcctaatttttgtatttttagtagagacagcgtttcgccatgatggccaggctggcttcgaactcctggcctcaagtgatccacttgccttggcctcccaaagcagtaggattacaggctgagtactgcgcccaggcccctggaatgttttcatattatgatgtcttctgcttaccagttcaacttcctaattgtatcacttgaataatgaatgtttaaataactggaataccccacacttgattgtaatgttgtcggggaagcagaagagtcaggtttagattggattgagtgacatctgagagtcttagtgctggactgggaggttctgagtcggctgggggtcacccaggcctgttcacactaggtcataggtcaccactcagtctccttgtcatccaggctgctaggtgggggaagggagaggctgaggaccacctcctgaactaccccagctgctgccattactagagcccacctagcttcctgttctcagctcatccttacaggtttcttggctccagatctaggagtggaggctagagccagagctgggaggtggggaagggacaaggaggtacaggaggaccacaggacaggtgagggagacaatcccacgtgccttgcattggagaaaacaacgctaggggcctcacagggatgcacctgccacctgaggtgagataaactcggaacatggctgtgctttacctgagaaagcgcaggaccccagacctggagaccttgcatgaataccttcctctcggggttctcctggtcccaggccaggctaagtcagtctggctgtgactctgtctcttccctgagtaagggcctgggtccagctcctccgggccccaccattcaaggcgctgagctcggggaactcttgccacaactgacctgcaagaacacttgacccagagctcctgcatgtctatctcaagtgagaatctgaggacaccgatgaactcttcttggcttcctgggagccctatgccccaagcacagtccccagaggaaggccagagaccaccagctggagacaagctagctaatggcgtcaggaacaacaaggtagcctggaacttggcctcacgcctctatcgcctggagggcttccggaagtctgaagtggctgcctacctgcagaagaagtaaggggctttgagcctggggaaggctggaggctgaggcagccagggaggagctgctgaagggctccctccactggccaccctccccttcccgtccctgccctgttcccttcccatctcccctcctaacttttcccccataccctcactgtatctgctgcttactctcagtcatggtcctcatgctctccacacccttggtccttggtccccactgccttgccaaccagactccacaggtctctcccagtgtctcccagtgtacactgaatagggtagcagggcataccagaccctggctgcccccttgctctgtcaggacccaaggcccagcgtgcctgcacccttcccttgctcacccccaccgcataatgtgtgcaggccctgggggccccagtgcatctgcagccccagcccaggcccctggtgcagactccatgccccttttccctctgcagcaatgactttagcagggctgtggctgaggagtacctgtccttcttccagtttggaggccagagtctggaccgagccctccggtaatgtctttgggccctctctggggaggctgtggaggatggcatggggcagtggcaccagcctgaggctgggatctgattggccctaagctcccgggctctctccttgaccctggccctcctttgcaggagcttcctccaggccttggtgctcagtggggagactcaggaacgggagcgaatcctctaccagttctccagacgcttccaccattgcaatccggggatcttcccctcagtaggtagggaggggctggccctgacagcaaagcagggaaactttggggtgcccatgtctgcttgggagttcagtaggtgacagtgaactggtgggagtgtgttgggggctgtggagaatggaagcattccaggggttattcggttaccccacgcagtgtgggcagaggaaacaggagccctggttccaatgagctttctctccacttacctatctctggggtagattctgtacacaccttgacatgtgcaatcatgctgcttaacacggacctgcatggacaggtaagacggtggagagagtccctgtgggaactgaggctgtaacaaggggtgcggggaggagaagaccagaggcctgagaccgggcagggaacacccctgagggatgtgggcctggggagctggaaagggttccatggttgctggctgggaggttattctattgggatggggtgtgtgctcgagtcatcccacttctccgtggctacagaacattgggaagagcatgagctgccaggaattcataaccaacctgaatgggctgagggatggcgggaacttccccaaggagctgctgaaggtatgtgccacggggtcttcttatgagcctcatgtaggacctggagccttggttctttgttccaagggagatgctgagcttgggactggctttgccaaaatatccttgagagaacaggacttgtttattgaagggctagtaaaagtgtattccctggcgggcagcatcagaagcatcttggaatttgttatccatgcaaatctgcaggctccctgtgctggacttattgaatcagactctctgagactgggacccctaaaatattttcttaagttttcaagtcattcttaccccttcaaagtctgagaagggcaaagctacacatggtgaaagtctggagctcagacttgggagcctggtgttcctgggtttgaattctagtcttgggcaatttgccccctcttggccaactcaagttcttcctgagagtattaaccacttaccatgccattatcaagatgaaatgaaatcttccaagtgctcagcacggtgcttggcacatagcatgtgtgtcataagcaattaaaatcatttgctgtttcatcacagtcacgcatcacttaacgatgaaggtgtgttctgagaaatgcatcgttgggcattttcactattgtgtgaacattatagagtgaacctacacaaacctagatgtacagctcactgcacaccagggctatatgggatagtctattgctcctgggctacaaacctgtatggcatgctgctgtacttaatactgcaagcaattctaacacagtgctgtatttgtatatctaaacatagaaaaggtacaataaacacatgatagaaaagattaaaaatgatacatctgtataggacagctccatcacaaccttacaggaccactatcatgtatgcagttcatccttgactgaaccatcatgatgctgttatatggtacatggctgtacttcatgaacatttactgaacacctactatgtgccagactttttgctaggcaccgcaagagctatagaagcaagcgagataacatctacgttaatatgtcaaacttttagtgcatcattcattcatttactgcacatttattgtggggattggtcagccagtttcttctccatcagatccctcccagtagaatgccatgtaggtaattcatttctcctccatgagaactagttaaggcctcagtaagcatgggcaggacagggacttgtctgccctggtcatcatcttttttttttttttgagatggagtctcatcctgcactgtcgcgggagtgcagtggtgtgatcttggctcactgcaacctccgcctcccgggttcaagcaattctcttgcctcagcctcctgagtagctgggattacaggtgtgcaccaccacgcccagataattttttgtatttttagtagagacagggtttcatcatgttggccaggctggtctcgaactcctgacttcaagtgatccacccgcctcggcctcccaaagtgcagggattagaggtgtgagccactgtgcctggcaggtcatctttatgtctctagcacccagcatagtgcttgttgctgggaaatactccagaaatactttgttgcacggatggatggatggatggatggatggatggatggatggatggatgcttgcttactcaaggaggaagggcacctatgttgtgggtggaggaggcaggctgtacacatgcccctatcctacctctgccagacaaagagactttaggctccacagccctgaggctcccctgcccacctgtgtgcttctgttccaggccctctactggtctatccgcagcgagaagctcgagtgggccgtgtgagtgagactccctttcccctctccctctcacccctctcccctgtctttggactgtcctccctctgtcacccacccgagagttagagaaactcagatagtgctccccttggagtgaggcaaagccagaggcagggctctggggagagagcatagaggagcccaagtaataccggagggccagaggtagtggggcgtggggtatggcagaattttcaggaattgatgggttcactgtgaaggaggactccttgtggggggtcctggggtgtggcttcccaggaaaagagaggttgctaaggctctgggaggcaatggatacctcccagttctctttgcatagtcagcacttccagcccgattctctgatgttcagggatgaagaagacacagccagacctgagaaggcccagccgtccctgccagctggcaagatgagcaagcccttccttcagctggctcaggatcccacagtgcccacctacaagcagggcatcctggctcggaaaatgcatcaagatgcagacggcaagaagagtgagtgtctgctgcccacaaacagggtggcgtgctgggagcagccctgctcagggacctgtgccgatgcatgcacaggtgtgcagagagacagcccgcgttgaggacaggcagccagcccatgttccttcctcagtgcgtactgaacagtgaccatgtgctggatgctgtgtgaggcactagagggtaggtaggagaacccagacaaaacaggcctagttattcctgggccccagagtccctgtagtaaggtagagattagacaagtgtgtcaatgtctgcgaaaaaaatgtagcaagagctgagtgtctaggggctgaatcaagtgaggagaaaaaggtttttggttttgttttggaagcgggatgtggctacagggagaggtaaggcttctggtaagtgatggtatctgcgctgaactttggaggagaagagggtctggaatttggaagctgggcagagggcatcccccacagagaaaacagcaagccgagtttgctcagaacatggggtgtgtgaaagggaggtacacttgaggcaaaattgccagggcctgcatttgggccttattccacaggcagctgaaggcttttgattatggcaccaacatgtccagagtggtgatctcagcagactaatgtgcaagcacagattgaataggctggggcgaccaggatgggaactagcattggctgtgaagccgccggggccctagggctgccttttgtccaaggagcttagaatggatcttaccacacaagaccagggtggagaggtagggggaaaagagggcaggtggtgctcagagtggggtacacagggaagggcaccccaaagctgggctctgcgcccttgagcccctctagatgggtatgcaaggtcaagatcatcctgcagggactagaaagctgtctgggaggagctgtgtttgtgcctgggtgtttgccactacttggggtagtgggtgtgtgtttggagttggagagaagatgatatgtatgaatatctatatttggatgtgagtggttctatggttttgtttccagcgggcattgcctgtgtgtggagagactctatatgtttgtttacgattgtatgtgttttcttgtgttggcatgttctgcatttgtgtgcatcctggtgagagactggaggtggtgtgagggacagggggcatatgcacacttgcgtgtgtctgagtgtgtctggatgctggtgcccccacctacaacatttgtgttctgttcctggaacagcgccatggggcaagcgtggctggaagatgttccacaccttactgcgagggatggttctctacttcctgaaggtaggaaaggagccaacacccctgtcagaatgggagactgagagaggcccagaacagtctggagggtgggcagctgatgataacctcttctctgagcccctgtgactggtagcagggagaagaccactgtctggagggggagagcttggtggggcagatggtggatgagcccgtgggggtgcaccactcgctggccacccccgccacgcattacaccaagaagccgcacgtcttccagctgcgcacggctgactggcgcctctacctcttccaggcaccgtaagtccctggggtgggagactgtggcaaggccttgccctgccctagttctctctcccctgaccctgctgacacctgaggcttgtgggccccagggggtcctggtgggaatggccgtatgatcagaaattcttagaaagcggcagcaggaagaggagctggggaccagggatgaagcccaggcatcgcctacttcctccccatccttggccaactttgccagcacagtatgccttttccttgtcagtgggataaagcctcccagttcagaacacaggattccgggaagttgctaatgattgaccatatctggcatttgttatgaaatctgtcaccttctcagattgtcctctttattttttattgtttatttttgagacagagtctcgctctgtcgtcctggctggagtgcagtgactctcacctcggctcactgcaaccgccgcctcccgggttcaagcgattctcatgcctgagcctcccgagtagctgggattaaaggcgggcgccaccgcgcctggctaatttgtgtatttttagtagagacggggtttcaccctgttgaccaggctggtctcgaactcctgacctcaggtgatccgcctgccaaggcgttgccaccgcaccgggcctccaaattttcctctttattgataagaaatgccacggtcagaggtcgggtgcccggctagtggcagggctgtaactatgggaggctgagttctgagcagctggccagctgtgcaagcagccacaggagggggcgggaggagggtgacaggacggactctgtgtccccggggaccaacgacctcctttgccccagcactgccaaggagatgagctcctggatcgcgcgcatcaacttggctgcggccacgcactccgcgccgcccttccccgccgctgtgggctcccagcgcagattcgtgcggcccatcctgcccgtgggccccgcccagagctccctggtacggcctccgggaaggggtggggtccggcggaactgggaatgtgcacctggagccccaggactaactcggggaggctggaggcgggctgcgcacttggcctgggaaccgaggcggccaggggggcggcgcgcccgggcccggaaagcggcggaggggacgcccgggacagcgcccctcaccgcccgctgctcgcaggaggagcagcatcgatcccacgagaactgcctggacgctgccgcggacgacctgctggatctacagaggaacctgccggagcggcggggccgtggccgcgagctggaggagcaccgcctgcggaaggagtacctggagtacgaggtgagcggccgagcccacctccccgccgctgcgcagcgccctctccgccctctcgtggccgcctcggtccctgcagccgtcactgccctgaccgcgccggggcggggagaggcgcttgcgtgcgggcggggcccgcgtgcgccgtctgcaaaggggcgggggctcccacatggacacccgcgtgcacgggcgtgcacaaagagtgtgtgtccccacgcacttaggcctgtcgcctctcgtcctgggggcacatagcagctgcttgtctggaaacacccatagcagatgttattttacagttttcttttctcctaagagtatatttggcttttcccaagttgaagggaaaactgtatttcagctcaactgttccttctaatacctaccaaatattaataggtagtatggatggagcttgtcttccttgcatggattgtctcattcaattaacagctctgggtaggtcctgttatcctcattttacagatgaggaaactgaggcacagagaaattaaactactcttccaaatctggtaaatttacatgctgctctaaatgccccgtttatggtcttaactaagaaatgaccgtgtttttttgtttttgtttttgtttttgagacaaagtctcgctctgtcgcccaggctggagtgcagtggctcgatctcagctccctgcaacctccgcctcccaggttcaagcgattctcctgcctcagcctcccgagtagctgggattacaggtgtgagccaccacacctggataagttttgtatttttagtagagacaggggttcaccatgttggcaaagctggacttgaactcctggcctcaagtggtctgcctgcctcagccttccaaagtgctgggattacaggtgtgatccactgccccggccagtaatgactttgttgactctacagcccatgttgaaatgttttatcccttagtctcccccaaccctcacccatccacccacactccccaattctgctttggtgtgacgtcagttcatctgggatcctaacactgggtgcctgcttcagggatcctgggtgcctgcttagggtgagggcccactgggcaggaagggtaggtgaatgcaatgtgaaaatagagggaatcagaggccacccagaggcagagaccaggaagtgggagtcaacatcgcctcctgcctgtccccgctgtgcccgcatgcagccctctgcctgtctttcaaggtcccaggctatcccttggcttgttggttgtatccatggctgtgaactccccacttctcagaggcctcagggtgtggctgtgaggacccaacctcttcctcccactgaccagctgggacctttaacaagtcaccagccctcccttccgcaatgatttgtcccctcccagggctggcatgaggatccaatgggatggagggtgaggaagcactttgtaaactggaaaccatatcccaaggatgctagctgcaggggcctcaggagtacagtgttaagtagatgagggtagttagcatcatgctccacagatgccaattgttaaaatgctatttagacccaattagggctgtacagatgtgagctgtttgtgtgtagggctgcaaagatctcaggcatagtgggtgacacatcttttagtgcctcaaagatggaacatggcatagagatgttagttacagcactccaaggggttggttattattagaacagggctgggctgatatgtgtcattataatactatccagaggtgtgctctgcagtctgcttatccaagcattatactgacactcacggttggtccagccctctttctgtcgaggtctgtatcgccatagcttcatgtacctgtgagctgtccctcacgattctagcctcctcccaacctggagccaggatggtgctaaggtggtggggcctgtgtgttgcagaaaacccgctacgagacctacgtgcagctgctggtggcccgcctgcactgcccctctgatgctctggacctgtgggaggagcagctggggagggaagctggaggcactcgggagcccaagctcagcctgaagaagtcccactcgagcccgtccctgcaccaggatgaggctcccaccacggccaaggtgaagcgcaacatctcagagcgcagaacctaccggaagatcatccctaagcggaaccgcaatcagctgtgaagccagcaccacctcagagacactgttccctgctccagggtagacctgagatgaacctccctggaggagacttatttcaatgagtccaccatgacggatgaggcacctcctttccctgctgaaggacaaaccttgtttccctgtggccctcattcttgtgctccctgaagctttcctaatattgctgtgctccccaccacccccatggcagtccctccgcagccccagtccctggccacgcccaagggaagagggaggtgaggacttgactttcctcccagagctcagcccatgtcaccctccaggccccagaatccagagtggcctcatttcctagacttgctgagaactcagcacttgtttgagaaccagtgcttatgtggtgtgcccttggcttctgggggagagcttggggcagcagaggcccctgggcagcccagccaggggagccacagccccaaggatggtcttgctctgggaattaggtgaccttcctggggaggccccaggagagtgaatcagggactcttgagaaattcctaaccagcctcctgtgacccagggagcagggtcgctaaggtcctgcccactgaggggacagccttctgggcagggacctcggggggcttcaagggctctgcacggctgtggggccctgtgcctttgtctccttgtgtctcctttcccccgaagtagatgaaacagtctcacatacccaactgctcatcaacagagcagagctgatggcatgagtgagggctgggcggggtggggcctccagagctttgcagggaaccctggaaccctaggaacaaggagcctttgttccaacagagcagagaaggaggttctctatgttcagaccactggagaggatagagaggtaaaaggtggcgacagtttcccttaggggtctgcctggcaggagccacagctcaggagagttgtgagggatgggacggaggctggcgaccaggcgaggcctaggccaggctcgggagacttttctgtgctcctttctacacatgccttaaaccttccttcctgtggggtgcctggaccccttccccatctctggcagctcagagggtctctgctgctctcccctgggaaatcccctcatcctgccctctggctgcctcccagctgggcttgttctctgagggaggttccggagactcatggacttggggctctgcctgtaggaaggaggctgggccggagggaccagccaccattgtctctgttcagccaagtgtgcaagtaggctgcccgccaagagggggcctctgctacccgctgctgcctgccggctgacacactgcctccccagccttcctgctaggccaccctcctcccttcccatgcttgtaaccagctctggggcttgcacctccacaaagtaaggttggcccttggaggccatgtttgggtctccggccagggcctagggctaggccatgcacccaatgggtgcacaataaataacaggtcaacaaagagggaggtgtgtcagtgtgtgaggaagggaggtcaggcagctaggaccacctgcagtgtggcaggcttcatccctctttgctccaagtgtgtatgtgtgtctgtgcatgtgtgtagtgtctgtgtctgtgtgttcatgcatatgcaggagtcacacggtcataggccatcaaagctggaggaga

SEQ ID NO: 258 - DNA, 32742 bp, Homo sapiens
  source 1..32742: mol_type = other DNA
ggagtcagccagacccccatcctgacaaggtaagggcgtgccgggggcgtgtctgccagcggggagtagggggtcacctctctgaagagggtcgctgggcaggaggcaggtcccctggaaataagatggaacaggtctgagggatagagagtggagaagcccttcaggagcctggaaaccagaaaccgcagcaggggactcagtccatcgggctgaagggcagcacctggggggctgaggaggaggaggagggggagaagctgtctagccctctgctgtagaagggcaaactccctgcaggaggggaacggcaggtgccaaggctgctcccaccctgaagcctcctcacagctagagggcctcactgtggaatcatgggacatcatggatagcctgggtcccatgatgagcccctgccagatgtcagctgtgccgtgtgtgacatcccactgcgtcctcgcaacacagtggtggaattgcctccattttatggacacagagactgaggaccatggaagcgaaggtgcccacgggaagaagcagagccggattcgactccaaagcccaggcttatccgccttacccatgtaccttgggcaattggctttagtcacctctggaaggctgggaccctagggagaggcaggacaggtctggggtgtggtgggggggggggtgggggaagaggtggctgaggagagggaccgcaccggggctcacatgggctgtcccccttgagctgtccaggtggtgtgtgtcccatccccatttcacagaggacgaaacttgagacacagagattgtgagagctggcccaggtcagacagctggtgggtgtggggcccccaacccagatcccccaaattctccatgacgaggcctccccttcaggctccactttgtaaccctggacttgaattttgctctaatttatcagaaccctgcactttgtttaggattttagttcagagattcacacacaccctcagtgaatcattgttaggaaccactcagctcatcagcccaccccatctccctggacctgctgggggccctacgtctgtcctcagatgccacctctaagagaatcctccccaggcggctgtcttggggcctgctgcatccacagctctagcacggggctctgtggagaggcggcaccacagggatgacctatatgtgttgatattgcttcctgttttacatatgtcaaaagacaaaattataaaaaatttatcttaaagatcttaattggcttttatttgcaattctagaattgggcaacaccccacttatagaatacaatgaatgatctgatgagccgagcagaggagtttggctttatagacagaatggggctgagagaaacagaaaacaaaaggggattagtcatttcaatttattttccttgtaaaggatagagctgagggaacttccttatcatgcccgctgaaactggcctgtctggggctccagctattgtctctctcctgattcttggaaggtcagataaccttcgtttgggcctggtggtgtggaacttcagcatgagtgactccattttggtctggtctgttggccttgtgtaggagctcagacaaaaccaatggcctccatacattttacttaacacatgtatttaaatgatgtttgtgtgcccattcttggtccacataccaagctgttcagggaggaagagccagaatcttagcacatttttcacagaagagatgaagaagggtaaaggagactgggcatggtggtggctcatgcctgtaatcccagcactttgggaggccgaggtgggaggattgcttgagcccacaacatggggagactccatctctatagaagaataagaagaaggaataggaggaggaggaagaagaagaggaggaggaggagggggaggagaaggagaaggaggaggaggagaaggaaggatttgaccaaggccactggactatgagctcctcgagagcctgggctgggtttctctggggtttttccatctcctgcacatgcccaggcctcagcagagaatggacacttggcacatgctgaatgaatgaatggagtagctagcggcagaagacgagctcaggatgaagtcaagttttcaaatccagtgtcattgtagactctgttgtctgcctttccagcagtgtgtagtgtgttccttcactgccagctggggaggcgaggctgcgaaggaaaagtgacccatgtacaccagaggcacagacctccggcattgagtggtcagaggaggcggtcctggggctgaggacaggtaggggtgggaagggatgcagcaggctgtgaggggaggatggtgtgaggatgagggtggggaacgggggatgttccaggtggaggaagtggtagctgcaaagatacagagcaaaggaagtaccagtaaggcttgggcactgttggcgcctggcagggatgaaatacggttgaggggggtggtaagatatgctctagaacgttccatgatgatagaaatgttctcttctgcactgtccaaaacagtagccactagccacaagtggctgttgagcacttgaagtgtggctagtgcaactgagggtctgaatttttaattcagctcatttaaatttaaatagccacatgtggctagtggctaccatatcggacagtgcaacctagagggtcttgctcatcaggttaagagagaggtgaagtggaataagcaaacgctttggagccaaacatttgcagattcaaatcttgtttctttctttttttttttttgagatggagtctggctctgttgcccaggctggagggcaatggcatgatctcggctcactgcaacctccacctcccaggttcaagcaattcttccccctcagcctcccgagtagctgggattacaggcgcacaccaccacgcccggctaatttttgtatttttgtagagatggggtttcaccatgttgaccaggctggtcttgaaatcctgacctcatgtgattcaccttcctcagcctcccaaagtgctgggattacaggcgtgagccactgcaccaggctctgcagaaatcttgagtcaagaaatcttgactcagtcacctaccaaatgtggggccttaagcctcagttccctcttctatcaaatggagtagcatcacttaccttgcagggttgttttacagatcaaactaatgagcaggtgctggaaaactttcagcacagtgtctgtctgagctcctactctgttctgggggctgggggcagagtactgagggtatgaaaaggaaccacagggcagtggttcatgcacaagtatatgtatctgtcaatttctctttcatcccttgcctgccttattcaaatactaaacaaaacagagtgatatgaggcagcttacagtatacctataatacaacagaatcaaaaataaaataagctgggacgtaggataaatgaaggtaggaaaatacactgcagctgggaaaatgttagtaaacaaaatgtacatcagaaaatcccatatatttgctaggcatagacacaaaatttgttctgaacttccagatagtcacgcacaaaactatgcagtaaagattaataatgttctcaagttaggcaaaagccagtttccaaggggaagaccagctttcctgttgcaatgtcatgaaggggataaaaagggagaaaacgacattggctataacaggaaattcaggagagtttttaaagagctatttgtagaaaaggaaggaagatttctcagggactatctctacatgagggagggcacctcacgggctatctcagcatgaagggggcttctcaaggactatcataaaaaggaatgaataaggacttccttgagggctatttcttttaaaaaaaaaaactccatagtttttaaggtacaggtgttttttggttacatggataagttcttcagtggtgatttgtgagatttttttgcacctatcaccacagcagtgtacactgcacccaatgtgtagtcttttgttgctcacccagctccagccttcccccgaaagtccccaaagtccattgtatcgttcttacgcctttgcagcctcatagcttagctcccatttataagtgagaacatacgatatttggttttccatttctgagttacttcacttagaataatggcctccagctccatccaagtagctgcccaagacattatttcattgccttttatggctgagtagtattccatggtgtacgtataccacattttctttatccactcatgagttgatggacacttaggttggttccatatctttgcaattgtggattgtgctcttataaacatgcacgtgcaattgtctttttctggttttattttttttttttgagatggagtctcgccctgtcacccaggttggagtgcaatggcgtgatctcggctcactgcaatctccgcctcccggattcaaatgattctcctgtctcagcctcccgagtagctgggattatagatgcccgccaccacacccaactaatttttgtatttttagtagagacagggtttcaccatgttggccaggctggtctcgaactcctgacctcaggtgatccacccgcctcggcctcccagagtgttgggattacaggcgtgagccaccgcgcccagccgcaagtgtctttttcatataatgacttatcttattgctggatctaacggtaggtttaattgtagttctttaaggaatatccctactgttttccatagtggttgtgctagtctacattcccaccagcggtgaaaaagtgttcctcaagggctttttctggaatgaaggggggcatccaatgggcttttgctctatctcatgaagtggggcttctcaagggatagctctagaataaagcaggatttctcaaggaccatcccacaaatgaatgagggttttcaaaggctatctctacagtagaggaaagtttctcatggcctacctctaaaatgagggagggtttttgaaaaggcactgatacagtgaacaggggcttctgtggagctacgtctacatgaaggacggtgtttcaagggctgtctctctaatgaagaataatttctcaagggttatctctgtataggaaagggggtttctcacaggctatctctacagcttaggaagttttctcaggtgctagctctaaaatgatggagggattttcattgttcatatctataatgtgggatatctctctctactgtgaatgacatcatctccaggctatctctccacagtgaaggcagcatctgctgggctgtctccacagtgaagggagcgtctgctgggctgtctccacagtgaagggagcttctctgagccatctccatggtgaaggaggcatctctgtggctgtctccacggtgaagggggcatctccagggctgtctccacagtgatgggggcttctccagggctgtccccacagtgaatgtcatcttcttgatgctgtctccacagtgaaggaggcatctcgagggctgtctctcctatgctgtctccagataggccgacagcatagcataaaagtgcagcttaggatgaactgcctctgaataagtgtaaaccaagcattttagtgcaaagcagtgaacgtcactacaaagtgctgtacaggatccactggtagcagagggtgtcagacttcagttctgattgagaggaatagcatcaatgagtctgaaggaaacagttgaaccaggtctaaaactgcaggctggactagaagctaaataggccgacacttgcccatacctacacgggagccatatggcacctgaacctagttgtgtgtgtcaagtgtgtgtacatggtggggagggataaacttggtcaaatttgctcatcttgtgatgttgcagaggataggcagggtctttgccaaatccccagccccatatttcccctctgatagggagcagagcccttctgggaggagagattctcctagaagaggttcttctccagggcaccctgccttcgctgacttccccaggaggggctgcaccaggctctccaagagcagggtctcttccccggggctgccttgccgtcgctgactgcctcctaaggaagctggatttctctagccaaattgtgtcatgttgtcggatttttggcagtgggttggctggccctgtgcccactgggagaagacaggatggaggactgtaacttctcattcttaccctgggcttgcctgggcagaagaggagggagccctcatggtgatccaggagcactgcatctctaggccagagaacatctcgcagggacatatatctccggcactgtcagtcacatgctattcatgggaagggtatctcttggacattaccctgaatgctgagctgtcctgtgggtgttagactcccttccagaagaggggcatacccttcttcatggggagccctgggctgtggagacaggctggagcagggcaatggagggaacttgaaatctagactcaggaccctttttctctggtgtgcactgacaaccccagcaccactgagagtggggctgccgccactttcagctcttcctgttgctccctggcagctgtgtgggggccctttctgttgggccctcccatggctggctccccactgagcttggcagtgaggctgtgcagatggtcatcactgtctgggcggggatggaagctcagatatcccagacaacccctgttgacagtaaaataagtaacaaatgcatactatggataaggatgaaggggtggccagcccctccacacctgtgggtgcttctcgtcaggtggaatgagagactgagaaaagaaagagacacagagacaaagtatagagaaagaaaagtgggcccaggggaccggtgctcagcatatggaggacccacactggcactggtctctgagttccctcagtatttattgatcattatctctatcaccatctcagagaaggggatgtggcaggacaatagggtaataatggggagaaggtaggcaggaaaacatgtgaacaaagatctctgtgtcataaataagtttaagaaaaggtgctgtgctttaatgtgcacatacacaaacatctcagtgagttaaagtgcagtattgctgctagcatgtctcacctccagccctaaggcggttttctcctatctcagtaaatagaacatacaatcgtgttttacaccaagacattctattcccagggacgagcaggagacagatgccttcctcttatctcaactgcaaagaggcgttcctcttttactaatcctcctcagcacagaccctttacgggtgtcgggctgggggatgatcaggtctttcccttcccacgaggccatatctcaggctatcacatggggagaaatcttggatagtacctggctttcctaggcagaggtctctgctgacttccacagtgtattgtgtccctgggtacttgagattagagaatggtggtgacttttaacaggcatacggccttcaagcactttttttttttaacaaagcacatcctgcacagccgtaaatccattaaaccttgagtcaacacagcacatgtttctgcgagcacagggttggggctagggttacagattaacagcatctcaaggtagaagaatttttcttagtacagaacaaaatggagtctcttatgtctacttctttctacatagacacagtaacagtctgatctctctttcttttccccacaaaggaaaagccagacaggacagaaaggagccatgtgtgaagtaaaagtctcttccctccttccactctccaccccaataaattacagttaacagttcaatataattacctccccagagtatttctctccatcactctctttctctatatatgtatatatatatcctctctctctctgtttctctctctccatatatatatatattttttttttgagaccgagtctcgctgtgtcacccaggctggagtgcagtggcgcgatcttgcctcaccgcaagctccccctgccgggttcacgccattctcctgcctcagcctcccaaatagctgggactacaggcacctgccaccacacccggctcatttttttgtatttttagtagagacagggtttcaccgtgttagccaggatggtctggatctcctgacctcgtgatctgcctgcctctcctgacctcgtgatctgcctgcctcggcctcccaaagtgctgggattacaggctagagccaccccaactggcctttatttttatttataatattttagtgatggagtcttgctctgtcacccaggctgaagtgcagtgatgcaatcatagctcactacagcctcgaactcccagacttaagtgatcctcccacctcagcctctcaagtagctgggaccacaggtgctcaccaccatgtccaactaatatctcctatatttttaaataaaaataacattatactataaaacatatattatttttattacatactcatatatcaacacatatattagattgaatcatttgaaactgccaatatgtgaccttcttcacttagaaaaaggacactttcatatagttcaacctaactacactttttctttttttgagacggagtctcactctgtcacccaggctggagtgcaatggcacgatcttggcttgctgcaacctctgcctcccaggttcaagtgattctcctgcctcagccttccaagtagctgggattacaggggtgtgccaccacgtctggctaatttttttttttttttttttttttgaggtggagtctcgctctttcgcccaggctggagtgcagtggcgctatctcggctcactgcaagctccgcctcctgggtttacgccattctcctgcctcagcctcccgagtagctgggactacaggcgcctgctaccacgcccagctaattttttgtatttttagtagagacggggtttcaccgtattagccaggatggtctcgatctcctgacctcgtgatccacccgcctcggcctcccaaagtactgggattacaggcatgagacaccgcgcccggccacgtctggctaatttttttgtatttttagtagagatggggtttcactgtgttagccaggatggtctcgatctcctgacctcatgatccgcccgcctcgacctcccaaagtgctgggattacaggtgtgagccaccgcacccggccctaaccatgctttttaaagagctgtgtggtattctacccaaaggttgaacctgaatccagcagacctctgttgttggacaattggtggtttgttgagtttttgtttgtttccattttttgctattaccatcaatgcctgtacatctaccttgatgaacttttacaagtatatttgcagggtatgttgctaatagtgggattgtgtagacaaaaggtgtttaaatttttgatagatgttatcaaattgtcttctacaaatggtggcaccagtttaccctttaccacagtgcatgggcaggcagggtcatctgaggccacacacagcagcgggcctcctgggtgggcccactgtgctgcccaggggccccctccttcctcaggctcccatcctgggtgagcagccgcatgctgggatgagatcagacccttcagttgggggacattgggaagttacctagcctcgagcagcctcaactctctgagagacaagtcggggaaaatgaaataacttgggtgaagcacagcccgacagcatagaacgaggctctgctgggagcagttcccctttcttttcctctcctcctgcccagggccttgtctggcctggtggatgggtgcacaggctctgccacagccctgtcaccactaatgccaaggctcagtttttccaaatatggatgagtatgggaaataatcatatgtgcctcacgggcttattgtgcaatggaaggggcattgtatgtggagctgttggcccggtgaacgcccagtaagtgctgctcttgtaatgataccaggacaactcagcctgtgaatccttggaccctggcaggccctctccccaaggctgaccatttatagtgacctttctggggtccaactggggcccactgaccagcctgggctagccccaaattcagggtgtttggcccggatctagactctggtgactttgcctcctttgggtggtggcccttccaacctgtgttcttcttgagtgatggcttccatgccaggtactctcagctctggggagcagggaataggcagtcagctggtggcataggagaacttccaagtcttactcatccctcacccagccccagatgccctttctgcccaaagaacactcagacccctttggagggcaaagctttgtcagtgccccttccgggctggtatcccataggccagagtctcaatgttagctttgcttcttggacccctggttcctgatctgtgaagtgggatgtctccatggacagcacagggttgctgtggggctcaaatgagagaacctgtggaaagtgccctgcacacaacctggcactcagctgcttgcccactccagccctgtcctggtccagcaatgctttgatcttccctgcacctccacctccccacttgcctttcagcatattcttacccactctacccatactccagttcagtggcaccacagaaatgttagtggtgtggcttcagacccacagcagctttgaggagggctttgagaactagcagtttacccttctcttctcaggtgaaggtaaccctcattctggtccctgagattaggtaggacactgatccccgtaagctcagccacactgacctgcctcagggcttaacaaaaggaactggactaagaagtcatcccattcccaaggggcagaaaattttaagcacaccagtgcttcctgtaaggggcaatgcctcacctgctttcctgggtaggtccatccatccatccatccatccatccatccatccatccatcaatccattcatctgtttgttcattcacctattcacccaccaatctatccacccattcacttacccaatccaaccattaatccatccaccatccatctatccacccacccacccattcacccactcattcaaccactaatcgactcatccatccatccatccaccaatctatccatccatcaacccatcagtggatccatccatccacttacacatccatccaactacccatacatccacctattcattcactaatccatccatctattcatccatctacctatccatccaccaacccatccatccatttacctatccacccgtccatcagcccacccttccacctaccgactcatccatccactcatcccattcatctgtccactcatccatccatttactcagcaagcatgtcctgagccctgactagtatgagtaagtcactatccagctctcaaatttctcacaggtgtgggagagacacacactgtaacacataaaaacagggataaatgctgaggttgaaaatcgcagcctctgcatgtgaggatgtctgtgcctgtgtgtgtgtacatgcatgcatgtatggtaacacacgtgcttgtgtgtgtgctccaaattcatatcagatcaagtacagacacactgaggtaaaagagaacatggggtgtttcaggaactgcatgatattcagtgtaccctggggggaagaggtaagatacaaggtgggctgaaaaggtaggcaggctatgatgctgaagatccttgagtgtcataaagatatggcacattcttagctgtgggaggcatgacacggtcaacttttgcatcttctaaagatcacttgattggtgtgatggaggatgattgttctgagagtccagcagcagcaaggccacctgggatgcttccaacctcccaagtgaaggatgacaggagactaaggggtggcaggaaggagagtgcctcaagttttttcttccttttaatgtctttatctcattttggcattagagtaacgctggcctcatagaacgagttagaaagtatttcctctgcttctgtttcctggaagatactatggagaattaggctcatttcttccttaaatgcttggtagaattaccagtgaaaccatccacacctggtgcttccttttttgaaaggttgccaatcattgattcagtttctctaatagatacaggattttcagattatctatttctctttgcttgagttttggtagttttcatttttcaaggaatttgtccatttcatctaagttaccgaatgtgttgttcataatatgtctttactatccttttaatgtccgtgggatcagagtgatgtctcctctttcatttccaatagtagttaatttgtgtcttctctttgcttttcttggttagcctgacagaagtttatcaattttactgatgtttgcaaagaaccagttttttgtttcattgaattttctctttttatttcctgtttccaatgtcattgatttctgttctaatttttattttttattttcttcttactttaggatgatattcttcttctttctctagtttcctaaggtggaagcttagattattgattttagatttttctttttttttttttttgagatggagtctcactctgtcacccaggctggagtgcagtggcggatctcaactcactgccacctctgcctcccaggttcaagcgattctcctgcctcagcctcctgagtagctgggattacaggtgcgtgccaccaagcctagcagctttttctatttttagtagagacggggtttcaccatgttggtcaggctggtctcgaactcctgacctcgtgatccacccgcctcggcctcccaaagtgctggggttacaggcatgagctaccacgcccggcctctagattttttaactatgcattcagcactataaatttcccttcagtacttgtttcattggattccacaaatttcgatgtgatattttcattttcatttaattttacatttttcttcggacttacctgacccatgtgttatttagaaatatgtttcttaatctctaaacattttgggcttttccagttatctttctgttattgatttctagtttaattccattgtggtcagagaacatactttgcgtgtattttgacactttcttggcaggtgcgtacatgttaataattgtcatgtcttctttgataaatttatccctttatcattatgtaatatttctctttattcctcataatattccttgccctgaagtctgctctaaaactagtatagctactccaactctctcttctttctctctttctttcttctttcttccttccttccttcctttctttctttctttctttctctctttctttcttatacaaaacactgatgtatctagctctattttgattagtataagcaacctaatactaacccaaccctttcttttaaccatttctccaacactttacttttaatttatctatgtctttaaaaaataatttcaactggtatttttattagggagtacatgtacaggttcgttacgtggatacattgcgtgatgctgaggtagaaatgatcccgtcacccaggtagtgagcgtggcactcaataggtagtcttcacatttaacataggtttcttgtggacaacatataattgggagcctcaagtttttaaaagacaaaatctccaggtcctagggatcatttggctgtgaagaatagaagactcggtgtttctttcagcaattgttagtttcatttgctgagataaagaatgcaggggcagaagcaggtttggggatcgaggagatgaggtgctatggtcactttgaatttgatgtgcccatggcatatctgagggacatgtccagggagaggggccttggtgggtctggagatcagggtagggatgagagttggagacgctaatttgggactcagcagggctatgatcctggtggccctgagagagtgggcacacataaggggagtgtgcaggctgaaagagaatagaacaagggctggcagatcagtgggaattaagccatccaaatggcttaccccaaataatcaaactgcaaaaaggcagagacaggatttctgtgttttgtctccttccctccacatctgccaattttattctctcagatcagctatttttaagaagctaggaccatagctcctggtacttttggcattgtatttcataattttggcattagagaagaaaaccaaccctcagctcccactcagaacatcccagaaaaagctgtgattggctctggcttggaccacatggccgcttggggtcccaggattcacgagcttctcatcagcaacacaatttgaactaggggagatgttccccataaggatataggaggaaggcatactgggcagacaaaagtcaccagccactcccttggacaccaagaggtcaaggtgagtgaaagggccaggcgcagtggctcatgcctgtaatcccagcactttcagaggacaaggtgggcagctcacttgaggccaggagttcaagaccagcctggccaacatggagaaaccccatctctactaaaaatacaaaaattagccaggcatggtggagcatgcccatagtcacagctattcaggaggctgaggatcccttgaacccgggagacagagttgcagtgggctgggatcacgcaactgcactctagcctgggcaacagattaagactctgtctccaaaaaaaaaaaaagctctaggaggagatttagtggtgccccagaagcagagggaaagtcaggaaagtggagccttgtaggagcaaagtgagatggtcaggaaggcatgaaaggtgagaaggtggaggcagtgttatggggtggctgtttcaggcaacttggctgtggggcaaaacccaaggaggaggagggtatgaaagctggatggggacggtgaggctaagaaaatgcatttttaagatagacaagacctgagcttatcactattcagagggtaaaggaccaggagagtggacgaggatgaagatgtgagggaggataatatactagtcactcattgctgcataacaagttatcccaaactttaacagcttggaataacaagtatttattatctcacacaagttttgggggtcagaaatctaagagcagcttatctgggtggttccggcccagggaccctcatagggtttgtagtagttgcttgggttgccatgaccaaatactgcagactgaggatggggtgggggtggggcttaaacaatggaaaagtatattctccactgttctggaggctagaaatacaatatcagggtgtcagcagggttgggttctaccaggcatctctccttggcttgcagatgtgggcacagccatctgtcctcttgtcatctcttcacacagtcttccctctgcatgtctgcatcctaatctgttgttgactataaaattgtcgtcacaatgttggctgagctatggtgatctgaagccacaactggggctggagggtcccttccaagatcacacagctgttaactggggccctcagttctcacaacacgggcctctccttagggctgtttgagcatcctcacaacctccaggctccccaggctgagagatcttagagagagagcaagcaggaagccacaaaggctctactccattccttctaccttattctatttggcaaaagcaaatcactaagtccacactcgagatggggtgaattagtctctcttttgaagggagatgtgtcaaagaatttggggacatacattaaaccactacagtaattgataaagcaaggccctaaagcagaggcgggagaaggcagggctggaaggattcgtgtgggctgtcagggttccctgcccctgggcagtcatctaagtctgcagagatacagaggagacagggaggggcagcgttggaagctgagtgttgtttctctcttgtttcagtgaaagaggtcaaggtgttctgcggagtgggtggtggaaaggagctttgaaatagggattttggcagaaacagctgactggggcctaaagaaggatctctggacactgctgaaggcctagaggaggtgcaggccatgagaccaccctgcccctgtctgtaagggggtggaatacatccccagccctgctcagctccaaggctgggactttgcaaggagagatcaggaatcagttcaagggaaatcacagtattcgcaggagggtgacggaccacaggggcccacgtcatgtatgcttccttctggttcaagttggcatttggaaaaaaaagtgtgcttcttgtattttcttttctttgggccttttaatttttacttttaattgacgcataataattgtacatatgtgtggggtacagtgagggtgtttcaatatgtattttatttttgtattccatttacaagttttgatctgaccactttcgttccaaaaagatttgaggccgtttccaggctagttggggatggaaatgaagccaggaggtgggctggtagacagaggagacatggaaggacccaggtgtcatgatggaatgagaacaagttgctcatgggacccagctgggtccagggcgtgttgtggtgaggaggggcggtggaggccacagcttctgaagcggagcagttctgggctgtgggaagaccaggcaagccatggagtgggggcccctagggctgggggtcagaggaggagacgtctatggtatgtgacaggccatgtggggaatggcaggaccaacatggggtctcctgtgaggcagatcctggtgtctggagaggaatgatggggcatgcctggaggtcagatgctgcagcggggaggagggcaggaccacgggtgggcctcaaacttccacatggggtggagaatccagaatctggaagcaacaatgggcagccagaggcagggcaattccctctgtgtcttttcccacctgccaccccctgaaagagctgtctgggagccaggattcagttatacaacaggtattctctgcatttttatacaggttcttaaacattcccaaagcagaggatgtggggcaaagaggagggattttggagctggggagaaaattctccttctttgcttactaactgcatagcctctgcaaagtctcagcatttctcagcatttctcagttttctcacctgtaaaacagagacagcagcatttcttctcagagcttcctccgccactgtgcaccctcactcatccatcaaagccgttgtcaaagtcacatcctctccaagggcttcatctgctctttcactggacaagtattgactgatggctatggccttataagatagtttgaattcaggtaatgtgatgcctccatatttgttctttttgtttagtcttgctttggctatgggggatcttttttggttccatatgaattttaggattgttttttctagttctgagaagaatgatggtggtattttgatgggaattggcttgaatttttaaattgcttttggcagtatggtcatttcacaacgttgattctacccatccatgagcatgggatgtgtttccatttgtttgtgttgtctatgatttctctcagcaatgttttatagttttccttgtagagggctttcacttccttggttaggtatatgcttaagtattttatttttttgcagctattgtaaaagaagttgagttcttgatttgattctcagcttggtcacttttggtgtatagcagagctactgatttgtgtacattaattttgtatcccgaaaatttgttgaattcatttatcaattctaggagctttttggaggaatctttagggtttgctagatatacaatcatatcatcagcaaacagcaacagtttgacttcctctttaccgatttggatgcctgttatttctttctcttgtctgattgctctggctagggcttccagtactatgttgaagaggagtggtgagagtgggaatccttgtcttgtttctgttctcagagggaatgctttcaacttttccccaatcagtattatgttggctgtggatttgtcatagatggcttttattgcactgaggtatgtcccttgtatgccgattttgctaagggttttaaccataaaaggatgctagattttgtcaaatgctttttctgcatctattgagatgatcatgtaacttttgtttttaattctatttatgtggtgtatcacatttatttattatttttatttatttatttattttgagacggagtttcattcttgttgcccaggctggagtgcaatggtgcaatctcagctcaccacaacctctgcctcccgggtttaagcgattctcctgcctcagcctcctgagtaactgggattacaggcgtgtgccaccatgtccagctaattttgtatttttagtagagacagggtttctccatgttggtcaggctggtctcaagctcccggcctcaagtgatccacctgcctcagcctcccaaagtactgggattacaggcatgagccactgtgcccggacgtatcacatttattgacttgcgtatgttaaaccatccctgcatccctggtataaaacccacttgatcatggtggattatctttttgagatgctgttggattcagttagctagtattttgttaaggatttttgcatctatgttcatcaaggatattagtctgtagttttcttttttggttatgtccttttctggttttgatattagggtgataatggcttcatagaataagttagggaggattccctctttctctatgttgtggaatagtatcaataggattggttttcttttttgaatgtctggtagaattcagctgtgaatctgtctggttctggacttttttgttgttgctggtaattttttttattaccatgtcagtcttgctgcttattattggtctgttcagggtatctaattcttcctgatttaaattaggagggtgtatttttccaggaattcatccatttcctctaggctttctagtttatgcgtgtaaaggtgttcaagtagccttaaatgatcttttgtctttctgtggtgtcagttgtaatacctcctgtttcatttctaattgattttttttttttttttgagatggagtttcactctcgttgcccaggctggagcacagtggcatgatctcagctcactgcaacctctgcctcccaggttcaagcaattctctgcctcagcctcccaagtagctgggattacaggtgcccaccaccatgcctggctaattttttgtatttttgttagagatggagtttcaccatcttggccaggctggtcttgaacccctgacctcgtgacccactcgccttggcctcccaaagtgctgggattacaggcttgagccaccgtgcctggccgtctaactgatcttattttgatcttctctcttcttggttaatcttgttaatggtctatcaattttatttatcttttcaaaaaaccacctttttgtttcatttatcttttgtgggtttttgttgttgttgttgtttcaatttcatttagttctgctctgatcttggttatttcctttcttctgctgggtttggatttggtttgttcttgtttctctagttccttgagatgtgaccttccttagattgcctatttgtgctctttcagattttttgatgtaggcatttaaggctataaactttcctcttagcattgcctttgctgtatcccagaggttttgacagattgtgtaactattatcgttcagtttgaagcatttttaaatttccatcttgatttcattgttgacccaatgatcattcaggagctagttatttcatttccatgtatttgcatggttttggaggttccttttggagctgacttccaggtttattccactgtggtctgagagagtacttgatataatttcaattttcttaaatttattgagacttgttttgtggcttatcgtatggtctatcttggagaaagttccatgcactgaggaatagaatgtacattctgtggttgtggggtagaatgttctgtaaatatctgttaagtccattcattccagggtatagtttaaatccattgtttttttgttgacttctgtcttgaggacctgcctagtgctgccagtggagtattgaagtccccggctattaattgtgttgctgctatctcatttcttaggtctagtagtaattgttttataaatttggaagctccagtgttaggtgcatgtatatttaggattgtgatattttcctgttggacaaggccttttatgattatataatatccctctttgtcttctttaactgctgttgctttaaagcttgttttgtctgatataagaataactactcctactcacgtttggtgtccatttgcacagaatgtctttttccacccctttaagtttatgtgagtccttttgtgttaggtgattttcttgaaggcagcagatgcttggttggtgaattcttatccattctgccattctgtatcttttaagtggcacatttaggccatttacattcaacattagtattgaaatgtgaggtattattccattcattatgctatttgttgcctgtataccttttaattgcttttttgttttataggtcctatgagattcatgctttaaagaggatctgttttgatgtgtttccaggatttgtttcaagatttagaactccttttagcagttcttgcagtgctggcttggtagtggcaaattctctcagcatttgtttgtctgaaaaagactggatctttctttcatctatgaagcttagttttgctggatacaaaattcttggctgataattgttttgtttaaggaggctgaagatagggtcccaatcccttctagcttatagagtttctgctgagaaatctgctattaatctgataggttttcctttataggttacctggtgcttttgcctcacagctcttaagattctttcctttgtcttgactttagataacctgatgacaatgtgcctaggtgatgatctttatgtgatgaatttcccaggtgttctttcttgtatttggatgtctagatctctagcaaggccaggaaggttttccttgattcttccccaaaaaatgtgttccaaacttttagatttctcatcttcctcaggaatgcaaattattcttaggtttggttgttttacataatcccaaacttcttggaggctttgttcattttttaaaaatcttttttctttgtctttgttgaattgagttaattctgaattgggttgattcagagcttgtcttcaaactctgaagttctttcttctgcttgtttgattctattgctgagactttccagaacattttgcatttctctaagtgtgtcccttgtttcctgaagttgcaattgttttttatttatgctgtctgtttcaatgaagatttctcccctcatttcttgtgtcatttttttgattttcttaaattggactttacgtttctctggtgcctccttgattagcttaataattgaccttctgaattctttttcaagtaagtcagggatttcttcttggtttggacccattgctggtgagctagtgtgattttttgggggttttaaaaaaaccctcattttgtcatattaccagaattgtttttctggttccttctcatttgggtaggctatgtcagagggaagttctgggactcaaggctgccattcagattcttttgtcccacggggtgttcccctgatgtagtactctcccccttttgtggtattggtataaaaataggcatatagaccaatggaacaaaatagagaacccagtaataaacccaattgcttacagccaactgaccttcaacaaagcaaacaaaaacgtaaagtggggaaataacaccctattcaacaaatggtactgggataattgaaaagccacatgtaggagagtgaaactgaatcctcatctctcaccttatataaaaatcaactcaagatggatcaaggacttaaatctaagacctaaaactataaaaattctagactataacatcagaaaatcccttctagacattggcttaggcaaagatttcatgaccaagagcccaaaaaacaaatgcaacaaatacaaagataaataggtgggacttaattaaactaaagagcttttgcacagcaaaatgaacagtcagcagagcaaacagataacccataaagtgggagaaaatcttcacaaactatgcatctgacaaaggactaatatccagaatctacaaggaactcaaacaaattagtaagaaaaaaaaccaaacaatcccatcaaaaagtgggctaaggttatgaatagacaattctcaaaagaagatatataaatggccaacaaacatgaaaaaatgctcaacatcactaatgatcagggaaatagaaatcaaaactgcaatgtgataccaccttactcctacaagaatggccataattaaaaaatcaaaaaataaaagatgttagcatggatgcagtgaaaagggaatgcttctacactgctggtgggaatgtaaactagtacagccactatgcaaaacagtgtggagattccttaaagaactaaaagtagaacttccatttgatgcagcaatcccactactgggtgtctacccaggggaaaagaactcactattcgaaaagatacttgcacgcacatgtttatagcagcatgattcacaattgcaaaaatgtggaaccagcccaaatgcctatcagtgaacaagtggataaagaaattgtgatatctatgtatcatatatatagagatatagacgtatatatatgatatacatatgtatgatggaatactactcagccataaaaaggaatgaattaatggctttcacagcaacctggatgggattgtagactcttattctaagtgaagtaactcgggaatggaaaaccaaacatcgtatgttctcactcataagtgggagctaagctatgaggatgcaaaggtgtaagaatgatacaatggactttggggactcggggaaagggagggaagggggtgaggaatgaaagactacaaattgggttccatgtatatttcgctggtgatgcgtgcaccaaaatcccacaagtcacggctaaagagcttagcaatagacctggtacccaccttgcactgctcagcgcagggaggggaagctgccaacactcagtcagggtaactcggggtttcctcctttaaatgggacaagtgggctcctccccgctcctcctcctgctgggcctggctgcctacttgggcctggctgcctgctccctctagaaccaccaggtgctaaggacaggtttgaaaggaggcagatccgggtttgattcccagctgtgctactaattaactgagtggcatttcctgcattgagtcccatgtctaaagtgagggaacacgcacattctgcagtgctgtgaggcttaaagttgtgtctatagctccagtggctgcttacctgagcacttcccaagatgtgtgacggtgactggttttcatggatatctgaccagttaaaattggggcttctggatgacagggaaccacctactccctgtatcaagcccaggactgggtatgaaatacgtcttcaataaaggtgacataggatgaagaagctgagaacagctcttgcacttgggctaggactgtgactcattcatccatttattcagcattgtttttgagccaggtcccatgccgggcacttagggaagtgttggtgaacaagcccagctcctgtgctccaggggctcctattggggctgtgtatggagctgacgttctgctttctctctccatacaggcttgtggaactgctgactcaggatgtcggggttcaggctggtaagaattgtatgatttgatctaggggttattggtgtaagttactcaaggccaagttgaatcgctcccaaggaaagagaggaaaggcaatgagaccctataggaaaataccagagacaggggagtttaggaaacacgacagattctagcatctaaagaaaacaagtttggccagccactggcctcggcaatacatgtatagttatgtatagttatccctcactttcatgtagggcttaacatgtccctttgtcttgataaagggatttcttttcttttcttttcttttcttttttttttttttcagacagggtctcactctgtcacccaggctggagtccagtggcacgatctcagctcacggtgacctctgcctcctgggttcaagcgatcttccagcctcagtctcccaagtagctgggaccacaggtgcatgccaccacacccagctaatttttgtatttttgtagggagagggttttgccatgttgcccaggctggtctcgaattcctgagctcaaagcaatccactagccttggcctcccaaagtgctgggtgtgagccaccttgcccagccaacaaagggatttcccagttgcctcattgcggcagttgccgggagctcccccagagaaaacagggaactggggaactgtgggcatgggtaggactgaaacccaggtctgaatcacccctttggactctgcatcgtgttcccttcactcaacaaatattcctgtgttccggtggccaagagatggctcctccacaggaagaaagcagaggagttttgcatttactgtcaaatcaacagaccctggggaactgccctgccctgggaggcagggacaggccttgagaagcctggcggcggggagtgcagggtggagagctcagaggctggtgagcccagagagcagaggccccaaaccagcctgtgcatccttccctgccctccacatttccacccttgccccatgccctacagagtccaggagagcaggacagtgctgcgaagtgctctttgataagaaaatgccccgaatgttctcctcctgagtgcaaagccacacaggacatcgttcctggctgctggagcacactgctgcgaggaggaccttcactacgcagcggcccctggtgctgccactaagcctggcagcatctgactcacagaatggacagccaagattggcttcttgttttcagttacagaatagagcttaggctgttttagtttggagaaaggacacacatggtctaaaaggtcaggttgtgagcgcttctggtaactaagttgcaaacatgagagcgtggctccactttggagcatgatgtggttttaagacaaagccaaacatttcacaaaggaatatgccacgggatgcatcaacgccaaatgtccctctgggaatgcgactaactgcaagcagagtttagaaaaacacctcttggggccctattactcacaattacaattgcaggcctgctctgtcttcagagattgtaagtctttgagaggagagtaatttttttttttttagacagagtcttactctgtcacccaggctggagtgcgcaatctcggctcactgcaacctcggcctcccaggttcaagcaatcctcccacctcagcctcctgagtagctgggactacaggcacccaccaccatgcccagttaatttttgtatttttagtagagacagggtttcaccacgttggccaagcttgtctcgaactcctgacctcaggtgatctgcccacccgcctcggcctcccaaagtgcagagtggtcatgtttttaatgaataagtctttcagagggcccatgtggttgttgagccctctgtggtgccctctgtgctggacactatgcggggtccctgccatagggcattccatcttcacagcagccctgtgaagcgggccctttcaacagataagaaagttaaggttcagagcagttaagtgactttcccaaggccgtataactcctgtaatatagagtagagattagaacccagccggactgtctgacttcactggggcttggactgccataacaaggtatcacagactggatggcctaaaccacagacatttgcgttctcacagtcctggaagctggaagtccaaggtcaaggtgcctttagggttggtgtctggtgaagcctctcttcctggctggtagatggctgtcttctcatcttatcttcacatggcctttcttctgtgcttgggggtgaggagagggagaaagaaaaagagagagagagagagaaagggagagagagagagcgtgcatgcatctcactctggtgcctcttccttttttatagacaccagtcctgttggattaggaccacacccttaggaccttatttaaccttaattacctccttgaaggccttatctgcaaatatggtcatgtcaggaattggggcttcactatatgaattctggagggacacaattcagtccatataatgaggtttacttgtatttttgcccatcttctatagcgatcttcttcctaattctaattttattttattttttatttatgtattcttttttgacagagtctctgtcagcaaagctggagtgcagtggcacgatcacaattcactgcaacctccacctctcagattcaagcaattatcctgcatcagcctcctgattagctgggattacaggcgcccaccaccacgcccagctaatttttgtggggttttattgttttttttttttttttttttttttgagacggagtcttgcactgttgcccatgctgttgtgcagtggcatgatctcggtcactgcaacctctgcctcccgggttcaagcaattctcctgcgtcagcctcccatgtagctgggactacaggtgcttgccaccacacccggctaatttttgtatttttagtagagatggggtttcactatgttggccaggctggtcttgaactcctgaccttgtgatctgcccgcctcagcctcccaaagtgctgggattccaggcatgagccaccacacccagccaatttttgcatttttttagtagaggcagggtttctccatgttggccaggctggtctcaaactcctggcctgtcttggcctcccaaagtgctgggattacaggtgtgaaccaccacatccagcccctaattctaattttttaacaaattctatatcattttgctcacttttctccttcctaccttttatgattcttcccatgtttttataatcagggtatgttctcctgctgtttccaattttgctttcattctggtctgcatttctttcatttcctcaattttttcattcggctctgccaactcatgtctcatcctttttctcagttgtcccccatctaattcctgggctcttttgcctctgacctactctttggtcagtttttgtaaattatggtgaaatacttggtcacaacttcctactgctctgtggcagttatttctcttttgctgagtattatttgctcctttcctcctcttgggtttcagtacctccgaacacagaactgtgctggttccttttggattacttctcttcagatggggtgagctttcttggattagaaggaggttcatgaggtgtcaatgccacagtgcaggctagcagaaatctcacatgtgaatttttagtagtggcttctcccacccaatagatctgggtactgcagagcttttcacagggcaagacttctcttttcccaccccacagagagactgcttcctgcaaatatggaagacctgcaaatatggtgtttcctagaaccaagacaggccaggcaagctccgcctgccaccttgtgcccttgctcctactgctgcagcaagacatgctgcttttgcatgccaggatgggctcctgccttggagaagtgaactttgccctctctttctggaacctacagctggggccaccttttcagcttcctcctgcgtcttctagtgctcgtttctgtttctcatcctcctattgcttgtgggtgatttctgagaggatgcaactcttgctaccgtcatcaagcttgagaagcactttctctcttaaccactcagccacaccaccttcctaaatagtagccaagtttctttttcattatgagaggtgctgtggtgagaccagagctcctgttcttgtcagcttattgtcccagacaagacaaagacatggagagaagctgtacaggcgcttggtacctgcccagtgagcagggagaaagagagatgggagaggggaggagaggaaaggagagacaagctccagccaccttgggagctctgggctggaaggcatagccccgaagagaagtaagtatccagcagggaggggaagagagagcggggatcacaccactgtcttctgtctgccctccagggtgaccacgtgtggctggagcctccctccacccacaagaccggcgtggccatcgggggcatcatcaaagaggcaaagccaggcaaagtcttggttgaagatgacgagggcaaggtcagtgttctggggtttcctctgggccctgccctgccctcacatccagggccctggagccctccccgccctgtggagcctctccccaacaccaggggctccaaggccaagtggggacctgggtggcaggacagatcacggtggagtcctgccatggagaacatggcctgtgtgtcctggggaacgtttcaagaaggaagtgggaagtgggaaaggggctctggaagggccagaggggcagaaagccagtttgcaaaatgaaacgggcaagggggaaaggtgggtgaggaaggtgtgtggaggggcaggacggggcaaaatgcacaagtaagaggccagcaagctggagtggcccgggagtgaccagctcgtccaccagaggggtcagggccagctaggtggtgagcagggaagggcttacaatggagtgtccagccggtcacttagctcctcagattgtcctctgtgctcagctgggtgctgcaggcttagcctccaaggagaagtttctaggctgtggcctgtgagttccagatgatggaagtcagtaaaataataacaatatcttctatttgtgtgacactgtagttttttaaaaaagcttttacttgcacagtcttattccaacaacctgcaaggctcccagctgcaacctgaccctaaatctaacttctggctataagctcctttgtccctggtctgaaattcagccctagccccagctacgccctaaccctgggccctagacccatgctgacccagccatagatggaccggatcctgccacaggagtctcttgacccttgtcatagactgaccctggccggaggctggccactgccccaggtcagctgatccatgacccggaaggtcaccttgctgctgagaacttggaggggagggtgtggcaggctggccatggggatggaggccacccctcaggggagtctgcacccattgttccaggaacactggatccgagcagaggactttggtgtcctcagtcccatgcaccccaactcagtccagggtgtggacgacatgatccgcctgggggacctgaacgaggcaggcatggtgcacaacctcctgatccgctaccagcagcacaagatctatgtgagtctccccagccctgtgtccacaggggagcccctcacaggtgccaacctcctggacagggagaagaaaatgatgcacagggggcactgccccccatgccctcactgagggaggtgggcgaggtgcctaacttttcccaatctctgctgcccagtcccaaacaaggagggtgatcccaccctggaggggaggaagccaatgcgtagagtgacagcacagtgcctggcacagtctctgctcagtgagggctgcagatggccatcaggtggccatcatcctctgccctctccttcccaggcatgttgtagagacagagtcactagacagaaagcccctggcctcccaagagtgaggcccgtgacagcccagatcccaaggtcctgattcaccagacgagggggccatggggatggatgtgggccctccgtgcaaacctggcctggatggaggttcactccagcctgaagctctcatcctggttccaatgcagatttttccaggggaggtggtattccaaaaccgacaccagttcggcctaagtaggtgtggcctgcagaagccactgcctgcctgggcctctctggtctggaggggtggctagcttggttctgactggcccttctgggctgctcagaggaaagcagcttgtgcttccaaagggcttttgcctgcactcctcatctggtggcacagcctgaagccagagggcacgtcctctcctttcctaaagtgaaaaccaggacaccatggtcatgtggcttattgtgcaggctctgcctgccgcaccccctgaggggcagtggggctgggtgggggctccagatgggcagctgatccagggcggaggtcccaggggcacacagaatttggggttggggtccgtgaggcccagttgttgaccagcctatatgaaagcccctgcgggatgcaggtgaaaacccatttcatacttagtccatttttatcgagccccttctaaataccaggcagggtacaaaacagttaacatttgatcttcctggaaatatgttccctgggagctcaccttcctggtggatatcccatcttcccagaggagagatctgcgcagctgaatgtctgatctccctggcccagaatcagattctacttccccaccaaagtcagtggccctgataaccccgagggcagagccagagccaaggccaaggccaaggccagggccgagtacctctgccaggggcagagggcactgaccacctgcttccttcccagacatacacaggctccatcctggtggccgtcaacccgttccaggtgctgccgctctacaccctggagcaggtacagctctactacagccgccatatgggcgagctgcccccgcatgtctttgccatcgccaacaactgctacttcagcatgaagaggaacaagagggaccagtgctgcatcatcaggtgaggcagaggggtcaggcaccacctccaggcatctccctgaactgctccccaccagcatgcctgcaagatcaggcgagatgagagctctccctactccatggcacacacccatctccacagcacacaacggccccagttaccctgcaccccgagcagttcccccaaagcttccttccttcagaacctaggctttcatcgtgtcaccagggactggactgcccagcttttaataaaggtttactgagtcaaggaaggaagttgggctgggttcctttagaaatgggccccaggagtcgggcatagtagctcatgcctataatcccagggacttgggaggtcaaaggaggaggattgcttgaggccagaagtttgagaccagcctagacaacatagcaagaccctctctctgtaaaaataaaaaaagaaaaagatatgggacccaggttaggcacttaaagctgcaggagttgaacaggtgagggcccactcaaaaaaaaacacagggcaggcctcaggtgaggacagaggagcagcagctccaggggacagctctcagttcactaggggaccagaaggaaagtgtcccctccagtccaggtcctgactgcttcagagactccctgcctggcctggcctctctaccagtgaccacagaccctgagaacttggaggggagggtgtggcaggctggccacggggatggaagccacccctcaggggagtctgcacccgttgttccaggaacactggatcctagcagagaactttggtgtcctcagccccatgcaccccaactcagtccatggcgtggatgacatgatccacctgggggattcattcattcattcattcattcattcaatcatttgaggttttgtcatgccccaactgagtgcccccaactgtcctaacatggtgaggcagcagctaacaaaagggaccagaatcccttcctcagggagcttatattctagaagcggagacagacaggcaacaaataagtgcgtttttatgtaggtcctaacagctttgaagaaaaacacagcaggggagaggaaagggtgatgtcggcctcttcattagatagggggcaggccaggcacggcctctctgaggagggatgttgaacagagaccagaatgaagtcctaaggcacaggtgatcacatttcatgtcctcagcaaccctctgaaagagatgctcttattcccatgatatggtctcatgttactgctggagagacctacaatcagaggggctgagatcctgttccagtggtacacagcagtgaagtgggaaattcaaacccagggctctggagaagacagcagacaggtactctgggagaaagctggaactcccaacctgcccccagaggcagggcaagaggcccctcagcagagctgggccgcaggctggctggccagggagcttacggtgtggctctacctggaggttggcggggctggcagtgtgaacaaggagaggaaagagccccctgattttggttccttgcagtgagcagaatgtcacttgtcactttgaatcaaattgcattctcctcctgccctttcctcccccagggctgtgggcaagtccccttaagcccctgtctctacaatggcaggttatttgatgagctcgtgtttataaaaacgcctggcgcttgacaggcactcaggggagtccacagctatcactggaggtttgttgat

SEQ ID NO: 259 - DNA, 32742 bp, Homo sapiens
  source 1..32742: mol_type = other DNA
aagagggggcggggcggaagcggcggcggcgcgcgcaaagctgcagcgtctggaaaaaagcgacttgtggcggtcgagcgtggcgcaggcgaatcctcggcactaagcaaatatggacctcgcggcggcagcggagccgggcgccggcagccagcacctggaggtccgcgacgaggtggccgagaagtgccagaaactgttcctggacttcttggaggagtaagtcggcgagcgccccgggcctcgcccgcctccggagcctgcggcgtctgggccaggcggtgccgtgtgggcggcgggtgttccggaacctgggggtcgcgcgtccgggaagcgcctccccgcccgccccccaactttaggctccgagcccggcggccgcgaggagcctgggacaggctgggtttttctggagtaaaacccatctcgagccctaagacgctcgtgcccagtgctcagcgctttgcttctgtcacttgatgctcaccaccccgcgagcctggtatttgcacagccctcggtgaccggcgcggaaacctgggctcgctgagtatagtaactgggccgctgggtgcggccaggtcgagtgggaggccgaagtgccattgaatctcgtcggtgccctgctgggccacgcagccgggagcatggtgctgggggttcgcagggcacgggccaccctcgcctcttgtgctgatgaaagtttctgcgtcaactgtggtttgaaagctgctggggggcggagccctgccctgcagagagtagctcaccatatcccttcttctgggtcccttgctcccctttccctctggccttcctttcctttctctactcttctttttttctgtgcctctgggctcctagcttcataaccccaacctcctccctggcttgcctcacccaccggttatttttcctggagcagatacaccacggcctccaggatgaagggtcagcagtttggaatggcttttgaagttcttttttagtaaaatatacataacaaagttgaccattttagccatttttaagtgtagagtccagtggcactaagtgcattcacctcgttgtgcagccgtcaccactctcccatctccaaacttttttttttttgaggcgtaatttagcccttgttgcccaggccggagtgcagtgtcaccatctcagctcaccgcaacctccgtctcccgggttcaagctattctcctgcctcagcctccctactagctggaattacaggcatgcgccaccacgcccggctaatttggtattttagtagagatggggtttctccatgttggtcaggctggtcttgaactcccgacctcaggtgatccccccgcctgggcttcccaaagtgattacaggcgtgagccaccgtgtccggctccaaactcttttcatcttccaaactgacattctgtgcccattaaacacgaactctcctccgttaccctctccctcagccaccgtcacccaccactctgcttcctttcattatgagtttgaccactctaggtacctcatataagtggaagcgtgtagtatttgtccttttgtgtctggcttgtgtaacataatgtctacaaggttcctctgcgaggtagcatgtgtcagaatttccttactttttaaggctaaataacattgtctgtacacattgagtatcccttttctgaaacgcttgggaccagaagagtttgggatcttggatttttttttcagatttggaatgtttacattatacttaaccaattgcatccctaatttgaaatgctccagtgaaaatcatgtcagcactcaaaaagtttcagattttggaccatttcatattttaaattttcagatgagggctgctcaacctgtatatatactgcattttgcttatccattcagtggacacaggttcattccaccttttgtctattgtgaataatgaggttcattccaccttttggctattgtgaataatgctgccttcttaggaaattttggtatacttaaaaccataatttaatttccatttcactacctatggcaatgttattgtctgcctgatagttcctccttcaaagcccagctaaaaactcacacctttgtgaaaccttgtacacctttttgagaggcactaatcctttcttccttaggctcccagggtgctgtttgtttttcattatctctggcagtgtaacacatttacctcctagctacttagtctggaattcaaattccatcctcaaccccacctacccaccacatcacattacaaaggtttttcaataaacgtttcatttcaacaaataatctaagtgccttgactttgcagctagatgataatgatgagacaaataatctctgtgctttgtttaaagaaatgccaactccctgtcacaaaataaactttaattcaccattgcttgtggaataaagttcaaattcttcatcactcctctttcctgtttgtcttacaaaaacaccccagtcatcatccacacttctcccctaccttctctgacttaatcacattcttggaatcatctagtcagtcacttcaccacctgtttttatttgaaatttttaactctttcagaagctgaattccaacgccaccttttatatgtataacttgtagttgtttttttaggcagaattagtttctattcccctagcacatttcttgttcttctcattaacaggaacatctttcttgtctgtcttcattgcttacatgtctaactccctagacgcagacaaagtgttagttaaccctagggcaggaacaacactgccattttcagcctcaggtacctctgttatagggctttgcacgtagttgtttaacaaatattttaaggagtcagaacatgctgtatatggaggagaaattgattttttcttaaggcgaatctgcatattatgtttgaaagaacagaaataaatttgtatgatatcctgcttgggctttagaagcaaaaataccagcagctttatttagtgtgcctgtttcaattttcccgaagtcttgggctgtgaaacacctcatttccatgtattcttatttctgttctgcttcttaaatccctgactaatttgttagtttgcaaattccctacagaaatggaatcattgggtttgagactgaatttcttgatttaacattttccaatcttaattatacatgacagtagtaaaagaagagttagttgttgggtttttttgttagttagcagttaaacctcacaatcatggtggaaggcaaggaggagcaagtcactgatgtcttacgtggatggcatcaggcaaagagagcttgtgcagaggaactcctctttttaaaaccatcagatctcgtgagacttactatcagagaacagcaggggaaagacttgtccccatgcttcaattaactcccaccaggtgcctcccacaacatgtggaaattcaagtcgagatttgggtggggacacagccaaaccatatcagaagggaggagtaacttgccccaagttacagaactgccaaacatgggcctgtctgagcctagttgttggactttaaccaatgttctgaattatcattcaggttctttgtactgcctgtgtccttaatctagttgactcgaatgtacctgcaggtttcagagcagcgatggagaaattaaatacttgcaattagcagaggaactgattcgtcctgagagaaacacattggttgtgagttttgtggacctggaacaatttaaccagcaactttccaccaccattcaagaggagttctataggtatgggcatattaatcttctttactttgaataggggttgaaatccgggaagccagctcttcttggactgtaagtgttcacttgtgtagcagaaggtcagctttcacagttatttcccactgagaagaggcgctttgatactgccagtggtcgttttagtactgctctgaacttcatgtaggcctttgtagagccgaacgtttttttgttgttgtgttttgtttgtttgtttgtttgtttgttttttgagacggagtcttgctctgtcacacctaggccgaaatgcagtggcgcgatcttggctcactgcaacctctgcctcccgggttcaagcgattcttctgcgtcagcctcccgaatagctgggattacaggcgcccaccatcacgcccggctaattatttacattttttaatagagacggggtgtcaccatgttggtcaggctggtctcgaactcctgatctcaggtgatccgcccgcctcggcctcccaaaatgctgggattacaggcgtgagccaccgtgcccggccagagctgaactttttttttcaaatacaaatgttgaaaatctttgctttctatatagttttcccaagaggaaaactgtacttacttacttttgtgtcattccattgatcctttttccccacaggaataggtgtttgtgtgggtccttttcttgtactggggatatctttacagcattgacgttgttgtacttcttgttcccttaaagtttaattttgttttcgcttataaaagtaataggtatatattgtagaaaatggagaagagtaaggagaattaaattgcttatacacttgtaatccaccaccgtcattagcagatctgctacaacagagttccaggagccttccaagtctgcaagtgcagagttttgtaaggatcttctgtcacattttgatgtctttgtgtgtatgctgtgtatgaaattactcaaattcatataaaatttcttaaactcatactaatagctccaattgtggttttttggtagaaatactatggttagacattatatttaatagaaggcttttattttgttttgacttgttatatatagcaagaaacatctttgcacacaagactttgtattaggattaaataaatgtgacagtctatagaaatagaatcaggttaaaataaattgtggacagttgtgaaagataaatgaaaacccagggataaggaggcacagtctcgttcatttcttagtagattaggagatggaggatttgtctgtgtttctggtcatagctgatgatcaagaataattggagggggtaagtaagcaacaggatttattgtgaaagcatgcagcagtagaagttatagcactgacaaataagggagaggtagacaatcaagcctggtggtagaagcagctgtgccatgcctcatgcacaagccaggcagcagttctctttcctgagagtagcgccttttttagagggtttcagaccccacttcttaaacaaactaagctggagtaggtattagaaacatatcaaaaggacatgcatacttcactctcaccagtcaaatggagcatttttgccaatttgttctcacattagtgcacaaatacttctcctgtcctcatccatttcttatcaaaccagccagatgtggtggctcacacctgtaatcctaacactttgggaggctgaggtggatagatcacttgagcccaggagtttgagaccagcctggacaacatggtgaaatcccatttctacaaaaaaaaccccacaaaaattagctgggcatggtggtgcatgcctgtagtgccagctactcagcaagctgagatgggaggatcacctgagcctaggtagattgaggctgcagtgagctgtgatcgtgccactgcactccagtctgggtgacagagtgagaccttgtctcagaatgaaaccaaagaaattgactgacttgacacatgacttactaagtcataaacagcccacagaaaattcacagtattgagcataatattgacaagatgattgttcagctagtcatcttggacagaggaatggccaacagtgtgggtgctgtatgattatttatgtgctatatgataatcaggtatggtatgacattttatatttagtgttccggtgggataggagagaactgaaagagggtcctaaacctagagtagataatagaagtgtcctacacagttaagttctaaggtttagttgtaaccagatgaaattccttaatctcggctgttggtaggtatgtaaagggaaggaggccttggtaaacctctaaggtatcagctgacttttttgtttttcagagtttacccttacctgtgtcgggccttgaaaacattcgtcaaagaccgtaaagagatccctcttgccaaggatttttatgttgcattccaagacctgcctaccagacacaagtaagaaacccttctctggaaaaaaaggaattcaccaaatggtataagtaccacttagctgacagtcagaaaacttgagaggttgccttgatctgctattagctggctatttaacattatacaaatcacttttacctccctgagcctcagtttccttgtctgtgaagtcttttggcttaggttttctacctaaatcatgcaaaaaataggtttgttgctgtaaaattactttttcataattgataatcacaataattataaaacaagtacttataaaattgatgctgtaaaataccaggaggaaaaaatagtggtttgcattcagattttgtagaaggttgacttttgtaggagttatacccacttatccagaaagtttagtgttggagaaatgtattttcctatggagatgggattagatgtaaagggagtgaagcaaatttttaggattatcacattttagggcgccttttagggaaatttgggagaaaattgatcaagggagaaaatatgaaattctagaaattcctgaatctctggaaatttttgttggtttaaatgcataattttcaaacacccctttggcagttattttaagaataaatttactggataaaattgaagtgatattttgaaaagttaaactactgaaattataaaattaccaaattacttcacataaaatgggtttgtaaaggaagtgtttctgaactttgagtacaaaattttttctcatgataggattattatgtaacacatgcttttttttttagaaattgcgggtaagcaaaaaagtatttgcatataaaacaaaaacaggatcattctgtttttgtttttttttttttctgagacagagtcttgctctgtcacccaggccagagtgcagtggcacgatcttggctcactgcaccctccacctcccgggttcaaacaattctcctgcctcggctccccgagtagctgggattacaggcgcccgccaccacgactggctagtttttgtatttttagtagaggtggggtttcgccatgttggccaggatggtcttgatctcttgacctcatgatccgcccaccttggtctcccaaagtgctgggattacaggtgtgagtcactgcgcccagcccgttctgttttataattttaattttcatttttttggcatcctttagttcatttatatattttgttctggatacatatacgtcatataatttaggattgggcacgttgactaaattattcttataggagagtccaaagaataccttgtctcttgaattttttttttaaacataaattatctttgaataccctctcactaaaatggaaagattcttagttaagagatgaatgtttactaatgggacatttgtctttaaacaggattcgagagctcacctcatccagaattggtttgctcactcgcatcagtgggcaggtggtgcggactcacccagttcacccagagcttgtgagcggaacttttctgtgcttggactgtcagacagtgatcagggatgtagaacagcagttcaaatacacacagccaaacatctgccgaaatccagtttgtgccaacaggaggagattcttactggatacaaataaatcaagatttgttgattttcaaaaggtatttatttaacatctgtttagatcagagtccatctatgataataattcacttctaggcccttgcaatagcttatttagataatgttcaactcaatttttatgtaagttaagcatcatcaaaatgactacaaagttaagcccaaaactgttcatgtaaattataattgttagtatatacatttgttttaactttcagtaacttggaagttccttaagactgacaagatgtatttgtcaaagaataaatggtaactaggtggtggtggttgtcattatgaactggagttaagaaaacttaaagaaatagcaacttgttagtgtaagatttccatttgctgcatagaaaggaaagcatgaataggacaggctagcttggaagcaatgaggattatcatgattgaagtaaaggagccaaattggagatcatctgagagatgatttgatgtgagacctggaggtacttggatccctaaatcttaggctgaggagtttgagcctatcttaataagcagtgggaatatagtgggaaggtagtttgtgtgtgtgggtgtgtgtttgttttgttttgttttttgtttttttttgagacagtctctctctgtcacccaggctggagtgcagtggcgcgatctcggctcactgcaagctccgcctcctgggttcacgccattctcctgcctcagcctcccgagtagctgggactacaggtgcccaccaccacacccggctaattttttgtatttttagtagagacagggtttcatcgtgttaaaccaggatggtctcgatctcctgacttcgtgatccgcctgcctctgcctcccaaagtgctgggatacaggcgtgagccactgcacccagcctgtgtgtttttttttaaaagcaaactgaataagtccgtgatgggtttaacagagggtaataggcaatttcagttacctgggcaagaggtgatggatggcagtagtaagaatgaaggggaccctcagatttcagcaggacttaattttatgggacatacaaaatggaaagaaaagctgaagcagctcaagtatggaataattattatcagatgaatttaatattatttatattgctctgataatcattctccttatttggctttcttacattaacctggtagcttataagatgcacatattttaccaacagctttgggtaggagatgtcttatcttataaagtatgaatctagattgggtcttagtttgggggggggaacacaactgtataaaggacactcttgacaagacatttgaagatggactagataatagaagatatgtaattttatgaaattaaatattgtttaattatcttggttgtgataatgatattgtaacaggattgtctttattcttagagatgaatgctaaaatatttaggtatgaagtttcttgatgttcacaactgtgttcaaatacatagtaaaaaaacatgtatctgtaaataatgttagcagttgtgttgaagtggagggtataaaaggtgtatttgaaattttctgtaaaattatcttaaagcttaggagaagatggagcatggaacagatatttggagtcattttgaacaaagaaaaaaattattttttaatgagtaaaagtgaagttttttttttctctgctgcttgaatcatcatggagtttttaaatagatgtaatctcttgccaaattgaactatttgactaaaaggagttttagagtagataatttttaggataaatgttggtacatgtgaaaagtctgctaatgggtcagatagtttagaatacgtccgtatttgtggtatttaatttagattatatggcatctgaaaggtattgcttctcattcttggttggttgtttgtctgtattacaggttcgtattcaagagacccaagctgagcttcctcgagggagtatcccccgcagtttagaagtaattttaagggctgaagctgtggaatcagctcaagctggtgacaagtgtgactttacagggacactgattgttgtgcctgacgtctccaagcttagcacaccaggtcagtaatctgtggctcaaatttaacaaattctcagttacctaaactgcacagtatctagcttcccacatcttcattgtcttctttttggctaccaatcagaagctgaggaacgaagtgtgatgagaataaaaacaaattggttttgccacaaatggtgctattctgaaagtattcaaggcttaagtgaagtctttggatttatagctttcatttatttgagcaattttgatgttcagcacctttaatatttaagttgtgaaacaacctatcattctgtttcaggagcacgtgcagaaactaattcccgtgtcagtggtgttgatggatatgagacagaaggcattcgaggactccgggcccttggtgttagggacctttcttataggctggtctttcttgcctgctgtgttgcgccaaccaacccaagggtcagtcgttttgggggtttttgtttgtttttgaaacagtctctctctgtcacccaggctggagtgcaatggcaaagtcatggctcactgtagcctccactttctgggctcaagtgatcctaccatctcaacctcctgagtagctgggattataggtgtgaatcactgcacccagctaattaaaaaaacttttttagagatgaggtcttgctctgttggccaggcaggccaacagtgagtcttagtagagtgacagcttaagaaacacctaccctgagctgccacgaaatgataggattctgaaacatctgggctgtctcatcaatgttgagagcacgggatggggttaagatttgatgagttttaaaaccaaatcttttgacgtatgcctttctgatcttgaaaaaaagtcttatttgatgtcttacataaaagctcaatgcttttaagtgcagtggtacaaattatccacgctgttttttgttttaaagtttcatagttcctctgttattcttctggaggaaatacaaataaaaagatttagtaatctgggaagtaaacttctgagaatgatgaacccctggcagtatcattcagttaacttgattctgtgtcataaatgggagtttggaaaatagttcagtattggaaaaagggagtgaacataatattctcttattttatttgcatctttatgtcagtgattaacattctgctatcgcttatctcttgagcattcaggtagctttttttctatttaactcactggacaaatgacatacccttaagtgtctttgttaactgagggcttactagtttggggagttgtttttttttaaacctttacagtcaataaattgtgaggttgacttcccatgctatgttgtgtttgtaatgaagtttcttctcctttatgctcttttgactgcttctatactaatgattcttcctttgttctctaccattagtttggggggaaagagctcagagatgaggaacagacagctgagagcattaagaaccaaatgactgtgaaagaatgggagaaagtgtttgagatgagtcaagataaaaatctataccacaatctttgtaccagcctgttccctactatacatggtaagaattccatccatttgtaccataaacttgaaatcaaaataatgattataaacagccacaggtgatttctgaaagcacataaatcagactgtgaaagtttttagtgggtctgaaagaggtcatttacaaaaggacaggtacatgatttcacttatacgaggtacctgtaatgtgcaaattcatagagacacggtaggatagaggttatcagtggctgggggaatgggagaaatgagttatttaatggataaagttgctatttgggatgatgacaaagttctggaaagggatagtggtgacagttatacaacataatgtacttactgccactgaacttatacactgaaaaatggttaaaatgataagttttattatgtatttttatcacaattttatttttttaaggaaaagttattttgtcatcttatttcctggccttatgacagagctgcacttaagtgtgtttccatatgcgagactagtctcctggcctttttgtggttgtagtctcctggccttgttggtgtgtgtgtatgtgttttagagagacggggttttgctatgttgtctaggctgaagcactccctcctgggctaaagcaaccctacctccagcctccccagtagctgggattacaggtgtaggtcaccacattggctcttgtttctctttttatttaccaaaatggagtgtttatgattggttacttgttctgtctatacctttggcagtttcacattttcctgactcttggttgcaagctgtgttttgaaggctatgactaaaattttaggcctgatgctttatctttgaactcttccatccttgtcttccatactcaattaggattatggtaagaactcaacctttttttatctttttttattctattttattttgagacagagtctcactctgtcgcccaggctggagtgcagtggcgtgatctcagctcactgcaacctctgcctcccgggttcaagcgattctcctgcctcagcctcacgagtagctgggattgcaggattgccccacaacactcagctaatttttgtatttttagtagagatggtgtttcgccatgttggccaggctggtcttgaactcctgacctcaagtgatccatccgccttggcctcccaaagtgctgagattacaggcatgagccactgcatccggccctttttttctatctaaatataagtcagagaagttttgtttgtggaagggatttttagttttctacctgttttgttttgttttgttttgttttgttttgttttgttagggtcttactcttgcccaggctggagtgcagtgacagcatacattgcctactacagcctcaacctcctgggcttaaacgattccccaccacagccccgaaattagctgggactacaggcgcctgccaccatgcccagctaattaaaaaaaatttttttttttagagatggggttttaccgtgttgcctgggctggtctcaaacctctgggctcaagcaatcctcccgccttggccttccaaagtgctcggatcttccagagtgatcagattacaggcataagccaccacacccagcctaattttctgctttaaggaatgccttgtgtaactttgcatagcactttgttgatggagttcagagagtcgacagttccacagaaaaatgtttcttttaatagcacagtgttcttttttaagaaaattgtttttccttcttattggatttatgaactaagcagctgtaaattgcattcagcatcttatttaatccacatgaattcagttaacatatatttattcagtgctggtcactgtaggtgatagaaaagtgttatgaaccatttcctcaaactcttcacagaactataagaactggcattaaaaaggactagcaaatgtggtaggccttggtggacatagttcatttatcaggagagatctttgagggctaaggcattgggtaaggttttgtgtaggaagtaggactcatggacaagtaaaggctcttaggatggtgagcactggcacggtgacatctgtggtgtaggagaaaacattggaacagtggtttaggtgactaagtccacagaacaagaaccaagatcggaagccaggtgttattactccagttttatgctttgctttagctgactctgcctttcggttggtaaacatgcctttactgtttcttctgaaagtgtttaacttcatgttgaaaaattagtttttcatctgtagcttcttttcatttcaggcaatgatgaagtaaaacggggtgtcctgctgatgctctttggtggcgttccaaagacaacaggagaagggacctctcttcgaggggacataaatgtttgcattgttggtgacccaagtacagctaagagccaatttctcaagtaagcgtttgcctgatacagtgttgcaggaaaaagtgtacatagttcccaggctggctgtgctaccaagaatgcagtcagtatggccttactaggagtgtaaattatgactatgttgaatatataattctcatagattaaagttatggcaacattgtacaattttttagaatagggaaaaattgcctgtaataccaatctcacattgaactgtttagtctttgtataatatctttgtaaaatatatttgtataaaattttatacaaattttattatttgtataaaattttatacaaattttattatttgtataaaattttatacaaattttattatttgtataaaaatatgaattatgtattttcattattgtaaatcatattatacatacttgtaatttcaattttctataaacattttttccatgtttcttttcgcatggaaaaatctcatgagtttgtcattttcacaattgtctttttttgttggtatactatagcttacaaaatcattttcttagccctgttaaatttaacaggatagtttattataataattaccgatatagatgcagtgaacatcataatgttatatacattttttgtttgtttcctctgggtaaattgctagatacaggattgttgagactaagaatacaaacatttgtaaggttttaaaataggatgtactggccgggtgccatggctcacgcctgtaatcccagcactttgggaaatcaaggcgggcggatcatgaggtcaggagatggagaccatcctggctaacacggtgaaaccccgtctctactaaaaatacaaaaaattagccaggtgtggtggcgggcgcctgtatacagtcccagctacttgggaggctgaggcaggagaatggcgtgaacccaggaggcggagcttgcagtgagccgagattgcgccactgcactccatcctgggcaacagagcaagactccgtctcaaaaaaaataaaaataaaataggatgtactttccaaagggaatgctgctatgagatattttatgttaactttgtcagtgtgaacacaatttttgactgtttttagaagctataataaatatttgattactttcaaacttttaagaaacttagggcccaaaataaaagcaacaagtttctgagcacctgccatgttctcagtgctgtatatgtgttatgtcttactctagcagcacccagacaggcatgtgtattattccctttttttttcagagagtcacaacctctccaagcctacaagaaatttgcccactttcttgtaggtgaaaggtgacaccgagccatgaatattaaaattcagatacagttgcctgcaaaacatgtgtacttcatactacatcaagctgccttttctttgttttggaaatttgtagcatagtaccattttagaatattgaacatttttagttggtttggagttttatgattaaatatttcttttgaacatatcacagactgagttttagattttaagatagtagtcctgtgttacaaaggattcttttttttttcttgtcattctttctcccccctcaaaaagaaagatgtactacaatgttgcctctggtaacagtgtcatgtggtatgtgacagtcttagtggattccatagcattttctatgtataaaatctgtatataatgatagtcggagtatcccatctggctgcctttttttcttgcctaattgtccttgattagagccatcagtataatgttgaatagaagtggcaagagcagacatccatgtcttattcctgatcttaggggcaaaacattcagcctttcacctttaagtttgatgttatctgtgggttttcatagatgccctttgtcaggttaaagaaaaaaccctttattagacttaggaaaacctcctctattcctggtttgtttggtttttgtaatgaaaaggtgttggattttgtcaaatgctttttctacatctgtttaggtggtcatgtagttcttttattaatttagcatattgattgattttcagatgttaaaccaatcttgcatttctggaataagccccatatctagttttgttttgttttatttttaattgcaagaccttctgatagatgattgttgctgtttattactattaaagacttcttttaaaattgatgttttagctgggcgcggtggctcacgcctgtaatcccagcactttgggaggctgaggtgggtggatcatgaggtcaggagatcgagaccgtcctggctaacacagtgaaaccccatctctactaaaaatacaaaaaaaattagccgggtgtggtggcgagcgcctgtagtcccagctactcgagaggctgaagcaggagaatggcatgaacccagtaggcagagcttggagtgagccaagatcaagccactgcactccagcctgggtgacagagcaagactctgtctaaataaataaattaattaaattaaaaaataaataaaattgatgttttaggctaggtgtggtggctcacgcctgtaatcccagcactttgggaggccaaagtaggtggatcacctgaggtcaggagttcgagaccagcctggccaacatggtgaaaccccatctctactaaaaatacaaaaattagccgggcatagtggcgcacacctgtaatcccagcaactcgggaggctgaggcaggagaatcgcttgaacccatgtggcaaaggttgctgtgagctgagatcacaccactgtactccagcctgggcgacagagcaagactgtgtctcaattaaaaaaaattgatatttttatcaggtattaactctgaaaatacaaaaattagccaggcgtgatggcccacacctgtaatcctagctactcgggaggctgaggcacgagaatcgcctgaacctaggaggtggaggttgcagtgagctgagattgtgacactgcactccagtctggtgacagagcgagaccctctcaaaaaaaaaaaagaaaagccgagggagagaaaccttcccatttagtctgtggcatgtgtcttcatgaattgcttaagctctcaaatgttctttcagtaatttaaactcttctgctggttttcctgggaagggtgctgtataatcacatattaatgagtctttatgtgataaccttgaacaggcacgtggaggagttcagccccagagctgtctacaccagtggtaaagcgtccagtgctgctggcttaacagcagctgttgtgagagatgaagaatctcatgagtttgtcattgaggctggagctttgatgttggctgataatgtaagaacattttacactcttcagtataaagaagtcagaatacccctaccctatcagtaaaggcctataagttaccattaaaaagatgtccttaaaaacagcattctcagctgggcgcggtggctcacacctttgtcccagtactttgggaagccgaggtgggtggatcacctgaggtcaggagttcgagaccagcctggccaacatggcgaaaacccattttctctactaaaaatacaaaaattagccgggcatggtggcgggtgcttgtggtcccagctactcaagaggctgaggtgggaggatcactgagcccaggaggtggaggctgcattgagccaagattgtgccactgcactccagcctgggtgacagagcgagactctgtctcaaaaaaaccaaaacaaaaaaaacccagcattctttagtaaataattcatagttttcttcatctagaatttaaaattgtgatagttgatcagcatgtcctgagcacgtgtgtttgctgttactagtttagatcggtagatgtgtatataagttataggtataaaatcaatcctgagttgacacaaggttttgatgttgagtacaagtacagtaagtgtatatttttagttatgctcttagttttaagtcaattgtgtggttctttctagctttaggatctgttgaattatcttccttagaaaagggagttaagaatcttcacttacctatcttctacttgtttggagaatagaagagtccctgtggtagcagactttgtgagtttacttgtaattttccatctgaaagactgttcttgtttttcgtgatgaagtcttgctctgtcgcccaggctggagtgcagtggtgcaaccttggctcactgcaacctctgcctcccgggttcaagcaattctcctgcctcagcctcccgagtatctgggattacaggtgcacaccaccacacctggctaatttttgtattttcagtagagacggggtttcaccatgttggccaggctggtctcgaactcttgacctcatgatcagcccacctcagccttccaaagtgctgggattacaggtgtgagcccccacactcggccgttgttgttttttaagagacagggtctcactctgtcacctaacctggagtacagtggcaatcatggctcactgtaacctcaaatgcccggccttagtgaagcgttcttcctgccttggcctcccaaagtgctgggattacaagtgtgagccatgcatccagcttgaaagacagcttcttaggcttgatttgtttggttacagggtgtgtgttgtattgatgaatttgataagatggacgtgcgggatcaagttgctattcatgaagctatggaacagcagaccatatccatcactaaagcaggagtgaaggtatgtgttatctacttctgttctgctgcatcgtccatagccttgttgattaatgtagtactagagaagttcacctggataaaattcattacttcagtgtgtaatgctgttcattaaaatggaaaatacagccctgagaattatttattgaaactataaatgttgtttagagtactgtgtaaatgtattgccatgataatagaggaaaatgtccatgaacaaagcttttattttctttgataaagcatgctccaattataacaaaaataaccaaagatcaacagattgattatatatgtatatatttatttatattaacagagtatttaaatgaaaataagtatgacagtataaccaacactagggagaatctaaactttaaaagctacagattcaagtagcttttaagcagtacacaattgtaaattgaaaagacaactctttccctgcaactcccagcaacagtagatacttagaggtatctaatggataaaaaggaattttaggaggaggaaaataaggcatctattgagtttgtgccccttttaggaatattttgtacataagcataatactgacaatttcattcctgctggtttaacttcataattttattttggcaatcttttaccagcacatattagatcaactttggttttttattaatttcccatattcaattgtgtataccacagcttgattctttagactcctgttgagtgacatttggttcattttcagtgttttgtattacaaacaaaattgtagtaagcatccttgaacgcaacatccttttatatttggctataagagaaatttctaacaaattgatgtcttcaatggtgtgcacatcataccaccaaaatcacataggagttcctgtttatgtgaaaaagggtatgtcattattttggtttgtgtttagttaattatgggtgagattgaacatgttgttatatatttattggctgatgtctatttaaatctgttaagattctttcttttgtggtcaggctactctgaacgcccggacgtccattttggcagcagcaaacccaatcagtggacactatgacagatcaaaatcattgaaacagaatataaatttgtcagctcccatcatgtcccgattcgatctcttctttatccttgtggatgaatgtaatgaggtaaccccatgagcttccttttttatttccagttggagtaatcgagtgagacaaggctggaagatacactgctcaacagctggtgcatgtatgtgcaccagcctttgatttccctcagggtggcacaggatcggacaaagggtttagtaagcaactcaaaataaagtcatttgaattgcctcttccacttaattgtgttcaagaattaagttttcaggttttgttactatttatttctcaaaaggaaacaagttacagttaacttccaaccacactttttatttttttaaacagcctctcactggagactgggctggagtgcagtggcacagtcttggcctactgcaacctccacttccaaggttcaagcgattcttgagtctgagcctcccaagtagctgggattacaggcatgtaacaccatgcgtggctaatttttatatttttagtacagacagggtctcaccatgttggtcaggctggtcttgaactcctggcctccagtgatgcacacccacctcagcctcccaaaatgttgggactataggtgtgagccactgtacctggccccaaccacactcttaagatttttatacaattttttgttttgttgattgggcttttattttatttttcagtcaccttgaaaaaaactgggatgccaaagaaatttcttttcttcttcttttttttaatcatgagtcatttatctttgtattttttcctatcaagttgctgaatgtattttacctttttttctcacttttaagattgagtgaaaaaatgtagatttacttggattctgatatgttagtttaattattagagttatgtgtacttaaatatttaataatgcacttcagatgcccacagaactataaaatgacagtttgtaggaactaatattttaggctgtactttttaaatcattcagcattgaggttctacattttattgggtacagtgcacagctctttgttacagtggaactttaaatattatctaaataaaagtagccttccattttgtgagtgtttggagggcttggatttttatttatttattttttaaagacaaagtcttactctgtcacccaggcagtgccacagtcatagctcactgcagcctcaatctcctgggttccagtgatcctcctgcctcagcctcccaagtagctgagactacagctctgtaccaccatgcctggttaattttttcatccttttgtagcaacggcaacaagttcaagacccgtgttggtcttgaactcttggcctcaaaccaccttaccacctcagcctcctgaatagctaagattgtaggcctgcaccatcacacctggtttggtttggtttggtttggtttggttcactttttttcccttcacaagagagacatatttaattaccagataattgagttgtctgattttcatacatttatgtttgttcatgattcattaaagtagctttagtagcagatcaagttataaacctttaaaagatcaatttataaacctttaaaacattcaagatttttttaaaactgttttctttagttttgttttgttttgtgacggagtctcactctgttgcccagactggactgcagtggcacaatcttggctcactgcaacctccgcctcctaggttcaagtgattcttctgcctcagcctcctgagtagctgggattataggcgtgtgccaccacgcctggctaattttgtgtatttttactagagacagggtttcaccatgttggccaggctggtctcaaacacctgacctcagttgatccaccgacctcagcctcccaaagtgttgggattacaggtgtgagccaccgcgcccggcttgttttgtttttgagacagggtcccactctttcctgcagtggcgtgatcatggctcactgcagcctcagcctcctgggctaacacaatcctcccacctcagcctcccgagtagctgggaccacacatgtacaccattgtgtctggctgacttttgagttttttgtagaaacaggattttgccatgttgcccaggctggctgcaaactcctgagctcaaccagtctgcccacctcagcttcccaaagtgttgggattataggcatgtgccaccatacctggccaaaaagccttttctttttctttttctttttctttttctcttttttttttttttttttttttgagatggagtctcgctctgttacccaggctggagtgcagtgctgccgtctcacctcactgcaacctccgcctctcaggttcaagtaattctcctgcctcagcctcctgagtagctgggatcacaggcgtgtgccaccatgcccggctaatttttgtatttttagtagagacggggtttcactttattggccaggctggtctcaaactcctgacctcaggtgatcccgtcttggcctcccaacgtgctgaggttacaggcgtgagccaccgggcccagcctgttttattttagttatttattttgagacagggtctggctgtattgcccaggctggagtgcagtggcatgatctcagttcactgcaacctctgcctcctgggctcaagccagcctcccacctcagcctcctgagcagctggaactacaggtgcaggcccccatgcccagctaacttttgtattttttgtagagaccgagttttgccgtgttgcctggactggtcttgaactcctgagctcaagctatccaccagccttggcctctcaaagtgctaggattacaggcatgagccactgtgttccgcccagacaacttcttaattagaaataatttcaagcttacagaaaagttgcaagaaatggaatagtgcatagaacacccatataccctttacgtgattcacataataacattttaccctgtttgctttattgcttactgtctgtatatatctgcacacttttttcctgaaccatttgagagcaagttgcatattttggggtcttttttttttttccagtattctgggatgaatatcttcaaaatttagtggctaagagcacagtctctgaagctagactattcaaatcctggctccactacttaactgtgaccttggataaattacttaaccttcctaggcctcaatttgcccatgtataaaatggggataatatcatttacctaataaaatttttgtgaggattgcataagttaattcttctaagacctgcctaagagaacagtgtctcatacactgagggccctataaatgttagttctgctatttttgttgttttgtttttgagataaggcttactctgttgcccaggctggagtgcagtggtgcaatcatggcttcactgccccttcaacctcctgggctcaagtgatcctcctgcctcagccacctgagtagctgggattacacatgtgcaccaccatgcccagctagtttttttgtagagacagggagggtctcagtttgtcgccctgactggtctcaaactcttgacctcaagctcttctctcacatcagtctcccaaagtgttgggattacaagtgtgagccactgcactttaccctactattgtttttaaagccaatcaattccttcaggtatagttttagagtggggcaatggtatacatttaaacgtttgattttaaatccacctgttcccaaactttcatcagaaacttggtacccattaatacttctttaagtggtatattagagcttgtttttggcgataaatcatttcttattgcctgggatagtctggagaagatattgctgtgactatcaaagtgatttttttgttttgaattaggttacagattatgccattgccaggcgcatagtagatttgcattcaagaattgaggaatcaattgatcgtgtctattccctcgatgatatcagaagatatcttctctttgcaagacagtttaaacccaaggtaacctacccttttgtactgggataaggtataatgggtatattaaagtggaatttaagtaagtgtgttatatggaaattaactgaacctgtcatctaccttagttcctaaattttacaactttttttttttttctggaacagcaatttgttttttcagagagggctgagaaagggaactgtaaaaaaaattctgaataattccattatttgtttggtggtaataaaaagatttgtatgggagaagagttttggataactggataatctagaacattcttttatttcaaacattactaagaacgttaaaattgtttatgcgcctaaatcaatagttgaatctttctttgaaggaaacattggattcatctaggccattatgataaatataaattactgttttacagtgattgatgcattgtattggactaactctgttctggacccaggattcttacctggacataaacccccaaatgcttggcattttcccaaaatagggtatgaaaaggaaaaaaaatactcattctggttgagattttcacactgttggctaacttgacttctggaaggtgttactaggtattgatcatttatcatcttcacttgattattcatgagattgcagttggctctcactgtcccaaagaaatttaatcatttaaaactaaggattatgggtgattcttgtgtaaaaaagagcatctgttctccattactgcatactgatatactgatccctctgtaaccttggcatgcttccttaatatggtgaattccttgctctgaaaagctgaggatcctttagatataaagtttattgaaacagcttttttttccctgcaaagagtgtgagttaattaattgagcctcaaatactgagcattaatttatttaatgagcactgacatcctgaggtgtaaaagacattacatcttgttccattgcttcagcttgttaagcagcttttagaaatggtcatttgcttaaatactaagccttttttcaggttcataaaattagtaacatggaattcacaagcctccttaatattagtttcttttgaaagacattacaatagtaatttattgtcactggcttctcaaagtttcaaccctctcaggttccctaaatgtttccacctggaaggctcttaaacttaggtttaccgtagctctcatcaaatagaaatgtttctctaacttgagtgatgatctgaaacagatttccaaagagtcagaggacttcattgtggagcaatataaacatctccgccagagagatggttctggagtgaccaagtcttcatggaggattacagtgcgacagcttgagagcatgattcgtctctctgaagctatggctcggatgcactgctgtgatgaggtatcagagtcactttgatatgatgagagcagagataaacagatttgttgcatgtttttaatctttggtatgggacatactagaattcactgcaaatacatttttatgtaactgttgaatgctcatacgaccatggaattcttccctttaaagagcttggtaagcatttgagtgtagttgttagacggagacgatcacgtcatagtttatagagtgcataaagacgtaagttaccatttaatacctttcattcaggaaaaatgtacttagaccctacaatgtactagtaggcctctgcgctggcaatacagataagataatgtagcccctggcctcaaaggaactctcctccttaggttgcatttgtataatgtttgatttttagattgttctttgagccctgcattccacgaggataggtcagtgggtattaacgaggtaaaaggggagtagtacgaaagggcattcaagcgtcccatcttcgcttcaaccaaagcagccctgcgttttcctagttttattaataggtttgatgtaaggtcgtctttgaaaagggggtttggcttttttttacagtgtgactgaggtataatttataaaaagggaaatgtatggcatggtgagttttttcacatacatccttgtgaatacccagctcaagatccaaaacatttccataatttcagaaagttccaaacccctgcctcttttcagtcttagccctcttcccctgaagtaaccactgttccgacttcaatcactacttttatcccacaggttaattttttggcttttttccactaaattttcaaattctttgatatggtactttactattgacgaagtactttcacactaggttatttaatattctttgattcacccaatatttagggaacacctgtaggggacaaaaaatgaatgagagcccctgccttccattgctgctaatctggtgggaacgagacatgtatttaattaagcatgtaaaaaatagagtgggtgatgaaataatctatatactaaatccccatgacacacagtttacctatgtaacaaacctgcatgtgtacccccgaacctaaaatataagttggaaattaaaaaaaaacgagagggagaatagagcatcacaaccagagtgctgagatgaattactttattaccaaagaaggaggaggactcagggaggtgccgacgtttaaacccagtcactgaagggtgtgcagaatttggataggcaagataccctgggacaaggtcattctaaaaccatgctaacatttgtactttttttttcattgtgatagttcctgaaatgagttgcataaaactggtacatgtcttagggcagtctctaattgatttttattttgttctatttttaaaaattagtcttcaaatagcagattcacatgatattaaaatatatgcacataaattatatacacaaatatattttctgaatgaaatttagtatctgcatatatttaagagctatttctgtctcatatgttcataatcttcatccattaaaaaaacttttgttaggcctttctcactctaagattataaaaaattctcccattatttacctagctagttttctagttgttccaaaaccatttattgaacaatccatctttttgacactggtttggcatgccttaattatatattcttgtgtgtgttaggatctccttttggactttccattctgttcattgagtcttatcagctcctcttacattggtaccatgatgttttaatctatggggctttgtagtttaaatgtagggctagttccagcgcattgttctctatcagctgttaggaacttagaaatcagcttgctctgttttaaagaaaaacctggtatttttttatcagtataacattctatttatattaacttgaagaattgaaaacatctatgatttttcctattcagtaacgtatcacttagaataggttaggttgtactactataaaatctcagctgcataaaacaatttttttttgcttgtgctacacatccattaggtcatcaagggactcaccttgtcaagttactcagagattcaggctgatataaaggtttgatcttgacatacgctttcatgatgacagaaagcagggaagagaaggtggtgagccatgtgctttctcccccttctatccagaaatgacacatactcacatttcattcgccagagaaattaacatggcccctcctaagttcaaatggatagagaaatgccttcctaccaggtgcccagaattagaagagcaaacatttgtgaacagttctgagtaccacaaataccgttatctttccacttaagtcttctgtttcactcagtagtgctttaaacttttcttcatatgtttttcagtgtttcttgttgaatttcttgatattttatcatgtttgttcgtactgggagtagcctttttttccatttcattttctggctggtttcattgctggttgtttttttgttttgttttgtttttgagatggagtctcactctgtcgcccaggctggagtgcagtgtcacaatctcggctcactgcaacctctgcctcccaggttcaagcgattcttctttctcagcctcctgagtagctgggattacaggcatgtgccaccatgcccagctaattttttatatttttagtagagatggggtttctccatgttggtcaggctggtctcaaactcccaatctcaggtgatccgcctgcctctgccttccaaagtgctgggattatagacatgagccaccgtgcctggcctagttcttatgggatgtatatgtctttggattcatatgatatgtatatatgtttatatttctacaagtacatacctaggagtggaattgttgggtcataggttaatgcatgtttttctgccaaacagttgtgtcaatttctgttttcaccgctgtgaatgagagttgttctaccttcttgacaacacttgatattgtcagtcattttagccattctggtgaatttatagtgctatttctgtgtgtgtaagagagagaatgagagagggtgtttgtgagaaaaccaaagcaacactgtgagagtgtgtgtgtttgtgagaaaaccaaaatacatactactgtgatttcattgggagaaaatctgtttggtatatcaaaaaaagtagcttaattacttcatcattattggtttaggtccaacctaaacatgtgaaggaagctttccggttactgaataaatcaatcatccgtgtggaaacacctgatgtcaatctagatcaagaggaagagatccagatggaggtagatgagggtgctggtggcatcaatggtgagatacttgttcatgtgactgttttggagttagggaccaaaacattttctgagatgtcatgtggtagaagtacacctgctgttggctaatagtctatggtagcaaaacggaaaaagcagatactgaattctattcactgtttacaagttaaaatgaaattaaatagttgatataaaatatatatacttggctgggcacggtggctctcgcctataattccagcactttgggaggctgagataggtggatcacaaggtcaggagtttgagaccaccctggccaatatggtgaaaccccttctctactaaaaatgcaaaaattagccaggcgtggtggcggctgcctgtagccccagctacctgggaggctgaggcaggagaatcacttgaacccgggaggcggaggttgcagtgagctgagattgtgccactgcactccagcctgggtgacagagcgagactctgtctcaaaaaatacatagatatttgaaagactaaaagaaaaggcagcaaaatggtgataatagacataaatcccctgggttttacccttatttgtattgttgttttgcttctgaattgaaaacattttttcaagcacattagaacagaaaaatactagaaattttatttattttgagatggggtctcattctgtcacccaggcttgaatgccttggtacactcatggcactgcagccttaacttcctgggctcaagcagtccttctccctatcctctctaatagctgggacatatgcccacgccaccactcctggctaattttttgagaattttttctagagacaggatctcgccatattgcccagactggtagaattttttattttgtatataatactgcaagtggactttcagattgtgaaatctttatatctctgatccctcacgttcctcccaagttagtttttgtctttactagtagagtttatacatttgcttctaatttatttgaaaattcttatatgctatgtataactgtatgcatgtttttttttgtttgttttttgtttttttttatttttgagatggagttttgcttttgttgcccaggctggagtacaatggtgcaatctcatctcactgcaacctttgcctcccgggttcaagcaattctcctgcctcaggcttccgagtagctgggattacaggcacccaccaccacacccagctaatttttgtatttttagtatagacaggatttcaccatgttggccaggctggtctcaaactcctgacctcaggtgatgtgcttcccttggccttgcaaagtgctgggattacaggtgtgagccactgcacctagccggtttattttgtttttcatttttattttttggcagaggagatcatgtgggaatgtatgcttgttttaaaattagtgttaaggctggatgtggtggcccacacctgtaatcccagcacttgggagaccaagacaggaggatcagttgagtccggtagttcgagaccagcctgggcagcatagcaagaccctgtctctaaaacaaataataataataatttttaaaagtgaaaaaaatcagtattaaatgtaagtagtgtatttgtaaatgcttgacaaggggatgttaagggcacaaaaataagattcaggtggtcaatttttcacttaggtcatgctgacagccctgctcctgtgaacgggatcaatggctacaatgaagacataaatcaagagtctgctcccaaagcctccttaaggctgggcttctctgagtactgccgaatctctaaccttattgtgcttcacctcagaaaggtggaagaaggtgaggcttacctggtactgcttacatgctcggtcacttctgtaagctctgttcacataggccacttgtgattgccaaacttcgtgttgttctgtcggaagagaggataagttgttagataaactcactttagcaaagtaaatttgtggagtatcagcatacctgccagcctgaacatttcttcacaagcttattgtcaggcaaagctttgtaggtccttctttttaacattctgggcctattttaataattttgggacctgataacatatgaagcagcacatacaaatgtttttacaaatgcaaaattactattcccttacaatggttctgtttaaaacagctggacccctagggtatattttaacagtaattaattgagcctagaaatctatactatcaaaaggccattgcagactagaaatggagtaaaatcctcatgtagttattggtaaagtgtggcgtctggacactagtacgcttcctacccttaactgctttaccatgctattcaaagttttatcaccctatagttaactacaaagcagaaggaaaaatgatgaattcaagatgttgaacctaaacttctacttgatagttaagcatcagataattcttgattaaaagccccaaggatggcttgtgctggctttctggaatattttgtcatcacagtatttgctctgctatgaaagaagagaacaagagattgtagtttctgcccttgttcccctgggaactttagaccagtaggagagaaggcaacaaagtggccactaggacgcctcagcttttgtcctcattcgcgtctcacacaaaatgatttgggaactcaaggtgttcttgattcatgttatatgtcattattctctttctccctcatacaagtaagttttaaacacagcagaagttgagttttatgatagttatgttatccaggtccaaacatttcctatgtgttgagggttcttaccaggactttctaaaagtctggtagaccttggacttgttaaaagcagcaggcagttcacttagtaagatgaaccttgctaaaataaacaggtaattttttattttgagtgaatactcatgaattttacttcttagtaaactccagttccataaagccttcccctttctacagaggaaaagttgttatatttcagaatttttgcttgctgttgcttcattcctaatttatgcttttagtttctgttggcaagcattctcagaggtggtgaagcataagaagatgaagaaaagaccttcatactttgaaatcttaatagctttaagaaacatatttcttataatctattttattaggtttctctccttatggataaaataaggcatgctttaatacaagtgatatgacttgttatttcaggcttatgctagaacattgcggaccttacgtcaccagatgtactttcggacggcttgacatttatctaatctgtacattatctcgttgtatatgtggcagagatttacccaaggactgacagtacgagttgctaggataatttgaatgtgtttttttgttgcagaagaggacgagtcagcattaaagaggagcgagcttgttaactggtacttgaaggaaatcgaatcagagatagactctgaagaagaacttataaataaaaaaagaatcatagagaaagttattcatcgactcacacactatgtaggtgcagaagtgcgcgtgctctggtatcagggagggagggagttcatgccctgtatctgcaggttcactagtgaaattttttttgacctttgtttgttttgaatcattggagtgtagtcagaagtatgagttgtaaaataagagagaatgaacagcaggtaaatgacttatttcctctgctgaaacaagcagaatttaggttaaatctcagaaggtgggattgaagtcttactagttaggtgttttaagcttctgtttcccatcctcatatttgcccttggtcgtactgctgtcacctactttctatgtttcattttcctcacattcttagttcccaccttacccaacccaatagtcaatcttccatcttacttgcttggcgaaaccccaaacttggttaaatataacttttttttttttttgtatccttatctaagcagctgaaagtatctggagaaaagcatataattatgagcccagtcttatttaaatcgatgaccagaaatctcaagtggacagttcttactgtctcatcaacctcatgacagcactgcccagtgcaattccttttcccgggtcagttctttgcctcactctctcacaggcccatcacataccttctctccactcctgtcagctggccattctcagtactcagcctgtccacagctttgtcacagttgatcactcctacaaatagtgtcttcctcacttggttctgagtcactgtatcctcctggggcttctttctcactggttattccctcttagtctctttccctgaatggttttgttttttttttttt

SEQ ID NO: 260 - DNA, 32742 bp, Homo sapiens
  source 1..32742: mol_type = other DNA
aggcatcacgctggcttttgcctggggttctcaggaggggagagttgggagaggctttgctgctgaggaaatttatttggtagattgaaggtaaggccagtttatgactttttctgtaatactctttcaggagatgctccacaacttccctcgaagtatttttcaaaggtttgggccataactgaggaaattagtggtagaaatatggctaggagagtttaaccccattgccctactaaggccctactaatatctgctatgtaccgtgtgtgattagagtcaagtcctttgctaaccaatttattgcttgactgaattggctctcttgtctaacatttttttgcctttgatatttttctctaaatatattagtgtgaaaaagaagatacgctgctctacgttcctatatttatcctgttctactgggcttcatttgcctgaggagtggcagtttcgctagcttaacaaaaccagccactgcagggtattggtttacatggcaaacatctttggatgaagggacagctgttccaactcatcatccacttcatatcaagagtcttactctctggcgtcaaactgtagaggccttgagagatcctttcgctgttttctgcattagaagcttaggctaaggactgacaatcctatatgtacctcaatcaatgctttacaactttgttatttttcaggtttgaacgagagctacagaaacgaaagaaaaagtctgtataagccaatggtgttcgggaagaaaataaccccattgccttgaggtttctttttttcttttaaaatttattgacagatgtatttttatgggttccaatttgaagcctaagatatattgcaaacagtggatcagggcagtatggaaaactaagtcagccctcttagaattttggtgctgggggataaatttcagcttcttctgaaacccaagctgacctttcactaaaatttttgctggaaaatgtcttttctctaagtgtttggaagtttaaattctctgttccctgagtccaaactctctcacttccttacctcaatttcgttttacaattttaactaaactgattatgtagaagtagcaattcccaacactgaaggaataaagagaaagaaatttgaagcttctgctgtttatacttgtattttaaatgtcttctctcctttagcctgcaacaatatatgaatttgtacaatagtttagcttcaaattctatttttataatgtcataagataatttctgtgctgggaatagactctaatatgttttcatttgtatggaatatgaaaagtttgtaggtgccactactactctggaaaaatggcagatgacgaagactatgaggaggtggtggaggtaagatttaaaaaaaaaacactgacagcaaactattttatgtagtgacaatcaaagctgtgtaggtgaattaatcattcgaaaaatacattgtctattataacttcacaaagagtcatcatttaaagcataagaaaggaatattttatgttcagtttcactataattatgtgggatttagaattgacaggaaatatcactgtttcccacttttgcttttctttaagctctcaaaaaaccaagttggagtaaaggcaggttttaattcgtcttctaaaactgctttcttccccacttcccaaccccgatgttcaaagggacagagacgaagagaaagttctgaaaatggaactctgtctcttagtatctgtatagcaatagaagaaaagatctactccttattctttgcttcaactagctaatcatctatagggtaacatgggttagatattcagaataatcatatgtatgaaattatatgcagatgtgagactttatacataatacatacacatgtgcacagacacacacatacaagcaaatataaataaaggcatgaaggtcacagcgattgttggagccacaccttcctaccaacttcattatatttacccaagtcaacaagactagcttttgcttttgaattttgaataagaacaaagactatagtgggtatcttgaaaattttccttccaattattagtggacatctaacacattttacaaagctgttaatcatttattttatatttattttacatccttttgtttttatcatcttacggtttttcctcaccggctcttgcctttagcttcacattctagaaataaaatctaaaggcttggaactataatgcacataaatacagtgccatgaatctgaatgtgcttaataattaccaattaatgatgatgatctaaacacatgaaaatctccaaatgcctaaggcacttggaggcagttttgaaaatctgtgctttttaataagactgaaattaactgtaagagctacccagaaccaaattttaggtggcagtgccaaaatttctctttggaaaattattttagtgaccagtctatatttagatgaagaaaattttatttattctacaaataaaatagcttttattactgaaggatatgagggaaaaaatagaatgaatctcgtacaatgtaacactcagcctctctggcttaaatgctgataccacatctttcatgctgatattatcactagtgtgcattttacttatgtacctaagggtcagaaatatcactgtcaaacactaatacaattataaattaaattgtcttccctatgataataatgccagtaacagtttttactctccaacttaaatatcccttgtctttcttaaaataattgtgtacctttgccactggaaattgtccttagtgctagacttgattgattcaactagatgtcataaaaaaggaggtggctatttttagacatcccatccctaccattttgttcccattacagcatctgtgtctgaccagcaggtgataaacgaatagactgcctgccagaaagtattgaactgagatctctttgacctcaaaaaagatcatgagcataagagggtggtgcattcgaaaaaatggccagggaagattttagaaaacagagaggaactagctttaaaaatatgcagaaaacagagaagaactggctttaaaaatatatctccttgggatcttggacatctgaaataaagttttactgttctctctactctaacttaaacttgaaaagaaagagagagaagcaaggatgcactatctaattagtggcacagctctaaaaaaagagtgagatttggcatacaagttaatgccaaccatttaaataatgttgcctcttttataagcgtatttctaagatggatttaccaatggtgagagcccagcaaaggtaaaattgaatggtttccaaggagctgcttttaaacttggatgctgagaaaatccaaaatagttgtgaatcttccattttattttaatatttcttctgaagccactgatgttttgtgtgactggaggaatgactctatgtggcgtcagcatcaaacaatattttctagtgtccaaatgatatttctcatgtgctgaaaagtcacaactgtaaaaaagcaaatctctgtcctgtcagtgcttgtgatttttgttgctatgtgtaacgacatacaggcagaattagattttaaattaaaacaatagctcaagagtaaagaaagcacaagaatgaggaacattaggcaagttctagacgattgttaacgcaggtgaaatagcacaggcggcctactgacaatggttaagtaatttgatgacacttcactgaaaagaatgcaggccattgagggaaattttgcatcttaatgttttcccttcccttgagtgctgtatgttttggtgttaaagataagaaaaaggaagcataaagtgttttacatcctttttttttttttttttttttcactaagaaatgagccaagtgtttcatctttatccctttcctcatgtgcttggcctaaacgagcctctccttctgttcaccctacagagcagggtgaggctaaggacaggattcctctctccttacacatctgaaaccaagtgtcaaccagttcctttctgcatctatttattgctggtgatgtcagaagtagaacaaaagtagacttggtttcagatccaggctgcagatccatcatgcaggccatgatgacctcagagccactatggcaaattgcagcctacctttcccacactttgtgatgaagaatcttctcattttccccttcattacttggcatttaccagttttcatattagcaccactctgtttaggacaatcacactattgaaagggactcacccatcactccagaagaaacttattacttactaatcaggagggtataggaataattgagatgtggatataccttgggatcttattatttccatgatgcaatccatttaaaaatgtattcacactcgagtttctgttttagtttattgttagtttgcaaacagtgagttttatcacagttcctctctgcccaacccacacactcaggatcttcttattgtattctcttctcagcaaattctatcttggggaccataagaaaaaaatttccatgtcccagtaaagtaaaatagcttctcttgattaaaaaacagcctcatacatttttctcagccctctgcatctctttgtccatttggatggcattcactttagctttcctgaagtattacaaagtgaagatgggttccaaaatatgaacaggctccctcacctacccctttcccacagacattccaaatcaaccgagctagtgcagtcacctaagtggttcagctgaggcagaggagaggtggtttctgctttggttctcttgccaatgcctttgtgctctatttacagtactacacagaagaagtggtttacgaagaggtgccgggagaggtaaggcccagcccacagctgcataaactgcattctcattaaagcaggaagagctttctcctttcttagactcccagggccacaaagatggcaaaagggattatctgacagaggatcactcacctacctgtgcccagaagctggtgtgaaagcacaaacattacctgtttgatggattatttcacctttttttcctattcaaaaaacgcaagatggcagggggtggttccccctatttcttctgtgtgatatttttgtgtagatgaagctaattagaataatgtcagtggctatcaccattctccaacagcagcaggagggatggtgacaacaagccaaggagccttggctttgtgattggcatagggacaagcagttttactgtgtggagttataacttgtaggacaccatctctgccaccagggatggtgtctccagggcttcgtccctgatgatgcattgaaatgctactcagattttagcacattagcaattctaaataacctattaccataaatattccacgttcaagctcttttttttttcaaggtgaaatacctctctcatgctttattttctgcatgcagctgtttctctttgagcatgacaaacagtgatatggatggttaatcctgaagcttgttcagagagcctgtgactgcataaaaactagtatctgtagatgctgtaatttggttagtctctcacagtcaaccatgcctaggtaatcatgggcagaaaacaacctattagcaatgatgtgacaacactagagggggtttttgtaaatgtacaatttccttactaggttctcttttcataattgatgctagaattctttggtacagatgatattagctgtgaagggaaggatactgtgaaatggattgaagagttggctgcttatctttttttcttacatgcattatttttaaccttggattagacccaaactttgggtcttagtgtcttccactacagcctgctgtaagaaatagtaatttctcacctactacgtagataggactgttgtgaggataattaccccattatgttgtcatcattattcttgtccacctaagcatttattagtgtaaatggcactccggttcacattaattaactgactaagccaagggaatgaaaatctcttataatattgatgcgattcatttttttaaagttcattattctttgtctcctactacagtggagaatgcctaaatccctgcagaacaaacgaccaattttcccttagtcatttacaagttaatattaaagtcaagaatttgagctttgtttgattatcttaaccttttgttccccgaactcaagtttgcttttactttacccaggcaacttaagattttcaactgttttaaaaaaatagtttattgccaatttcccccccactactttgaagtgttcgagtgtctttctgcaaatgcaaacttaaggcaatgttgcaaagtaataaggagtaaactttttattccacgcaatcccaacaatcagcattcagatttgtgtacataatgtgccttcatacggctacagtgtgccatttcctgctttggcttactttagatatggagaagtaacaccaggaatgtatatctgacttgaagttagactaatatatactaagatcacagtagcacagtttttactttcacaacaatgttgaactgcatatcaaattttcagacaataacaaaaatttatgagactacgacaacaaggacatctgactatgagcaatcagaaacttccaaaccagctctggcacagccagcactggcacagccagcatcagcaaagccggtggagaggaggaaggtcatccggaagaaagtggatccttcaaagttcatgaccccctacattgcacacagtcagaaaatgcaggatctttttagcccagtaagtttcaaacaacttctgctaacctggcttgattattaagaaattacttatctcaactcactctgttttggatgctggctggatttgtttctcaaacctgtatgaaacaaaaacttattttgcaaattataggctcttgtgactgttgaattttccttttatgtaattcatttataccattgcagcataagaaagcattcttattgaaatcattcctgcaaaataagcataaggccaatcataaagcatttattggtatttaatcactattagccaatctagaataatgaaatcataaatacagatttaatttaggccagttcacagaagctacttaacatatttaaacaatgtcagcagaatagcttcttagtagactagctaacagcatataaaaaggtatgtaaagaggtgtatagtgaagaagaacatttattttaaaaatccaagatcagactaagaactcatttgaaattgaggatctgaatgtttggctataccttaaaacagtggttattaaccatggctgcacactggaaccccctgggaattttaaaactaatgatgctcaggccattctagtttaatttgttcagagttgggactgtgcagaaaggtttttttttttttttttaagaaacagaatctttctctgtagcccaggctggatcaagcaatagcttgatcacagctcacttcagccccagacccctgggctgaagcaatcctcctacctcagtctccctagtagctaggactacaggagcatgccaccatgactggctaattaaaaaaaaaattgtaggatctcctaattattttttcatagaggtagggtcttgctatgttgcccaggatggtcgtaaactcctggccacaggtgatcctcccaccttggccccacaaaacattagaattataggcataagccaccatgcccagccctgtacaaaaggattttaaaaagctgcccagatgattctaatgtgtacccaggttgagaatcactgctctcaatggtccctggtccttagattcccatgcacagttctgtaagttacactgactgattcagacagattcagacacatttcaatgggtctaatttgtttattgtccatggtgggctgaggtctcactgggtggcttgattgcatgtcctctggaggcttaaaaaaatgaaatgtagcttaagagaacattggattatataagactaaagtttatgtcaaaagcatcctattgaggttgagcaatacatactcacttttcattaaatgatagcagctcactgtttggtaaaattctagttcagagccttaaataatctaagacaggtttctagaaacaagattttcttaacttctttagtgctgcagtattcagcaaggatagaattttttgtcaatatattgccatacattcttattaattcagatcccatgaacctagaatttctgatgttctgaacagaatgccagcaaaggtctgtaatagtttttaagtggttagtaaccaaatcaatagtataatttagattgttcactactccacttaagagtactcccaaaacatttataatgataaattatgcacattatcattaaagcaagaattcattgtgtattcagcagaaataataaaatcacattcctaaatttacagaatataattcagatctgccattaattcagctggtgtctcagctatctgaactactgaagtttagctgcaacttctgaattgaatatttttgcattgtattagcactcaaatcttttcagaattaactcaatttctatatttattttctaaaataattgagatttaggctttttatgtatgcattcagacaaaaaaaaagattgaaagaatcattttagggtatttccaagacaatagtctataataaatttgcattgtctccaagatccaaccatgtttaggagaagcaattatcaaatctattttagtttttgctgagagttggggtaggggacaaaaagaaagctattataattgataattgctataacttgaaggatttttttttatcaaatggggtgagtatgttgcctgaaattttcactgctgtcttgttaggctaatatctgatattcttttcagaataaatacaaggagaagtttgagaaaacaaaaggacagccatacgccagcacaacagatactccagaacttcgcagaatcaaaaaagtacaagatcaactcagtgaggtgggctgcattgctgaaataaaggagagggacatttcaaaatacacctactgctgggaattgtgggctctaaatatgtgctgtgagaatgagcagttgaattactatgagctagttcacaaatctagaaaagcatgaaccatagatcatgttgctgtaaatgtgaacccaaagaaacttctaaaagcttggcttagcaacttagcttaagaggagactatgagatggaagctccaactcactgtggttctccacactgtagcacagtaaggccaagaagcagcaggctggagatccagccaggaaagcagacaagcagtaaatgcaggtgcttctttgaagatcacatttttccagctaaaatgcagaaactatgctttgtgatgcagacctagagtcattggggtaatgctctgtggttataagaaattccttaatatactcacatgtacatgcctgtcatgaactctaactgtgcattatttgggcaggttaagtatcgaatggatggtgatgttgctaagactatatgtcacgtagatgaaaaagcaaaggatattgaacatgcaaagaaagtgtcgcagcaagtcagtaaggtaaggcaatgatatggatggctggggtactcagtagcatgtgcatcacctctgcattgtcttataggagaaaattggacaggcctgatcctgcccaccagcctcatgggcagtgtgagttcaatacctgtattcatcaaggaggctgcacagatgactgagtggcctgtagaacctatgggtggatggaagagtccatgccctgcccaaagaggcagctgtgactcggctccaggctgttgctgcatgaagtcccagtgtcaccaaagaagctgaggagctaaatttttaattgaaaggaattagaattttcaatcaaaagctgactattgtaggaaaagtattataggatgttggcatggtcaatgttttcctagtaacccattggcaacctctgagcaagcatgccttcatgagtctccctttgttgtttaaatcctcatgcctttgggtgagacctcaagccacagatcctctgctccttctgtctaggttttatacaagcagaactgggaagacaccaaggataagtacctgcttcctcctgatgcccctgaacttgtccaggccgttaagaacaccgccatgttcagcaaggtaagggtctgctccattgccacttctgtcttcctatgtcatcccatcatatatttcatgtaatacttggtgaactcttgatcatctggaatacaattccccaatctttttatgagtagccttgagacatgtgagactgcagggatagggcttggcaaaaaggaactgagaggaaagctcctaggcagagtggggagagggtcctttgggaacctgagcaacctgggggcagaggggagtgtctgtggagaataaaggtgctctggagaaccagctgagagagccacaaagtaatatctcaaaattgtctgtagaccctttggtatactttggatgtccctggctattactctaattagaggtttattttgtgccccttcttgcaagtgtcctatattgccctgaactatgtgaagtgcttcctggctccttacattgtgttagcacttgtaagtgctattaataaacaatgacaaataatgaccaaaaaaaaaaaaaaaaaaaaaaaacaaagaaggcaggtagagtcacagagaaaagttgaaacaaaatcagacacatctgcccctctgaaaataagaaaaagcagggcatgctatcagtaaaaatgacttgggttggatggaaagtgggaagttatctgtgaatttcatttacctttgctctcacctggcccttggttctttaggttattaatggatgaattcaaaactatgtattttgtgtaaacgtgaccctacttcctcctaacttttcactcttttttgatttagaaactgtacactgaagactgggaagcagacaaaagtttgttttacccctataatgatagcccggaactgaggagagttgcccaggcccagaaagctctcagtgatgtaagtgaaatgcaagtggcaccacttaggtgtgcagagtcaggggaacttgaattacatattctggccagatggtcactgcaactcttctgtataagagactaaatgttgtatttcagaggagtatgtctagaattgttataatttatgatgtctcatttaaattagatataatttacactttatattaaatataatcttgtccagttccctcttcttataggtggcaaacctgaatctggggtcacattagttagtggcagagcccaggcttgtgagcccaagactagtattcttcccattagagcatgagtccttctttccccttggctctggttgaagttgttctgtgacaacagaatgacaatttttaaaaacctattgtaatcatagccaccttcccaaatctattaagtaaacaatgttatggaagggttgtgccttactattctaatcatcaagtccaaattgtggtgtgtctccctttttctgtgtgtgggacctgactagtgtacttgttaaaacatatttgtggctggatgtggtgactcacccctgtaatcccagcagtttgggaggccaagaggggaggattgcttgaagccaggagtctgagatcagcctgggcagtaaagcaagacctcatctctacaaaatatatttttaaaaaattagccaagtgtgggggtgcatgcctgtagtctcagctactcaggaggctgaggtaggaggatcacttgaacccaggaggtcgaggctgcagtgagctatgatcaagccactgcactccagcctgggcaacagcgagacctccatcttaaaaacaaacaaacaaacaatgaccacaccaacaacaactaaacaaaccaaaaacacatttgtatagttatcccacaaagagctcttgctatcagaagatacttcagttagtgaaaaatcagtgatcccacttgccggaattttggtatcctagaccttgaaaactgtatgttagaggaacttaaaaggcttaacagagtccttaggcttgaaaccagcagcaacagcagcagagagacccacttgggcctaacactctcccttattttgaggtactttcttacatgaccattggatttgcgggaggccatattgaaaatccagactgctactccagtcttcagcagagcactgtattataaagcgacaagttatttgacattcaattgtcagttagatccctggaacctcttatactcaatttggacttagtaagccagttcagactgattgggatttacttctaatggaatctatggtctgatcttgccatgaaccaaaattatacacaccaatttgatggtgtctccaacttttgaggtctaatttttaacgccaccctcttcatatcacctgcaagtttagtggacatctttttctatttcactttctatgtaattggttaaaatataacacagatacagtcgtatccttccacaggtaagttaggaaatagagaaggtgtaacaaaattttgaagtcatctagcacatgataccaattttattgtgtgagtacttcttgcttctctttcaagattagctttttgattctgtatctcacagattcacaatattgttacatggctgttaccaagtgatcaatagttatttattggaagtctattatgcatgcacacctggcaggatagaaaagtactacaagcagttttcatcctttcctcttagaatttataatcaggctgataaaataaaagtatgatatagcaaacaacaagaaaaaagttaaaaatgaaacaaaacccaacagtctaatacttgctacaagacagacagaacacgtgtgagtaatcagagaaggccatgtggaggtggtggtcccaagggcatgggtggtgatgaagaaaggcattttgagtagagggagcacttgaacaaggggacacaggtaaaatgaggtctgagttttgagggacaaggaaaatgaatgatgggagtgcctcatttggagggcacttgtgagaatgccggcagcaggaccttgaaaggcagacaaaattgcttcgacatggaacggtaataaataagaggcatcataagattttggagcggaaaacagcatgataaaaatagaatctggagtaattttgatgagcaatatgatagattgagattaggaaatacaggaaaaactgggtaatttggagaaatctattttagtaataattagggcaaaggagaggaagaaaggaatctgagggtaataagtattaataggcatgaatggcattggatattggagccaaaggagagaaagaagccctagaggagcttctgactgtagactggtggtctgggtgagtaggggcacagctggtaaaggtgcgttaatggaaagagaaatggagttgagatgattgaaggaaacttcagatcaaggcatcctatggataaattagaaagttccattgctcaggtatgagaacagggcaagaaattaatatttgagagtcatcagaacaaagtgatagccaaagacatgaacatctatgagggaagcagaagagtgcatggccaagggcagagttttggaggacacccacacttaggactgaacaggagccagcaaaaggatgagggaacaaacagcgaagttgaaaaggaaccaggaaatgccatgtcatgtaagcctgggagaggtttccaagaagacagttaatctcctatctcccttcatctatcaaatggagagatgaaggattaccttcataccattctaatgctatggactttgaacaatgaaagttggccacatgttttgagcaattacagtagaagatgtaatgaaagagaacatacaataatgaagtaaagtcttccctgctattcctcaaaaagatgtgacagttaaggcatagcttttattttaattgcagaccaagtgtgcactcagtatcagattattgacatgcctattaatactgttgtcagtactatgaacttctacaattattgggcacagagccctaagcaagctgttgtttgcagaatgcaccatgtgtaggcacatagatttctggctaagggcttgggcttagatgctgttgctatctctcctgtactatcttcctgtgtccttcttaatctacttatcatgttttccttattaactaagtagagacaaactactttgcacacactaagagtctttaagctgatgcagaatactgaactttttttttttacttttttaaaaatcagattattctccataacaacagaattctaactaaacagaattctgaagaaggttcctgagaaattaggacttctagatctgatttgtctgaaacttcttggcaggatgtcatacttaataaacatttatcctattcaaatgttgcttttaccctaaggacttaaccagccatgaaaaatcctgttgtcctatgcctaaaatgaagtcttcagtttgtatttttttttttttttttttgagacagggtctcactctctcacccaggctggagtgcagtgatacaatcttggcttattggcttattgcaacctccacctcccaggctcaagtgatcctctcacttcagcctcccaagtagctgggactacaggtgcacaccaccacacccggctaatttttgtatttttggtagagacagggtttcaccgtattgccctggctggtcttgaacctttgagcaattcatccgcctttgcctcccaaagtgctgggattacaggcgtgagtcactgtgccttgcttaacttatttaaaagaaattaagccaggcttgtttgtggaatttgtgtaaatacatttcaaaatctgtcttttgtatcccaattgatttgatgtccatgaaagcttttgttataggcactaggtagatattattgggataagatacagttagacttggttaaagtataaagatgattgggaccttgggattattcaactgctttacttgataaataagaacactgccatgaggaagggaaaataatcgtagaaacttcacagttgtgtcacggaagattagaaagataattctcctcttgagacattcccccatggcctcagtgtgtaagacacacattgagatgtcagtcattgactcttgctctagctaggtactatgcaggccacaagggttcccaaggataggacatcttctttgccatcccagagctcacagtcaagaggaaagagacatgtagacaaaaaattacagtgtcatctgacaacccctctaaaggaggtaatggccaagttgagtgagatcccaggagaaggtcatcacgtctggctcaggagtcagggaaggcttgagaggggagtcatggtgtcctgagccatggagaggaaacagcggtttgcagacagatggggagagggaacagcatgtacgaggccgtgaagcatctgagggcttcatgtatctggggatctatgaatagttctgcattgttggaaacaggggccaagtctggtggaacaaaagaaccagaggaatcagaaatgaagagagaaaggagggcaagagagaaggatatgcattatttgtgggcaccatacttattttaaggtgatagaagtcttttataggctgaagggaaggagctaatgaagaaggagagtttggggttgtgagaaagaggagggatgactgagagagctgggtgcaaaaggatatgctggaaagggcagcaccctgggtgcaggagtcattccctctgaaggatgtttctcctctgagccagggaaggggtgggagacgcagggatgaatatggagaagataagtgtgtagcgtttcttcactctatgaaagaggaagctgagagtaaggtggggttgattgtgggcttaaggacagtgttggggttttagactggcccctgagagtagggactaaccagagactcataatgggctgtgaaagtttccttgaagacaaaatggcattagtataccatagggtcatagagtattgggcacagagccccaagcaagctgttgttcacagaacataccactgggcaggcatgtagatttcaagctaagtgctggggttcagagtctccctgccctgtaccttcttcctgtgtccttcttaaccctactcatcatgttagcattgcctaatccatggagttgcaggttttcttctgtggcattcagcatcctaggcataagaacagaggaagttggccaggcgcggtggctcacgcctgtaatcccagcactttgggaggccaaggcaggcagaccatgaggtcaggagatcaagcccagcctggctagcatggtgaaaccccgtctctactaaaaatacaacaaattagccgggcacggtggcgggtgcctgtagtcccagctgctcgggaggctgaggcaggagaatggcctgaacccaggaggcggagcttgcagtgagccgagatcgcgctactgcattccagcctgggcaacatagtgagactccgtctcaaaaaaaaaaaaaaaagaacaaaggaggtatatggtcaagtcgatccaaggctgggggtttattgaatgtgataaaaagacaaggggttgggagttgaagacgctggttaagagaataattgcagttgcaaaccatggcatggaaatgaatggaagaaagcagatctagggccatgagtcttgaggaggagggaagaaaattcagcaaaatagaaatcactagcagtactgagagcaatggtatgtaacatctaggacaaattataacatgttacactaaaatttaagacttcaaataaagatgaaagcataatcgtttttaaaatacatccctgtcttttatttcatcaggttgcctacaaaaaaggtctcgctgaacagcaagctcaattcacgcctctggctgatcctccagatatagaatttgccaagaaagtaaccaatcaagtgagcaaggtaagtaaatagagctgggacattgcctcccttgaagactctgcttaataatttcaaccatcagagagggttactaaaggtgagactgaagataaaacacaaacactaggagtatttttacatatgatccccaaagactctacagcaaaagcaatacatccataaacgtcaagaactgtgttaataaatgtttagccagcttgatgactcagtaattgataaatgtgaaaatcaccttttgaaaacagaagccatgttctaatgtcacttgacatttttacttatgacagtaatactacagagtcaccaaataaccacacacttccgtgaagagctggtttaaattcactgtgaagaccttggatagttctatcttatccgtcacacttggaaaaataagaatgtgtctcagacatagcttagttaacagcagtgggcagtggacctcataacttttaaggccctaacaaacagcttagtctacctatatttaggcagtaaactagctctgaggaatgtggctctgatgaggaatgcagagagacagatgcttagctgatgaataggcccatgctaaattcctattttaaattggtccaaatcagaccactttctcctgggatactgctgcttttaaatactttatcttgccctctgtggagatgagtgtcagtttgttctgcttgaattttgatgaaacctcaagatttttatcttaagcattttctgggtaaagtatctagtagagaagaatgatgaaatgatatggataatgatgtctattcagtgatgtttattagtgttttatattgtagattacctaactgtgtaactatgagctgtttggataaaggatctagtaagtatagtaaaatttcaccaataggaatactatcaatctgaaattttgcccaaggctaagcagaaattaactttagaactgtacataaatacatgatccattgaaagttttgatattggccaggcgcggtggctcacacctgtaatcccagcactttgggaggccaaggtgggttgatcacctgtcaggaattcgagaccagcctggccaacatggtgaaaccccatctctactaacaatacaaaaaattagccaggcgtggtggcgggcgcctgtaatctcagctacttgggaggctgaggcaggagaatcacttgatcccgggaagcggaggttgcagtgagccaagattgtgccattacactccagtctgggcaacaagtgtgaaactgtctcaaaaagagaaaaaaagaaaaaaaaaaagaaagaaagtgttgatattgtaaataagacgggagaaggacaatttatctttttggaagaaaaataaaaaggtgttttcaagtggtcatttagaaagaaaaaggaatctatttttaaatgtttatttaaagtctattttaaaagatactttactaaggaaacattcttttgccttatttaaatatgcagtggggattcttaaaagtgatttttgaaaatcactttcaaactcgtctataatcattctctccaccaatttagacttgccagttggtttagtgctacactctccagtacagtagacactagccaaatgtgactaggaagcacctgaatttgatcagtataaactgagtatataagtcagcttgggcttctacaacaaaataccatacattgggtggcttaaacaatagacgtttattttctcacagttctggaggctgggagtctaagatcacggattcagttcctggtgagagaccccttcctggcttgtagatagctgccttctcattgtgttctcacacattggagacagagagccagctctgatctcttcctcttcttcctcttcttataaggatgataatctcattatggggttcccaccctcatgacctcacctaaacttaattgcttcccaaatccccttaccttcaagtaccatcacatgcttgtgagttaggtcttcaacatatgaatttggggggtggggatatagacattcatcccataacacttagtgtccaatatgtgagaaatagacactggatctgaatatttaattatgaagaaaagaatgtttcaaattaatatttttatgttgattacatgttggaatgttaattttcagatctactgggttcagtaaactgtattattaaagttatttcccacatgtttccttctacatttaaaaatgtggctacaagaatgacttgcattatatatgcattggatggcaccactctaggtgggcaaggtgacagtgttgggtactttgaaagcattgccagaactggctttgccctgtggagtaataatatgagctaaggggaggtggctgtggaaaaaggtcactggatttggccatggtgacattatttattcccagtcttaacccagatttctgagttcttaatgactattgtgcatccaaaataatagttgtattagggagaaatgcttgtgattggtagaagtccacccaacaacaaaccatccaacaagggaggcacagggctgccaagagtgacttacctttggtactatcttccctcctcactctcaagatgcattggcccatgttgcagcaggatcatatcttctttctccctaaaataggataaaaatctcctttatctaccctagaacttaaagtataaaaaaataaattttttaaaaaacctcctttatctagtcactcacatgcatttaaactcaatatccccttgttgaatcatgtctcccagatccatctgttggggccaaggggtcctccttggcccactgaaggttggctgaaaaatcagcttgcaaaaggcagattaattggagaaaaggcatacaaatttatttaacatgcacacacgggagccttcagaatgaagctccagctccccagggggtgcagaagcttatataccatcttgaggttacagaaagactatgaacttggatcctggcaaaacaggttatggggagtggggagaagaggaattctgttgaggagcaagaaatgattactagggagaattcaatgggtttgaagaacatacaatagtctggggtgaagtctgttgggcccacaaagcgaacaatggtttatgacagtagtctgtccaggtttctgacagactttagtcttccctcctgcaatataggttcagttgaaaactcagggaaggggtcagagggaattgttttcttctttggtaggtccggaccttagacagataaggaaacttgagcctgtgctttgggagagttggaggattgagagacaggatgggggtgggaggttagcggggaaacaatttttcttcttagtgggtctgtctggtctttatgtagaaagaagtctcttttagcttccattaatctctaagggcctttaattcaaaatactcattatactagggagccatattttggggtggagttctctgttcatcctcacacccttttcttacagctcccagttcagatggtaatgattgcatatctgcagtgattacactaatgttaccttccgtttgccagccttccttactacacctgtcagaatcaattctctcacctttgtctttggccaaagccattagctacatacttccttctgtctcagctgtattttgtagctctaacatagatgaacagtcagagttgttcatagaaacaggccttccaggtggggaagctatgcacaccatgaccagctgaaagtggggccctgaatgcgacactggaaagtccctttagtttctctgtacctgcctctctgctcccttccagatccacaaaagaaaaaatatgagatttcaggttggaatttcccactgataccaactggagcctaaattttttttaaaaaactaatctttcagtgacatattgttacacagcatgaggataccaggcccaggccctctaaaaccatggaaattcttccatcacatagaattggaaagatttccattgatttcaccagaagagatttgattgagtcaagcaggcagtgttaggcccactgtggacaataaaaataccagctgggttctttataccttttctgcagggataacttttctatgaatggaaccatcaggagtcccagtgcttagcccctcacagaaaaagagaagggtaattaactggctttgtattcctttccatttggtaaccacataaaaattacagattcagatgttgaaagtagataatgaagctatatgtttaagcaagacaaagggtacccagtttgtggccccatggaagtcccctcagctgacctctgaggaggagggaaacaatcttactgtatctatggacacatggtcaccctcttacccagagaaggtgtcccagagcttggaattggcctgacatacattcctctgttaaacaaaccaaaaaaattctagagaagtgaaactgactctttcttccaagtttccatcgttcaactgcaagtacaacagagtttggagagaaaggtttccccctaacctttctctccaactctgttgtgtttggatgttgggaaggttgaatgttggaccctgacgtgagtaacccgtctccatgtattgtacaaaagctctggcctcactctcagacttgcagagtgggaccccttcgctggtagagagggtcccacatggacacatacctctctcttcctctcactccttcacctatggacccttgtcctttcaaattctctcctactcacaaatgagacagaaggccataacttcctcagtagccagcaagctccagcctcctcctgtgtcatgaaaatcttcccagacttggcagtgctcgggagtggattgtgagagctcgatctccaccctgacccatttcagctgctggataggaggaaataacatgtcgtggtctgtgaagattaagaaggaaggaaggactttggatgagggggttgagtgatcttacactcttgttttgcatcttgttttaatatcttcttgaaaaccagacatctatctctcactgtgagaattaatctcctgctcaattatccttaacaaatctacatatgcaatgcctatttcttgataaatgcccaacatttagacctcattaagaatatctgctaccttctcaactttaaattatatttcaaagttctctggatctcagttttggggatcaggcccaattgccccttcccaatcctaaggtttttctcctttgacaacaagcaagaggtagggccatgtctctccaaaaaatgatgcattaggagatcctaacctgaggtatgtgtacatcaagaacctctgaagttataactgtttgtgagcattttatagctttctcagtttcttgaagaggtctgtctccaaaaaaaagatgagaaacatttctataagtagtcttagcaaatccagaaatcaattttattgacttctgttctttaaatcttcaaaacagagtgcaggtaaatcaatcagcagtatagcacaaatcttatctcagcaaagatttccattgaagagttgttccctccccgcacatacaattttctttcttacagagtttctttctgttatgatgatgacaatagtaataactattattattattacaatttttataccctatatttgcttagcactgtggggtttacaaagcactctttagcgaatgatcttattaaacttcctagcagccttctctgtaaatattattgccagcacttgtggctgagaaaacaatcatatttggtcaagacaaagtcaagtcttggtcccagagtttgaacccaggcccaggactctaaaatttatagctacgaaaaccagttggctatttatttacatattaaccttttgagaagaaaggaaattaggcatttgagtgagggctaagtttcctctaacccaagctcgttgactctgcacatcactcaccttctcttaaaggtataccagaaagacattttctttttccttaaagggtattgtggggatgtaggcatatgccagtgccttgagacccattagttatgtctgttaacacatttttatgagccatggagggagaattgctctaactcagcttgggctctagctcatggacccaggtttggggttggcttggttaattctgctccaagaacacttcagccaaggtatttcaaaaccgcatatcatggtctcagtttagtgtagttgaacaaacatttatgatgtaacttctgtgtgctgcattttgtgttgggttctgaggctatgaaagtgaagaagacataccacttctctcttccaggagccttacagcctgggattcagatggagtgggatttgggagtcagatggggcaataattcaatttttgaattactttccagttcctattaaatttaactctaaaggcgaagatctattcgttagcctgcaagttgaattttattgtggttgtttctttctggaaaactaggagtgtttgtaaagcttagaaattaacggctaagttcatttggcatagaaatctcaggttgataggttgtattgtaactgaaatataaatagaggatgacttctgactctatttctttaaacatcaggggacatctgcaacttccgaatgaatgaagtccccaaactcagcaaggggagggggcgttagtaccctctttctccattctctatccctatcgcccaactttctggttgggtaaattgacagtacattggaagattttttttaaaggcatttattaaggacctaagaatggcttgctgaagatatttttaaaagttaatcattatttcttaatttgctgtcttatttgtcaattcatgagttatgcttgtcttattttctttttcttttttctagcaaaaatacaaagaagactatgaaaataaaatcaaaggcaaatggagtgagacaccttgctttgaagttgcaaatgccagaatgaatgctgataacattagcacagttaagtgggaagggatggctggttggtcatcctgggagggagacccctttccttagtgacttctagctacttgctctacctgaatgggtgccagaacacttgaggcccctcttcttggggcaagacctggtgcagagttccttttaagaaagaaatttcccaaactctctttccttttgagaaatattattttggccacatgccattatttctacctcaatttttacaacacattatggtaagaccctcttactgactgcaaagtgagattagtacaagttaaagggactctttttaattattctttgcctgaggagccaaattgtacagttatgaaattgattaatttagcatctcctcactggaaaacataagtctattgtttttcttttctcttaagttccctgctcctggcccttaagagatctttcttggtagccaagaaaagcctttctaattctgtttttagcctattttaattgttctaaatctctgttaagttgctaatcatttttgtaatggtaccacattctctaattgtaatctgaccagcctaaaccaaggacagggtggcattgtgtaacttttccaaatccctgtgtcttctcatggaaattcttgcatagttcatttccacagcagttcttcagcttgtctgatgtcttacagaggaaataccaggaagattttgaaaacatgaaagaccagatctacttcatgcagaccgaaacaccagagtataaaatgaataaaaaagctggtgtggcagctagcaaggtatgaggaaatcatcccatttatcttgatggtttgagtgtgggtaaatttcttataactttggctcttgtatataattagtaaaaaaggggaggagtggttcttgggggaactaccagggctgagaccagtggatgtgaggcatttgaaaaagagtagaattgaaacaacaagaacaacaacaaaagtactttggaattataatggggctactaaaaatgttttgccatgtatgagcattaataacatctaattaccatcttcaatatttcctaatttattatttgcctgaggaaccaaactgtacatttatcaatttgatttagtgtcttctcactggaagggccttttgctgtttagaaggagaaagattgtaatcttagacagcaggacttctccccccaggaagaggcaattggtggccttatatgaagataggcaatcatacatgcaacactatcattatttttcttattttcccactgactatgaaaaaacctggtcgcaggttcataaatccatggatatttccatatgtttgattgagtgactttggtgaatggcctgagtccttagcattctaaagcacgatggtcactaaagagagcataaacttcgaagccaaacacacttggttctaaccctggccttggctatgctggagaaagcaggattacatcacttagaaggctattacagcatccacgtgtaagacggtgttttggaccaggagggtagcagggcaggtgataagaagtcttttgaaagcacagctgacttgatttgctgatggattggatgacacgggttttggtctaagcagttagatgaatggggtttccctttattgagacagggaagactatggaagaagttggtaatttttttggaggacagacaagagctcatcttcagatatggtagatttgagatgccttttagacatccacatggaagtgtcagaggtcagtcgactacatgagcctgaagtttcaggggagatatatggaaagttgtataaactggggtgtcatcaacatacagagagtgtttcatgccatgagtctggagagcatcaagggagtgagtgtaaacagaaaactttaggggctgagctctggggtccttccatgggaacatatatgtaagatgagggagaagcaaaatcaggagagggcaatgcgttgggaagcaagtgaagggggaagggagtcatcaactgtgtcaaatgtctctgaaatggatttaccaatgtctggtctctggtgacctgaacaagagcaatttggtggagtctgcttagagaggattcacaagtgaatgaaaagagggaaattgaagatataagtatattcaactctttctaagtattttcctggtaagaaaagaagaaaatgggcaagtagctaatgaaaaactgggtaaagagggactttttaagatacgaaacaaaagcatcatgttgatggaaagaatccagtagaaagggaagatttggtgatgttggaatggggaagaatgtctggagtgatatcctagagcaggtggaaggggaagagatttggtgcttaagaggaggggatggctttgccacaagccctgacagttcatctgcataacaggggagaaggctgtgtatcccagatgcgggtagggggagagtaaagtttgtgaatctgctttctggtcgtttccatttttcaaggaaacagttaattctctaaggtggaaaagtgatctgagtctcccattactgtagcatactgtcgtgatgctctgtggaggctgaggggttgatgcctctgtgcttcccttgtgtatctcttgcctttggataccaagctgattgccttgttttctgagttcataagtggtagatttatctaggattccttgaacttctgtgcttatattgcctgaataaagggcttacactggggatcatggtgggaaccaggatcagtttcttgttctaatccctgtggacaggctcctgatgggggcttgtgaaccctgccttccctattctcccccaacacccctcaacttgctgcttctgccatagctggaattaaaagtgcaaataggaacagcagaaggaaaagcaaggctccttctccctgctccatcctcctcctcctacttgtaaattgaatacatgtgtgctccatgcacagttgcaggtgaggcataaaagcgtggattagtggtacttccagcttcctttctttaggagcgtgttggcaggtaggtagctgggggttgagagctgagtgaaggttctatagcagcaggtatctgggacattatgcatgatcactatttggatttctttctccctcctattatttctgtatctctctctttgagggcaaggaccatgtgttctttcttatatctgtccccaagccagaaacagaattgacaccctatggataattttgaatgaataaatgaatgggaagaaaaagcatcctggaaatttatgcagtttctctgctgcttttaagagttactatgagtattttgtttataaaatgtcaagctgccatttttctaaagagaaaattgatttgtggaagtatgtcatattcataatagagacgggggcaaaaataacccatagagttactttatcattttatttcactcctacaggtaaaatacaaagaagactatgaaaagaataaaggaaaagcagattataatgtgcttcctgcttcagagaacccacagcttaggcagctgaaggcagcaggagatgccctaagtgacgtaagtatatttttgtcaaagtgtttttaaaccttagctgcaaaagagatgaaaattttctcctttaatgactaaatgaatatataactttgcaaatacattaaggttatggagtggtaggttcattggaactatgtaaccacagaaaggcatgagtccctctgagtacaatgtgccttactgtttgtggttctgtggggttaattcaatgggcagggaaattctcacttgcttaggagctctgggcacctgggcctccatatggatgtgttgcttatgagctccgggcacctgggtctccacattgcagacgtgttgtgattttgacagaagcagaaggagactttcaaagatagatcttggccccagaaaccatcatttgccaacaacagaacttaaaagatgggcccctaagtcttcacaggactttctaattgtgtaattattaagagcccgactaagccgttcaatttaaagcatattaggcaaacgagactgggcttgggattaaaggactaacagcctgagagagagagagagagattgaatatgtgatgatttgagtttatctcttacggttaggtttgcattaagctttcctagcatttgtggattttatgtagctgtctgtgtgggttagttatcttttctttgtcccttgaactaagtcagcagcataggaaatatgtgtgtgtggttggggagcaggtgtgggaaagtggcaagtgagagggtataaatggatctgcccaaatagctctgctgggaaatcactgtaaagcacgtttgctttcttttaaaaaacattttatttcagtcattgttggggtacaggtggtttttggttacatggaaaagttctttagtgttgattgctgagattttggtgcacccatcacctacagtgtacactatgatcaatatgtagtctttactccctcactcccaccccaacattccactcaagtccccaaagtccattatatcattcttctgcctttgtgtcctcatagcttagcttccacttataagtgagagcatatgatatttggtttttcattcctgagttacttcatttagaataatggcctccagctccattcaagttgctttgaaagacattatttcattcattttcatggctgagtagcattccatgctgtatatataccacattttctttatcctctcgttggttgatgggccctcaggttggttccacatctttgcaattgtgaattgtgctgctatgaacatgcttatgcatgtgtctttttcatattatttcttttcctttgggtagatactcagtgatgggattgctggattgaatggtagttctattttcagttctttaaggaatctccatactgttttccatggtggctgtgctaatttatattcccacccatagtgtaaaagcagtttgaagcagttttactctctaagtgaaaaacatccttattaaacatctaaaagcccaagttcaaatctcctttgttgataaagacaggaatataaaaatattaaacatgaatagcatcatttacattttgaaaacccagaatgaaaaaagtgacaataatctgctttatcagctgcatatttaaaactaatcattgcttcttcttgttcaagctaaaggtaaatcctggcagagaagaagagttagtagtaactcttagtaccagttcatatatatatatataattttgaaggctaattgtttgtataataagagatttcttataggtataggagggagggagattgcgtatttctcaccttatataactttttcatgaaggtttgtttaaaaaaattaaacaacttgcaattgcttaaaacctgtgtttgctgtggtgctatcagtgaggaaagagtatgtgagctaagagacagagagggcagcaatttacaaatacacaagaatctctgctactaaggacgtggtcagaggtggcatattggtttcttaattttttgagtttggggaggagccaagatggccgaataggaacagctccggtctacagctcccagcgtgagcgagcgacgcagaagacgggtgatttctgcatttccatctgaggtaccgggttcatctcactaggcagtgccagacagtgggcgcaggtcagtgagtgctcgcactgtgcgtgagccgaagcagggcgaggcattgcctcacttgggaagcgcaaggggtcagagagttacctttccgactcaaagaaaggggtgacggacgcacctggaaaatcgggtcactccctcccgaatattgcgcttttctgaccggcttaaaaaacggcgcaccacgagattatatcctgcacctggctcggagggtcctacgcccacggagtctcgctgattgctagcacagcagtctgagatcaaactgcaaggcggcagcgaggctgggggaggggcgcccgccattgcccaggcttgattaggtaaacaaagcagccgggaagctcgaactgggtggagcccaccacagctcaaggaggcctgcctgcctctgtaggctccacctctgggggcagggcacagacaaacaaaaagacagcagtaacctctgcagacttaaatgtccctgtctgacagctttgaagagagcagtggttctcccagcacgcagctggagatctgagaacgggcagactgcctcctcaagtgggtccctgacccctgacccccgagcagcctaactgggaggcaccccccagcaggggcacactgacacctcacacggcagggtattccaacagacctgcagctgagggtcctgtctgttagaaggaaaactaacaaacagaaaggacatccacaccaaaaacccatctgtacatcaccatcatcaaagaccaagagtagataaaaccacaaagatggggaaaaaacagaacagaaaaactggaaactctaaaacgcagagcgcctctcctcctccaaaggaacgcagttcctcaccagcaacggaataaagctggatggagaatgactttgacgagctgagagaagaaggcttcagacgatcaaattactctgagctacgggaggacattcaaaccaaaggcaaagaagttgaaaactttgaaaaaaatttagaagaatgtataactagaataaccaatacagagaagtgcttaaaggagctgatggagctgaaaaccaaggctcgagaactacgtgaagaatgcagaagcctcaggagccgatgcgatcaactggaagaaagggtatcagcaatggaagatgaaatgaatgaaatgaagcaagaagggaagtttagagaaaaaagaataaaaagaaatgagcaaagcctccaagaagtatgggactatgtgaaaagaccaaatctacgtctgattggtgtacctgaaagtgatggggagaatggaaccaagttggaaaacactctgcaggatattatccaggagaacttccccaatctagcaaggcaggccaacgttcagattcaggaaatacagagaacgccacaaagatactccttgagaagagcaactccaagacacataattgtcagattcaccaaagttgaaatgaaggaaaaaatgttaagggcagccagagagaaaggtcgggttaccctcaaagggaagcccatcagactaacagcagatctctcagcagaaaccctacaagccagaagacagtgggggccaatattcaacattcttaaagaaaagaattttcaacccagaatttcatatccagccaaactaagcttcataagtgaaggagaaataaaatactttacagacaagcaaatgctgagagattttgtcaccaccaggcctgccctaaaagagcttctgaaggaagcgctaaacatggaaagcaacaaccggtaccagccactgcaaaatcatgcccaaatgtaaagaccatcgagactaggaagaaactgcatcaactaacgagcaagctaacatcataatgacaggatcaaattcacacataacaatattaactttaaatgtaaatggacttaatgctccaattaaaaggcacagactggcaaattggataaagagtcaagacccatcagtgtgctgtattcaggaaacccaactcacgtgcagagacacacataggctcaaaataaaaggatggtggaagatctaccaagcaaatggaaaacaaaaaaaaggcaggggttgcaatcctagtctctgataaaacagactttaaaccaacaaagatcaaaagagacaaagaaggccattacataatggtaaagggatcaattccacaagaagagctaactatcctaaatatatatgcacccaatacaggaacacccagattcataaagcaagtcctgagtgacctacaaagagacttagactcccacacattaataatgggagactttaacaccccactgtcaacattagacagatcaacgagacagaaagtcaacagggatatcaaggaattgaactcagctctgcaccaagcggacctaattgacatctacagagctctccaccccaaaccaacagaatatacatttttttcagcaccacaccacacctattccaaaattgaccacatacttggaagtaaagctctcctcagcaaatgtaaaagaacagacattataacaaactatctttcagaccacagtgcaatcaaactagaactcaggattaagaatctcactcaaaaccgctcaactacatggaaactgaacaacctgctcctgaatgactactgggtacataacgaaatgaaggcagaaataaagatgttctttgaaaccaacgagaacaaagacacaacataccagaatctctgggacgcattcaaagcagtgtgtagaggggaatttatagcactaaatgcccacaagagaaagcaggaaagatccaaaattgacaccctaacatcacaattaaaagaactagaaaagcaagagcaaacacattcaaaagctagcagaaggcaagaaataactaaaatcagagcagaactgaaggaaatagagacacaaaaaacccttcaaaaaattaatgaatccaggagctggttttttgaaaggatcaacaaaatagatagactgctagcaagactaataaagaaaaaaagagagaaga

SEQ ID NO: 261 - DNA, 32742 bp, Homo sapiens
  source 1..32742: mol_type = other DNA
cggccgcgggcccggcagaaggccgagtaggagggaccacgcgccgggggccgcgatctctggcagggggcggtgtgccagcggagcaccatgcacataggcgcccagcgccccaactacccctcccgaggaaaagaggccggggccgcgctggggcggcggagagcatgagggaggccggggggcggctcggcttggagcgctgctagggagcggtgcgcgccgcacacccgcctgggcgcggcggagggcggggagccgggcaggtcgcgcctgcgggcggcagccgaccgccgggagctgttctgatttccgacgcgcacgctaggggcccggagcagcccccggccccggcgcgccgccgacatgggcaacgcagggagcatggattcgcagcagaccgatttcagggcgcacaacgtgcctttgaagctgccgatgccagagccaggtgaactggaggagcgatttgccatcgtgctggtaagtgcgcggcggcggtcgggcgcggggacccggggccccgggccgggcggcgcagctgacccccgcccctccccttcaccccgtgccgggagcgagcctccattcccgagggggaggctcccgctttcccctttgtggccccccagcactcctcttcacccccctggcagtcccccgcgctcagtctctcggggtcccgggatggggatgggggctcagggccggctgcccaaccagcctcgaacccattgtctggctggagaggcacctcacggcgcgtgtgcccgggaggtgcggcgtgggcgtgaagagaaggtggcgcgggctgggaggaggaggtggcgagccgcttaggctttttttttaaaaaaaacaaaacaaaacaaaacaaaacaaaacaccctgagcccctgcggaccatccctcgggcggccagcccgggacctgcgaagtccccggcagatggggcgcatgtggccggccgcgggcgccgcgccgggcggtgagcggaggcgaacttggagggctcacgtcgcggcttggccaaggggagcttccccgaaagggaaagcggagacccacagcagtgcggcgccccggcccttggcgaggagcaggggcatctgaaacccaggccggggagaacctcagcgcgttccctctagacttaaatcttaaaccacaaaaatgtggagttttgcggggacgtgttgcgagctgtcctgactgcacgggcgacccctcccctcctcttgcacgcccagccaggtcccccgctccctcctgcattccgcttctcccagctttccagctcctcaaatccaggactctgaaaactcccctctttctccctttcctgctgggacagtgtctgggcccctcccagccgaggcttgtgctgtgagctgcagagggtgtggcggcttgccccagccaggatctggactgctgttggtcccccagactaccagttttagtgtcccagcctcttctaagggatgttgggagggacacacacaggcgagattgggctcattcctactcctgacacttggacacttctcttttcctagttggttacctctaaactccacaagactaggcagcaagggaaactcgtgatccgggcagccaacgattgtgcctgcctgcgggttttcttttcttcttttgttttcatgaaaacttagaactttggcagaggactcgagttctagatcaaaaatcggttttctgaggtgtgctcagctacaggacgttcaaattgcctgccttcaggccttgaaaaaggaatggtttggtatgggaagtgatgttctggatggcaggttagctgtgtgctctttgggagaactgagctctctctcccgccacctggaaactctggtgtggccgtcggggagacagatgaggttgcttgtgttgctttgcatctcctgtgatctcccacagctgctcccaccgttgtgcaagatgggacactgaaatgaaacggcctaggcataactctcaaggcggcctgggtgcatacttgacctgcttttccagagacaaacgtttttcttcaaaaccctcttcctactagacatatggttcttacctcctggctctggctttttttcctcctggctctggcttttttgtttttccatccatgctgtggtgctctgtgtgtgtgtgtgtgtgtgtgtgtgtgtgtgtctgaatacttgtggtggaggagccagtgacacagggaaaccagtgcagcagccataataataacaataatgcaattaagttctgcttgactaggatagcatttttttttgcttgagctttcatttaccctgctgattaataacacatggtgtgaattaatctttagaaaaataatgtcccatcattaacatggtggatttgtgttcttgttaaggctagcagttgcaaatatagtatttagacaattatgattgtacatcccaagcttcttggggcagggttgttgtggctacttttacactactgtgtgtcgcagttactgggtgcaattccttttaaaattgtttacaatattctaagcctctcaatcaagaaacaaaaacaataccaggctgaccttttattgagtagagacaaagcttttgggggaccaggtcagcttgggaaccctcttcctagggacgcatttggaccattgatgcgttccttgtcccaggtcagctccacttgctctttgacaatctgtgagaggagttgaaaccttccagatcatctccgtgggccaatagaagtgcgcagtgttggtgatttctcttgttttttttttttttctggagttgtgtgtgtgataatctcaactttgcttttcttcatgagttgcttaagaaatcagttcaaaccatttaattgtggacatcaatcttgaaggacaagttttaagtggcagatttttaagtatgtatgtggagggcaatggaaattgtgttggcattattgataccagttcaactttcttgtataataaagatcatacgggtgttttgggaggaaaaccagatagtaataccgtatagaaaagtgtctaagcacctcattgtaagtatggctaacatcaataattaacagactgtttcaagctaggagaacagttcctcccaacttccagctctagaatatttaaggcctcagagagaagtaaacaaaaattaaaatgacaaaagtccattttatttcttgttaggaaagccttaagagagaacaaatctattcaatgactataccctccctccccatcagtttatatgggttaaattgtgcgaatataaaaaattagtgggtatgaatggaaatgagagaataaaagactaatgaattaagactagaggggtgaactttgaaaagtaatctttttaatagaaaaaaatggagttagtgactagcaaaaattggatcccagtgttaggagtttaatcctcccaaggataggtatcttcagtatcattatagtaatagttataaaacttacatttaagggaaaaaattactgtcttagtgtatacatttaaaccatttgcttccctgtattgacctttcaggtacagctggaaggtgagatacacacacacacacacacacacacacacacacatatatgcatatgcctttgtgtgtgtgtatgtgcaatgtttctgttatactctaacctatgtataatttatatggaagtgtttcataaattataaagtcagccacgtacttcaatctttgttcttttaggatgtaaggatgtatatatttcataggtaatattagcctgtgttttttgggggttcttcatatctgtaatagccatgtggccctccattgtatttattaaccattgtctaattttgggggttacatcaagcttgtcaaccactgcctgtgggcctcatgggcccaacgcaaattcataaactttcttaaaacattatgagatttatttcatgatttttttttaagctcatcggctatcgttagtttttgtgtattttatgtgtggcccaagacaattcttcttcttccaagtgtggcccagggaagccaaaagattggacatcctgggttacatacacacatccacaaatactcccatgtcttttatttttaaagatgatgataagaaggtggttctgggtggatgtggtgaacaactgatggtttttgtccgagaatacctgtttctacattagacactgcataatattattcactcatttttggcttgcagtcactgtttacaacttaaaaggcacacccttggatgcctttgttgaagagctatccttaaaattcttttgttgagtttcagaggaaaggacaattttaagtctgtgtcttagctgctgtatcttgtgcaatatcaggtgtcaggcagcactgcaaacagatttaaaattattaggaagtaatggtttagggcagtattatatttggtatcaggaactgctttggtatctgattaatttgagtccatttccttctcattttttttctgcatgtcctgagattgaatgtggtcattttgttttaggaaggagtgggaacattttctgagtatctactatgagtaggccttttacatgttctcatttaatgctcacagtaactaatgctatcagcaatactatagatgcataagtaatgattatttaggctgggcacagtggctcacccctataatcccagcactttgggaggctgaggtgagaggatcacttgagcccaggaattcgagaccagcctgggcaacatagtgagatcctgtctctatgaaaaaagaaaaaaaaagattagccaggtgtggtggcttgcacctgtagtcccacctacacaagaggctgaggtgggaggatcatttgagtcctggaggtcgaggctgaagtgagctgtgttcataccattgcattccagcctgggtgacaaagtaagaccaggtctcaaaaaagaaaaagatatctaagttgcctaaaattatacagttattaaataaccaatctagtctttcagcagagatttggatctgttccctactccccctggcctttcttttatattatgcttccataggcttagaactgggaagaaaaaaagggcctgcgactagcagtaaaaaattcctgtctggttagtgcaaatttcagactggataaagttggcagaaattcttcagaagtgactgaagtgaggtgcatttgaagtttcttctctttagatgtcaagccttttggcatcttcactgtgctcttctattttcaagcatggagttaaaaattgatctggtccaaaaaggtgctcttcagtttttcttttcaaggcagatttgaaataccttggctgaaaagtttgttctccaaatcagaaggaataggcaacctgtcagtgcaacgcatatactccaaatgcgaaacctgtgaaaaggaaaggaaggtcaagttgttgttttttttgtttgtttttctttttgagatggagtcttgctctgtcgcccaggctggagtgcagtggtgcaatattggctcactgcaacctctgctacccgggttcaagtgattctcctgcctcagcctcctgagtagctgggattacaggtgtgtgccaccatgcccggctgatttttgtatttttagtagagatggggtttcagcatcttggccaggctggtcttgaactcctgacctcgtgatccacctgcctcagcctcccagagtgctgggattacaggtgtgaaccactgtgcccggccggaaggtcaagttttaacatttaagtttacttcccactgcaaggtgttgctccctttcagccacttccaaggaaagcacttgccataaagtctgttaagcagatgggcgggtgggagtgtagtgaggccatcagatgctgctgatttgtattctcacattctttctcctgttgtgaggggaagagagtgtggaagaggggtggtggagtgttggcactttgaaccattacagtttcaccctaggcagtaactccctgagctgttttattctccaaagtgggaatatatggttagggctgttatcattatcaggatgcattttttcctcctaataataccagtaaaaactgtgacaatatattggggtatctaggatagaagttgatcaaatgcaaatgtttggctccaggaagagactggcaacagtgtaaagtgatgaaatttggggagagatggtatgcgtggccttaaatccgtaagtgataagaagtactttggcttgtggcctgtcatttagcattggcctgggaggcaggagacctagtttctagaatcatatttgctgcaccaacttggacaagtgaaactctttcctctggcccttggttttcctcctttgtgaatgggaataaaatttggcacaattgttaacatagtcgtgagatgatggaaatcataccacttgaaaacaaaatttccagaacataatacattgtgattcattagttgacattggcttttgaagagctttcaggtggaaatgtgtgtaggggtgttctgtgtggtctaaagagtagaattccccagggtcagtgactgaaagtcatatgagcatagggaaaaatattctaacatgtagagttgttgaaaatggatggtgagttctccgttaaagttattcagataatctgtgtgacaaacactggtgattggaaggccctttgcagcccaagaagataggaagtacattattggctcgaaagttgccctctttgaggtgagtctgcaacttgcaggttctagacatagaattataacacctgagagtggggaaagatctcctggtaggtgcttcctgggcttaaagaagaaaaagatacgtatgggctgatgtttgttctggaaattcatttgactttataagaactgttgcttaaagggtttggtcttaatgaacagtgctcttctttttcatatttagagcttggggaatagggacaaggtaaagtgggctctccagccctcaggtttaagcaagtaatagatgtcaaaaaagtagctaatacaagaagcactgattatagatgattgcccctcctttgcaagaggacgctgtaactggagtacttttaggaacaaagcattgaatccttataaaagaaggaacagcctagaggaacttaggagggaaggtgagttacaagctatacagttgcttggcagatctcatcttgtagagcggctctttatggagtgccactgccatccctgcaaataagaagtgtgtccctaggctttggagtcatggttccttagagagccttcatgtaccttcttagttctcacctacttgaacactggggacagagatagctcattgcttgtcttccctttagaattccatctgttcatactgcagggtgatcttcctccctcctccccagtgaccccttcctcctttccagaaacctgtctttcaacataaatgccaaggactatgcagtttccaactgatagcatataatttggaagcaatgtctaagggaagagctgttaggttggagagctgcctcttgaactgtgatctcaaccaaggcccggagatgtggaccagacgggcttggaattctgaaattgggcaacattcagccctatttaccaggtatgatggtatttgatgttgacagataaaaatgtacattcttttcactctctgaaaaaacaaacagaaaaacatgaccatcagtgttcactggtaggcaattatcacaaactctctatgatttctagtcttgtatagtttctaggacaaacttcatatagtttctgtgattccatgatcttcagtgttcttgtttagcctgtaattgactttggtgactctcatttcacatgtaaccttagtctccttttttctttgcagaagttctgatgcatttgtaagcccctgtaaccattgccacagaagctgaaagccttgaggtgtttagaccctgctatccccagaagtaatctcacttgactgacttctgtgcatagaagatgcccatggcttggttttgggaatgatgtcaaatatcaaatagttcatatttttttgttttgagatggattctccttctgtcatctgggctggcgtacagtggcgtgatctcagctcactgcaacctctgcctcctgggttcaagcgatcctcctgcctcagcctcctgagtagctgggattacaggcacgcaccaccacacccagctagtttttgtacttttagtagagacaaggtttcaccacattggccaggctggtcttgaactcctgacctcaagtgatccaccagtcttgacatctcaaagtgctgggattacaggcataagccaccacacccggcttaaatagttcacatttttgaccatgtgcctggtgctgggacactaacgtgtgactgatggtgcttttaaataacacatctcactagtctcaagacctgtcttggttgagggtttgctcaggaacctgacttcccttccttgttttttttctctccgtggaagtttggcagaacaccttatttaagctagaataagggtattggtaagttaaagtagtggttctcaaacttggttgtgcattgacatcacttggcgatcctcagaaagtacaagtgggccaggtacagtggctcacgcctgtaatcccagcactttgggaggccaagacaggaggatcacttgaggccaggagtcctagaccagtgtggagcaacatagggagacctcatttctactactaatgaaaattagcagatgtggtggtgcatgcctgtagtcacagcttacctgggaggctgaggcaggaggattgcttgagcccagaagtttgaggttgcagtgagctatgatcatgccactgcactctagtctgggcaacagagcaagactatctctaaaacaaaaacaaaaacaaaaacagaaacccacaaatgcctgggttccactcccagaaattctgataaatttgtctggaatgtgacctgggcatcaggatttttaaaagctccctagaaggtttgaatgtgcagccaaggttgacagccactgtgctagatgttttccccctttttcttcctaccccaaagaccaagccaatttgcctatgagttaaaaccagcagaaaacaagataatgagtgtaatagaaaagggattgtttaagaagttaaacaaaattttggatagattaggcaaaattgagaaggttgagaagagttaaaaaaatgaaagatatttgattcaactaaaagcaacaagatgaaaaaatacagaagaaaaggataaatcctgttgaatggtagagagactttatttaactatttaagaaatgaccaccaaattatcataatgaaaatttgtgagaaaattctatacatatggtgtaagattaagcaatgacccagaagtatacttctggagtagaacaatcaataaatcaattgcatttttgcttaggcctccattctgtagcctaattgtttgttggttcaatgcagcccttttgctttgatctctggttttaccatttacaaagacttgatgagcttggcttcctgtagtgaaattcaaatatacttgtgaaatgtaaacaacattcatttattaagaatcctataatcaaggcaaattggcatgcttatataagcaattagccttgagaatagaaagataaataggatgctaggtcaagaatgagctgattgttctcaatgcaagactctagttatttctttattcattataatgtaagcaaatagacattcctcttattcataatttttagcatttgtggtttggggtttgaggacagcatatgtggttttctggaactgagaggatagtagcaattattgtttcattttgatttagaaatataaatcaatcttataaggaactgtaggtagttgatttatgactagataaaactttctaataatagggaacagggcaagagagggtatggatttaaatgggaatagtaaaggataataatagttttattttggtggggaaggtaaagaagatgacaattttacagtggcagaaagattgaaaatagtctcatctgccctcattgaataaattgaataaaaaaggaataacattcttttttttattggcatagaaggaagcattatgataactaatagcaggagaagttggatatgtcatgatcagatttgcaccatggcaacactcagttttgcccagtgagttcagtactgctaaatgtcttatttgtgaaagctagagaacctaaaatgcaaaggcagtgaattgggtgaatagctttgttaggttcagttctggccctttcattccctgatatggtcacctttgttgttcttccaaagaaattttctctttggtgacaatggagtatcttgactaatcagggttctttattcccaaggacttctgcctggtgaacctaggaagccaaatgttttgggaccaggatgccataaacttggattcccagggccttaccataaagtcactctacaccaactaatttggccatccagatgcgaacctggagaagccatttagaactctgtggcctcctgggcttgtgcagcccttcctcttgccagtgtttacaccctccagtggccttttatagcagaatgtttggtttggttctcagggtccactttttggaaagcattgtttggcttagaaatctccagatcatttgtgaatttaccaggtctcatttctcatttaattaaacaagtctttaacattaaacacctatagttttttttttctttttcttctttttagatggagtctcactctgttgcccacgctggagtgcagtggcacaatcttggctcactgcaacctccacctcctgggttcaagcgattctcctgcctcagcctccagagtggctgggattacaggtgcatgcctctgtgcccggctaatttttgtatttgtagtagagacggggtttcatcatgttgcccaagctgctcttgaactcccaacctcaggtgatccgcccaccccagcctcccaaagtgctgggattacaggtgtgagccactgcacctggcctatacttttattatttcaccagtaattatcagaagttctggcagggtgtggtggctcacatctgtaattccagtgctttgggaggctgaggtgggagaactgcttgaggcctggagtttgagaccagcctgggcaacagcaagatcctgtgcctgtgaaaattaaaaaaagaaaccacacacaaaaaaactggcttagtggcacactccctgtagtcctagctacttgggaggctgaggtgggagaattgcttgagcccagcagttcgaggctgaagtgagctgtaatcatgccactgtactacggcctgggtgacaaagtaagataccctatctctaacaacaaaaaaagttccacgattgatttcctctgatgtttctaatgataatggagaaatttaaaaattctttcttggtcattttttagaatgatattacctgatcctcttttaaaaaaatcttttcatggccaggcacggtggctcagactgggtgccatggctcatgcctataatcccagcactttgggaggccgaggtgggcagatcacgaggtcaggagttcgagaccagcctggccaacatggtgaaaccccgtatctactaaagatacaaaaaattagctgggcatagtggcacacacctgtagtcccagctacttgggaggctgaggcaggagaatcgcttgaacctgggaagcggaggttgcagtgagccgagatcctgccacagcactccagtctgggtgacagggcgatattccgtctcaaaaaaaaaaaatttttttttcacaaaccagacacagttgcaaccaactcccagatcaggaatcagaatccctccctccctcttgttcttcaggagtggtgagacttggcttctggtctcccagccacagttattgctcacctgaacttactttctcagcggtcacacttcatgtggaagagagtaggccacaggattgtgccttgtggtctgactccaagtgactctaaccatgaggtttccaccacttcctttgagagcattcctagtccaagtaggcctgagcattaggaaatattgacactgcagcattttcttgttgcttttagttatatcatcattgatcaccttaatggtatttttgtttgtgtgtatagtatccctgcttttcataatactgagaagaggatattttgatttgtgttcccaaagtaaagcatgaatggggagggatggccacagagaaaatgagcatttgaaattttgggcattaatacttggaattacggatatgtaggtacaaaatttatgtgctccttctcaagtgtaagttctgacctttagcttttgttatctttcttgatgactcttgaaatattaaaaggtataagactgtgaatttcatgttctggttcaatttcccatcacagccctattgtgttattccagacattattaatagataaaatttgaggggctcatggccacgtttgttggtctctcttcttttctctgctttgtaactcctgtatccctcacagccttcttcctgaagccagctacgacttggccagacccatctcctcttctgtttctttacaagtccctaacttggaagttttttttttttctttttcgttttttaatccctgtccccagattaggcctgtgctttctctccttcgtatttttttcccccggtgattcccctgcataggatgggctctcttcgcttctctgcttactgaaactataccagccttcaaagttttctacagtcccactttttccgagggtccttacagacccacgtcagcatgggggtgatgagaaaaacaactctccttactttgatcgctttgtggtatgaattatctcttactcatgaggcacttgattaaatatcactttgtataacttctgattgtaaaatagggagatgctttcatatgtagctttgtagttgctcattacattcttagccatttgtttgtgtctttgtttcacctgccagttcacactgtgggctcctgaaaggcaaggatcatgtcttacggggtctgacagcttttacttggcttagccttgggaagggtcccagcaaatgattgctgacttgataagggaacggtgcccactgaaagaggactgggaattggagtggctgctctggatacctatttaactgaccacactaggctgactattaattgcacataacttgcctttgtgttgaaatgacacttggtcatagattcttattcatcttggtattccccttatcacttgactgtggtaggtgtccaagaatacgaaacattcagagacaacaagttggcatcatgcttccctgactccttgtgaattagcagaagaggaggagggcagtttatattttcttttttgttggagtgaggtaagtttaaatgggcagcgttctttgttttggcatgttagtgctttgctgtttgcagagtgctctccaattgtcttctgtgcttctaagggtttttttttttttttttttttttttttgagacggagtctcgctctgtcgcccaggccggactgtggactgcagtggcacaatctcggctcactgcaagctccgcttcccgggttcacgccattctcctgcctcagcctccccagtagctgggactacaggtgcccgccaccgcgcccggctaattttttgtattttttagtagagacggggtttcaccttgttagccaggatggtctcgatctcctgacctcatgatccacccgcctcggcctcccaaagtgctgggattacaggcgtgagccaccgcgcccggccacttctaagggttttaaataaatgagacaaatagggcatgagactggatggcttgaagttatataagaaggtggtgaagtttgtgatccagtcctaggtcttcatactaaaactccggggtgcattccactgtaaactaatgatgtttatgaattctctcgagttctgttaggtgctttatatgcattatcgttgatgctcatgacaacttttccagggaggtattgtcttccttttactaatgagacaatgggctgagggtgttaacgtggccactacccaatcctgggggcagagtttgaatccaggcctgcctgagacagcctgcttctttctactgcactacactattatgttttctgagttagctctaagatgtcattaaatgtatgcttcttgttcgttcttcacataccctctgtactaaactcattatttcatacaatagctgctttgaatgagtccaacttgtgttatatgctgcaaaatctgaccttaatctcaagggactcaggatgtagctggggaaacaagcaacaataagcaacccagagagcttcataatcagtgtagatgtagatatgctaagggtttggagggaaggtgccttttctgaattctgagtgttcagaaaatgtttccttggaataggaagtaggtgagattctagctcagtcccaaccactgctgggctgcacttttcattctacattgtgcatttttgctcctttggtgcttatatgctttattcagacagtccaaaaaatatttcttgagcgtttactgtgtgccaggcagtgttgtaggcactggaggatgctgtactgaggtgggatcgattgaacgtctgctcccaaggaatttacattttaatgggagggcgtagagggggaagccagacctgaaggggatgcacaggtacagaaatggagcgtttagatggtggaaagtgccatgaggagaataaaatgggatatgtgaagtggtgtcatcccgataaggtctgagtgaggaggagcaggcagctagtgtgatcaggtaagagccctcgggagggaggagtagccagagtacgatttgtttctccgtttgctggttcaggagcagtttccagggaccctggagcaagtgaagggtcattccacagcatatgggatatactcagcccagacagcttcagaccttgcccatgggacagcctcaaggtggaggctcaggagtctgtcccctcactctgttgtcggtaacagagccatttcttataggtggttttgtgtagtcagagttctgcctcttgttaaattcaggtgattttcaaagaaatgagtatttcagaattgccattgttctagacccatgggacagactgtttgagaatggactgtttgatcagtgtgagctgtgccctaaatgcaggcactctgaaggccagtacttagaatggctttctttgtctgcttgaagctataggttgacctgggacaggcaaggtattacggaagagaattactttattgctgttaacttgctactagcttgtagctcagattctttccctctttttcttttttatatttcctttacaaaattattgtattttaaggggcatacaagaattttacaaagaaggctgggcacggtggctcacgcctgtaatcccatcactttgagaggccgaggtgggcagatcacttgaggtcaggacttcgagacccacctggccaacacggtgaagccctgtctctattataaatacaaaaatcggccgggtatggtggcgcgcacttgtagtcccagctacttgggaggctgaggcaggagaatcgcttgaacctgggaggcggaggctgcagtgagctgagatcacaccactgcactccagcctgggtaacagagtgagactctttctcaaaaagaattttataaagaggtgcaattcttaagataaaaataaagtgaaagttgtgtatagttaaaattatcccaaaaatacctgaagttgcccatgaaagtacatgttcaattctgtagtgaaacaaccctagaaagcaattattatttcttttaaattttactttaagttctgagatacatgtgcagaacgtgcaggtttgttacataggtatacatgccatggtttgctgtacctatcaacctgtcatctaggttttaagccctgcatacgttaggtatttgtcctaatgctctccctcccctttcccaccaatcccagcaggttccattgtgtgacgttcccctcccggtgtccatgtgttctcattgttcaacccccacttatgagtgagaacttgtggcatttggttttctgttcctgtgttagtttgctgagaatgatggttttcagcttcatccatgtccctgcaaaggccatgaactcatccttttttatggctgcatagtattccatggtgtatatgtgccacattttctttatccagtctatcattgatgggcatttgggttggttccaagtctttgctattgtaaatagtgttgcagtagacatacgtgtgcatgtgtctttatagtagaataatttataatcttttgggtatatacccataatgggattgctgggtcaaatggtatttctggttctagatcctggaggaatcaccacactgtcttccacaatggtggaactaatttacactcccaccaacagtgtaaaagcattcctatttctccacagcctcaccagcacctgttgtttcctgactttaataatcaccattctaactggcatgaggtggtatctcatcgtggttttgatttgcatttctctaatgactagtgatgatgagctcctagaaagcaattcttatgcgtgttaaagtttgagaacctttaagcatgattaaaagagaagccacaaaagaaaagtgggcaattctgacttagaactctcagacctctagcagtgactggaggatgggtgggaattttggtatcttcctgcttgccagtaggtttacacaattcgatatcagaataagtctttaaatacatattagtggctttgtttattgtgaggattttaaggtagccctaatgtgggtttaaatgtggatttcatgcatgttcagtaataatacaatataggtcacttgtgtatttctttaatcgtttcagtaaacatgaatggtagctcaggaaacctgaaaggtaggtatatccctgtctcatatatgagaaactcaggattagggaagttaaaaatcttacctgagaacacatatttctagtaggtaataaagctgaaaatcaaatttctcgactcaaaagccgtgctcctaacattctgttttgactcccaatgcaaaaatattatgtaaatataagctatatgtagaataaatataaatgtttcaaagtaaattgacagccttgtgatggcaagctcatcatcttttcagtctgtgttcattttgttatatacccagaaccaacagtaactacatatccttcagaaaaattacagataaaatgagaactggatgaataaagccactgttcactattgaaatagtaaaggccaaataagcttgtgatcaaatcttttttttttttttctagtaacagttgtcctctgaaggctttctgaaggctctctttcagacaactgtctctgaacctttgtttttttaaatgcccctagtaaaatggctgtgttgttacagcttgaaggctgtgtggtaagcctttgctcagccctcagtgataacccatagacttggacttccatgtgagaagaacaaccattattatattgtgttagtaggccttgtgttggagattgcttatttttaaaaaaacaaatgccatgtgatcttatttctatttaaccaatgttttgcttgagtgtaccaagcaaggcctcttgagatgctgggacacaaaggtgaattttattttcccttttgcctttgagtagttaactgcctagtagatgagatactggaggtaagagaatgaagattataggatatttaaaggcatttatcatacatatatgtgttatgtttataatgtgctatagaaggacatattaaagttgaagtttctaatattttagattaagctgataaatctagacaacttactttggctgaaggttataatacataattgcatgaattctgctctgtgcctgaatgcttagagatttgagtgtgtgtctaggtatatctgtgcaaacaacttggaagaatctggtaaaaagtattaataccaggatcagccttttaggtggtaagagaatctaccccaaaggcagtcgactctaagccttacttctctaggttgcaagcatcagaaagtaagtatatgtccctatactcactttgttagaaagcccacagtcttttctgcaaagtctatttaacaaagcttgtttatgatcttggactttggactaaacctgagtttgaatcaggattttgctgcttactaattgattgacctttctaagccttggtagccacatccgtcatgagctcaagagctacctttttgacttgttatggatattaagtgatattgcttagtacagtcaagttgtggcagtcaggtaagcacctcacaagaagtggttgttctgattattttgtactcttttaaaatttgactttattaaagcactggctttagggtccaagctgtggactttaactggattctagtatattttacaggtaactttagttaaatcatcatcaacctcaaatgtgaagaacaagtgaagcagggcccccagaacgcccagaattgaactaatggtggcttgtatttgctactcttgccataagattgtacctactgaccttctgtgatacatcagtgttttcaaagttctggtccatgcatgcagccccacttggatttatgttgactcttgtatattttgttctttctagaaaaagagacccaggtgtttcagggcattgggctattccatttcagagcctaatggaagtgctagtgttttcataattggaacagacaactgccatgctacatatggtgctgtgaccactgagcagcttgttcacaatgagaaaatacattgaagttgtgaccatttgagccttgaagaaactgctgttgaagttttgtttggctccagctccatcctggaatggatggagtcatttggaattattctgaattccagtagtggcaaaaaaaaaaattgtgtaacttgtatatagatggttttctgtttgattaacagcattgttcaataaaagatgcattgttttaaatcaagaatacggtgccatctgacttgatctaggaggcacagaaagaagacattacagattacattccccagtaaacccctgcgttattttttccagaaggttctatattaatctgtttgggttgcgtcctacgtgatcttgctgagtcagacagagctaagcttatgaaacaaaggctagtcccaaatcaaataaaaacacaccaccatccagaaatgagagcctagaattttctaaagatgcacacatctttcttactatctggtgaggaaaattgctcatttttctctcagctgataaatatcacttttgccctaaatttttgtagtggcaatctacttttttaagttggtgagataaaagaatatttgatagcactgtcagactagtctgagataaaattctctgtgttctcagacccttaagggttcttaaattgcatgggcggaagctgtgtgcatgtttttcttggtgccctatttccatatcaaatagccttaatttttgtattttagtaatgaaggtatgaacccattctgtcaggcttcttatgccgtttattgtagcctttagtcagcttagaatagcatgaaaggaagtaataagccaactctaagaaggtccagatgaaaaggattataatatggtacaaaaataatagcatgcctggcctagccatgtgactcatttcttttggagtattccttttgacagcttttttgaatcacacatcaatcacaatgctggtatttttggcggggtgctagacgttactctaatgctcatgatggtaactgccaaaagtgaacaaagaggagaattataaatgaaacctaacagcatcacaaacatttattttttcttgagcagaaacaaaattgggagttagatgatatctttttcattgccccaagaaaaccactgctttattccattgaaaataagaccttgatgggtcatccccggtctttggcagtagaaactattcgtcttgtcttggtttccattcaggagctttccttcccaaaccttgtcccctgctttaggagtaatttttttagggctttaggtttttctcatgtcccagtgactaagcttgcttttgggtggttctctgtgctgcatgtagtccttctgggaagaaactcccatgaagttcaaaggagcagcagatatgcagggtgcatctagaaatgaaaatctgaccctttgtccctctccttttcatctctcttttgtacaggccttctttccttctgtgcaaacagacccttgtcatagtcatagtccatcacgctgttaaatgatttccagcactgctctatgatgtgctgtaatttcagggagtagttttattttctacaacatgttgctctgtagcacgtgtatttcactactgagtggtagttctaatggacatattcttaacaaaatagtcccagcattacagaatactaggttagaatacatacccaaataaataaaatgttacagacacagtccaagctcgttctctcctgacttcctttctcccgctacagaggaaaattaccccgaattggcacatctcattcctatgcactcttgttaaaaataacttatagtttgcttctgaatttatagaaatggcactataatccatatgtacttttgaatctttatacatttgatttgagaagtatttatgttgatgcatgtggctttaggtcatttattttattttgtttatttttttgagatgaagtctcgctctgtcacccaggctggagtgcaatggcacatggcaacctctgcctcctgggttcaagcaattctgtctcagccttccgagtagctgggattacaggtgtgcgccaccacgcctggctaatgtttttgtatttttgtgtagacagggtttcaccatgttggtgaggctggtctcgaactcctgacctcaagtgatccacccacctcagcctcccaaagtgctgggattacaggcgtgagccaccacacccagcctggctagaggtcatttaatttttgaattatgttcattgaataaatgtgccataaattacagttgatcctcattatatgtgaattctggatttgcaaatttgcctatttgataaaaatgtatctgtaaccccaaagttaatacagtgcttttatggtcactcacagaccacaaagtggtgaaaaatttgtcaccagatgtgcagattctcagctgaggttgaacaaggtgactctgcttttttgtttcagcatgcatactgtacacgtgtatcctttttgctttctatttagtgccacactttttgcacttttgtgcttttttttttttggtgattttgctatttaaaacagacttcaagcataatgctgaagtgctgtccagtgttaactaagtgcaggaaggctgagatgtgccttatggagaagatatgtatattggtaagcttctttcatgcatgaatttagagagctgttggctgtgaggctgtgagttcagtgttaatgaatcaataatatatattaagtaatatatataacgataaatattaaataagtttaatatataacgataaatattaaataagtttaatatataatgataaatattacataagtttaatatatcacgataaatattacataagtttaatatatcacgataaatattacataagtttaatgtatcacgataaatattacatcagtttaatgtatcacgataaatattacatcagtttaatgtatcacgataaatattaaatcagtttaatgtatcacgataaatattaaatcagtttaatgtatcacgataaatattaaatcagtttaatgtatcacgataaatattaaatcagtttaatgtatcacgataaatattaaatcagtttaatgtatcacgataaatattaaatcagtttaatgtatcacgataaatattaaatcagtttaatgtataacgataaatattaaatcagtttaatgtataacgataaatattaaatcagtttaatgtataacgataaatattaaatcagtttaatgtataacgataaatattaaatcagtttaatgtataacgataaatattaaatcagtttaatgtataacgataaatattaaatcagtttaatgtataacgataaatattaaatcagtttaatgtataacgataaatattaaatcagtttaatgtataacgataaatattaaatcagtttaatgtataacgataaatattaaatcagtttaatgtataactatatattaaatcagtttaatatataaaaataaataagaaacatacatagcacagttttatgtattgatcagttgacaaaaatgttgcaaccagaggctctggggagcctaaccgtgtatttccgctagaactaatggttcaatggtcaataattcagtgtccatggtgactttatagaccataactgtgatggttaatatcgagtgtcaacttgattggattgaaggatgcaaagtgttgtttctaggtgagtctgtgagggtgctgccaaaggagattaacatttgagtcagtcaactgggagaggcagatccaccctcaatctgggtgggcaccatccaatcagctgccagtgtggctagaataaagcagacagaagaagatggaagagctgattcactgagtctgctgagtctgccgagtctgccagccttcatctttctcttgtgcccaatgcttcctgccctcgaacatcagactccaagttcttcagcttttggactcttagatttacaccagtgatttgccaggggctctcgggcatttggccacagactgaggcctgcactatcagcttccctactttagaggttttgggactgggactggcttccttgctcctcagtttgcagatggcctattgttggacttcaccttgtgatcctgtgagtcaattctgctaataaggccaggcgtggtggctcacacctgtaatcccagcactttgggaggctgaggcgggtggatcacctgaggtcaggagtttgagaccaccctggccaacatggtgaaaaacccctgtctactaaaagtacaaaaattagctgggcatggtggtgcacacctgtagtcccagctacttgggaggctgaggcagaagaattgcttgaacctgcaaggtggaggttgcagtaagccgagattgtgcctgggtgacagagcaagactgcatctcaaaaaaaaaaaaaattctgtgaataaacttccttcatgtatacatatatcctattagttctgttcctttagagaaccctgatgaatacaataactactgcaaataatgggagtcaactatctcttgtcatattgatggacatatgaggttattacaagtaacgttacaatcaaaatccttgtctatgtcacctgatgcacaggtataaatttcttaaggttatatattaacacttagaagtacaattgttgggtcttgggcatattcaacttaagtgattagtgttgaagtgctttctaaagtggctatatttccttgatgaagttggtgttagagaaattcatccccacagtgtacacagattgtacctacatattatgaaattagcaaaaaatttttagtacctacatggcactagatgtgagtactaacagtgagctgccatctaggagcttacagtgtatttccagtgataagttttacaaacataaataaaattattaatagttgccatccattttaaactttacctttgagatgaatatagattcggattgtttgtggaaagcttaatataatagcagctaatatttatagagtctttttttgtgcttttaatgtatttaatcttaacaacaacccaaggagataactgtaattaattccatgtaacctaagaggaaatttaggtgcagagtttgagcaacttgcctaaagtcacacaataaatgacagagtcaggatttgaatttgagtcccctggctcctaagtgcccaatcttaattgttgtgctatatattcatcatttaatttcacagttgtagccgttatctaagaggtagcctttttttttttttcacataacaggtaaaaacaactaaaggaactagggagagtcaggcattaggaagttaagtgtggagttgatttttttaagctggggcagtggtgagacagaacatacagaggatcatcttggcttctatactgattattcaatctgtctttgatcttttggtgggagagattcttagtatccctgtgtttttcaccaccctttacaaagccattgagcaattttggaagaaggggaaaatttgtgtattctgtttgtcctggtttatttgctcaaatgggggtttctctacttctacaagagttgttttaatcttcactactttttgagggcttttactgtgcgatgtttcatgtgtatttctcagaacaatcctacggtatttagtatttacttagcaagtagttgagggattttggctggccactctgacgtcatttgaactaggcacacattcaactactctgtcctcttttgtcgaagatagtgagagtggagggcctggagtagatacaagttgggaaagtgacatccttcaataacaagcttgtaggctgtaaaccacaaaggatggcttattgaaatggaatatcactattagtttctcattatcctgtcagaaaagagaaattgcaactaaagcataataaagggggttttcgaagccacaaaccgcatctttgctcttcagatgtatcttacttgttgaatagtaagtgaatgagatttatgaaatgttcatagtaagatgactgagaacaattgtttctccattttttagaatcagttgcttctttttcttttttcctctctttttctttcttcttttcctcttctcttctcttctttttcttttttgacagagtctcactctgttgcccaggctggagtgcagtggtggaattatagctcactgcagcctctacctcctggcttatgtggtcttcccacctccgcctcctgagtagctgggactacaggtacccaccaccatgaccagctacgcttttttttgtttgtttgtttccctattaacagatggtctgtatgctgtcttctgaaagtaaatactcatggcctactctgaaggaattaagattattctttgaataattgacagcgactggtgctaaaatatattttacatttatggcccagtatatataagttctgtatattcaaaggaaatcaaaacaagcttcataaaacaattcttatctttatatgtgaatggtattgcattttctataccattctattcttttaaaacatgttggtctgacttattttaggtggaaaagatgtactacatgataattaaattccagaatttatttgtaatacaatattgaagcaacctggtcagatataatttaaactctttgctcataaagctcacactgaagaaagggtttactctttggatttgtttataagacttcttaagtcttgctgagttgccaatatctattccttgtagtaattgctaagattggaaacatttgctttttcaaatttttgactgcataataaacagtggggaataattaagactcaagaagatactgagaaaagggctaaattttagcaggcatactaatatatttgggtctatagtctcattttttttccaggtaaaagcatttatatggaaagtactacatttgtaaaaggcttttttttattctttgataacttctaatgtgtatctcttgagttttgcatatgttgtgagaacttggataatgataataatcaatttttacaaacttctgtttgaaatttagtttgatatggtcaacttaatttttactcacttgaaaacttccagtaaaatatacatgaaaaccaaaaacacagggcagccttttggggtgtgtgttctaaattgtggcttatttctggggctttttatattgtttcaatatactctttcaccttgctaataactttatagataattatccttgtttattgtctgtttctacctacatctgcgcctcttgacttcagtggcaaaataatatcacaacagaaggtggtttgatattttgtttctaggtgtctacattttacatggtaggccacacaagatagcatcattctcataaaatcatccattttcttggttttagctttctgattaacagtttaactatgaaagctggaatgacttaaactcaggggttttaatccagctttgccagccatgtccttaagatcccctgcattttaaccccaccatccgcaaactagattaactatcactgttaccgtcttagagcattgatatgggataaatcctccaaagggcttttgagggaaatgttttatatgtaataatgtgggatgaggaatatgaggaattacactcattttagtcttgttactataaagttatcaaacagaatatgacaagttacactcaatgccaaccatacctataaatactttttttcccattagtacacataatatattctcattgtagaatattagaaaacaattaggaatggaagacaagaacatttctaattacaatgcccagctataagcactgttaatattttggtatgtattcttccagtatggttttgtttagctacatgcatccacatcatgaacatactttcatatctttaattagaacttttgagtgtttgcaaagtgttacactaatgagcatttcagtttaactagttccttattgtttgactctcgggatggttgcacacttgtgttctgaacatacttgtaactgagtcttgacatacattctaaatcatttcttaggatgatatcaagtacagtgtaaagagtggtgaaaaataacaaaatgggcactaggagaattagatgtaagttttaactttgcctttaattgttgctgaaacttttaaatcactttcttcgctgggcttcatttcccttcctagtaacagaggtaaaatggagtaacccctgtagaggatttaattctgactgcaaaccatttgagatattttatggataaggaaactaggactgaaaaggactctagtgtctctttctctatgtttgaaggttttatcgccccagtcccccaccccttgcttgcttttttttttgtgatagtgcagaaggtcctgagtgccttgtggttctttagagtcatggtcataatcatccataatcattgattattgattaatggtgtctgaagctgattctattttgacttaaggagacccttttatggacaaaatatcacttaataccttattaactttaactgtttccttcaaaatcaggagtcccagcaactgatgactagataaaccaaatgtagtatatattcatacaatgggatattatttggccacagaaaggaatgaagtgctgatgcatgctacaacacggtgaatctagcaaactacgctatgtcaaagaagccagtcacaaaagattacatattacatgattccatttatgtgaaatgtccataacaggcaaaactatatagagggaaagtagattagtggttgcctagggctagagaccctgtgaggattggagtggttgatagctgaagggttcaaggtttctcactgaagcgatgaaaatgttctaaaattggtggtgatggttgcataactctgtgaatatactaaaaactgtcgaattgtgtgcattacatgggtgaatcatatgctatagggataactcaataaagctgttgtccccccaaaacaaaaaataatccccaaataatcacactgcaaatgattctgaaaaccttttgtttcaagtttctagatgtttggattataactaaatggaaactggtcatattaaactccttatgtgttgttagtttgtttcctgaaaatcttagtttaaatcccaatgtatgaggatgactgaattctattttcgtttggagtttcctttggggacttttactaagatacttgctaattgcaacaatttatgatctctctttctcgtttctcagtgtttctgaagtgctttgtagaataatcggattttggtatcttcagtggcaggctcagtgagtttttttcttttcttttttttttcccccccaagacagagtctcgctctgtcgcccaggctggggtgcagtggtgtgatcttggctcactgcaacttccgcttcctgggttcaagtgattctcctgccccagcctcccaggtagctgggattacaggcgcctgccaacatgcctggctaatttttgtgtttttagtagagatggagtttcaccatgttggccagcctggtctcgaactcctgacctcaggtgatctgcccaccttggcctcccaaagttgctgggattacagatgtgagccactgtgcccgactgcagtaggctgagttttctacttggtgtctggcacctgctagacaatactctacatgaatattttttgctatagcagaccccaaataacttagagttaatttgatttttttgttgttggtggtggtgtttatattggaattcatggcactgagttttgttttatttgcctgagtgtattcttgagttgctcatgaggtagttgcctgagagcctcagatactcctctattgggacacttcttctcttagatatattaattacagacaagtgagttgagccagagaaagcagaagtagggttaagaattgagtgtcttggaaatccagactacatttggtcattttcaatgaaattttcacatcctttaggagtttcacatccgttaggaggtttgtgtgtttttttttttttttttttttttttttttttaccagatccttagatattaaggttaaaatttaatcaacaaattttgttttttatttacagagacctataggatacacatggagttattaaacctaaggggtgaatgaaaagaaaaatgttggcagttctatcttaagtctttattgcctgcctttgcatgttgtcatgatattagccagagaaccaggcttttaaacccaaacattagtaaaccgtaaaacatatcttgagacaatctagtgcaacaagagcaaatttggcagaatttctgaagcgattccatgaccagtatttccaatacattaatctatttagatatgctttgggtacttttcctggcaaaatggtaaattgtgcaactggcgattaactcagatcttggaattagcctgtgactttgatcttacataaataagtttcctcagtaaagtttttgtttagtatctgaaatccagcttttttcaagagagcttttagctggactatcttctgtattgatactgagaattcagaattctctctcatgagtgaaatttgttaataagttcttgagagattgagaggtcctgtccttctgtctagaacacccctcctgcaaaccctaaataatgccttagttaagctgaagattcggaaaattgagatataacatgaagtaaaagtatttttgaagtcttttcaatccacctatgtattgcacacctgtgtgcccagcacataatatatgattatccatttagtgacaatgtattgggtgaccatggtgtgctgggtactgtattagagtataaagagatgaaaagacaatgtctttatgtagttaatgctataataggaatatgtattaaatgggagcctagaggtgatacatgctctttggaggcagagattgacgaggaattagaaaaggaacttaaggagagttgacttgaattggagagtggaagatgaatgtaatggcttggaattgaggagaggtggggagcagttttgggaggaagtcattctagggaaaggcacggtggtatggtgtgttttgaaagactgcatatagttgctatggctagaagaacatagtctctgtggatatggcaagagaagttgtggtcaaacttatgttttagaaatgttatttaggagtaatgctgggatggcttagagtggacaaagacagcccaatcaaaagtctcctgccatgaccgggcgtggtggctcatgtctgtaatcctagcacttttggaggctgaggtgggaggatcacctgaggtcaggagttcgacaccagcttggccaacatggtgaaaccccatctctacaacaaatacaaaaaattagctgggtgtggtggtggacgcctataatcccagctattagggaggctgaggcaggagaatcgcttgaacccgggaggcggaggttgcagtgagccgagatcacgccactgcactccagcctgggcgacagagcaaaactctgtctcaaaacaacaacaaagtctcctgccataatcagacagtcagcagctatgagaatagataagataggtgtctggaagaatgaagaaagggagaccgagaattggtgcctcaaaagaaaggacaggacttggattcaaattgatccttgtttgcatcagggactcctgagattcttatgaaaaccatagccaagtgcatatacgtatacccatgtaaaaattaacatgtagtagcagaaacccattcacaggctttcagaagtcatggatcccaggtttagagcccttgatctgtagaatgatggagagaaaagagtcagtaacctccatgtttactagagcccagaaatttggaagattactggtgcagccgacagattgggccagttgggtcatagcaggcaagatgaatacaattttggatgtattgagatttccccataagaatgagaacagtgaattgaacaatgagaacacgtggacacaggaaggggaacatcacacaccggggactgttgtggggtggggggaggggggagggatagcatcaggagatatacctaatgctaaatgacgagttaatgggtgcagcacagcaacatggcacatgtatacatatgtaacaaacctgcacgttgtgcacatgaaccctaaaacttaaagtataataataataaaaaaataaataaaatttaaaatgtttgccaacaacaacaacaaaaagaatgagaacagtgcatttgcctctgctgaagtgcttattgaacacctgtgctaaagagctcctgatgctggattaattataataacatacacttgaccagatgcagggtctagataagcaaaaataaatattaatcctactagagctgtagcttgaaatgtagtgtaccctggtttaaaatgctgtaaatggccaggcacagtggctcacgtctgaaatccccgtactttgggaggccgaggtgggtggatggcttgagcccaggagtacaagaccagcctgggcaacacggtgaaaccccatctctagaacaaatacaaaaattagccaggcttggtggtgtgtacctgtagtctcagctactcagggtagggggctgaagtggaggattgcttgagcctcggaggttgaggccttcatctgaaggatggaggtgagccttgattgcaccactgtattccagccagggcagcagagtgagaccctgtctcaataaataaattaaattaaatgctctgagcaatggttttattttgcttctttagtttaggaggctaccctgttattgtgtgtgtgtgtgtttgttttttttttttttcccagatggggtcttgctctgtctcacaggctggaatgcagtagtgtgatcccggctcactgcaacctccgcctcctgggttcaagcaattctcctaccttagcctctcgagtagctgggattacaggtgcctgctgccactcccagctaatttttgtatttgtggtaaagatggggtttcaccatgttgaccaggctggtcttgaactcctgacctcaagtgatccgcccaccttagccttccaaagtgcacatttagtaggcattgacagtgttaatctttgagtggaaatagctggagaatactccgaataaggctgaaaaaatgtgggattatcacatttaagagggccctgtttctatatacttaatgcttttgcactgaaatgtttgatattttagttgacagcgttcttaagcaataattttggcatcagagaagtcacttagataatttcttggatccccatgagcactggtaatttgtagaacaggttgaaaggggattgtgaaaatagtcagtcttaggtgtgtgaggtcatcttgtctcgcttcctctccaccaggttaaaaccacacctcagggctccaggaagctgactgagcacgtagtccaaagaaattttgcattctggtatttttcagtgttttcttgtgattttcatctttaagctaatttgttgagaagggcttataggatttgctctctttgggcaagcttcctcatcagtatcaatggctgtagtcatgcagtcctgttgtgaccatgttcaactgaattgacaactaatatgtatcacgccacaccactctgcggttttgccctttgtaaatgttggcttcatctgggaaattgttagaaatgaagattcttggttcgtgttcttg

SEQ ID NO: 262 - DNA, 32742 bp, Homo sapiens
  source 1..32742: mol_type = other DNA
agtgccgcctcacagtcctgccagagacaggagacgccgggccgcccgcgccgtctgtcccaagagctcctcctggacatccgcttgactctccgtcgtctccaattggccgtcggggaacggaagccgaagcaaactagtgaacccggaagtgcttcgcggcggaggcccgggcaactcttttgaatggaatcgggctgattcatcgccggtttgcagacagagccgcgtcgggtgtgcgccgctgctgctgttgcctctgtcttcgcgtcaccacagaggcaagacaagggtccatatcgcggcatccggctcccgcccgtcttcaggtaagacccagaaggcaggcctgggaggtctggggaggcagccgtgctaggccgccgccagccccgtgctttcctgagtcacgttgcccagctgagttgccacaggaggcctgggccgcgagggaggagcccggcctccttcattctcttcgcctgctctcagggctctctggcagggtcaggtctggatgtcgcctcctttctccattcttttctgtttggccgaattcacatcatgggaacctcttccatctatatagagagaatccttgtttatggcctgtttgtctgtgctctatccatagttgttaaccggtctgctttgaagtttttcaaagcagaccgggaaaacaagggagagagagtagaattaactttcccattgaatacgtttgttttatctcttgtccttcctgtaagccttaaccctttttctgttagtgttaggttttcagctccctccaaaaagtaaacaaaagtcctgcagatacactgcttttggaccttgaatatcttaaaaacaaagtgtgctactatggctgttaacttactttcaatatcatactaattgagtaattgttggtaaattgattacatttctcgttttaagtaaagtagaaatctgctaccgtatgttacatcttgcaacttaattttcctggggatgtagctctgtgtctgtcaaaagaaaaagaatgtaaacttttgagtctataaacctagtgactgaaggaaaaattctcgagaaaataaatggtaatataagttgataaaatattatggaaaggcaggggaaagggtttaaaaatgagcataaaatagagttatagtgtgaaagtgattttgttccactggtcacaagtgtttttttagtgcttctgacttaatgtgtttgagaaaagcagcaagacatgcactgatactgtagaaataacaaaaacatgaacacagttttagtggagatgattaatataatggtggccttcctgtcacgtaaggctacctaccagctgactcatttgaagtttagaggttaagatatatagtggttctgaattaactacagttaaggtgtgtttagtgaagtgctatttagtgaaaaaggctaaatgttgtcttgaatttgtccctaaatcttgccaagggaagaaagttttcaagtgatgatcttttattgatgcttcacctgttgactttgggagtttttggttttttgtttttttttcagcctaaagtgcttggtaaataatacattgccattttaatttaggccgggtgcggtggctcacacctgtaatcccagcactttgggaggctgaggtgggcagatcatgagatgatccagcctggccaagactagcctggctaacatagtgaaaacccgtctctactaaaagtataaaaaaatcagccgggcatggtggcacgtgcctgtattcccagctacctcaggaggctggaggtggaacctgggaggtggaggttgcagtgagccaagatcgcgcaactgcactccagcttgggcaacagagtgagactttgtctcaaaaaaaagagaaaaagctgaattttaatctgtttgacatgggttcatcttattttcatactggccatgtaaaccatgtgcttgttaatatatagtttgtgaaccatatgtatgaaagtcaataaatattattgctgttgttattgttattatcttagaagtggaagagattaatctagtcctcttatttcagtaacaagaagcaactgtgcttttttaattttcaattttgtagtaacgttcatttaataattcagtgtccacctgtgaaagccttgcctgaatatccatgtgatttcttgctcaggaacttgtcatattccctgtttgttgcagtcattttgacatttcgtattctgctttgtgtgtgatactttggtgaccttatttgtgaaatgggagaacttgattaaataatctcttctagttctaaaatgataataataacaattataacaagaatagcaacgacaacatttattgagtaccttggatgttccaggcactataaattgctttggacgtatttttacaacagacttgcaaagtagatgttatccccactttataaatgaggtctagagtctagaagagggtaaaaattagtgtcatatagtgagtaggtggtgacgccggattcaaattgaggtcaactggttcaagagcctttttcactctacactgctgtcctttccctttacatattttttatgggtttgtgtcaagctgcttctacccacctgccccgatagattataaattctctcagtgcatgccactaaatttcttgagtcagccctccatatctttgggttccgcatctgtagattcaaccaactacaaattgaaaatatttggaaaaaagttgcatctaggccaggcgtggtggctcacgcctgtaatcccagcactttgggaggctgaggctcaggatcacctgaggtcaggagttccagtctggccaacatggcgaaaccccttctctactaaaaatacaaaaatacaaaaattagccgggcatgggggcgtgtgcctgtaatcccagctactggacaggctgaggaaggagaatcgtttgaaccttggaggcagaggtttcagtgagctgagattgcgacactacactccagcctgggcaacagagcgagactctgtctcaaaaaaggaaaaaaaaaattgcatctatattgaacatgtatagacattttttttcattattccctaagcaatatagtataactatttgtattgtatttaattgtattagttattatgagtaatctaaaaatgattttaaagtatataggaggatgtgcataggttatatgcaaatagggtactatgccattttatatgagagacttgtgtatccatgattttggtatcctggaaccaattccccacagatacagatggatgctgaaattaggagactccataatagattattatgatgagtctgttctcactcttccttttttttttttttttttttttttgagatgaaaccttgctctgttgcccaggctggagtgcagtggcgtgatcttggctcactgcagcctccacctcccaggctgcctcagcctgcctagctgggattacaggtgcctgccatcacgcccggctagtttttatatttttagtagagaccaggtttcgccatgttggccaggctggtctcaaactcctgacctcaggtgatccaaccgcctcggcctcccaaagagctgggattacaggtgtgagccaccgtgcccagccaccattctcactcttctaagttgcggaaatcttgctttcaaaatcctatttatataattaaatttaatgttgactcactcacgatcttccactggaaaaaagtccttaagaaagtgagaatatgaagttttaactactttgcacaaataagaaaacagaggaattagaaatacagtaagataacaaatacggagtagcttgaaaaggattgagcatcagtctgaaaagtaattttttttttttttttgagatggagtatcgttctgtcacccaggctggagtgcggtggcgcgatctcggctcactgtaacttccaccttctgggttcaagtgattctcctgcctcagcctcctgagtagctgggattataagcacccgtcaccacgcccagctaatttttgtgttttcagtagagacggggttttgccatgttggccaggctggtcttgaacccctgacctcaagtgatctgcccccctcggcctcccagagtgctgggattacaggcatgagccactgcacctggccaaaaattgatttattttaaatccagcatggacatgatctagcaatatcaggttctaatcagacataaagtgagaaagaaaaagtggaaagtaatcaacttttgaaagtactgataccttttttgtactatttttaccagttaggattctaaatattattgtatgtatgacattatgttaggtataaacactttattcatattgtctgataatattttccataaagttaattatatcatgaatgagcttttgagtcttctactttttgatagctgtaaaaacttggtttagatccatcgacctttttattgcttttatttctaagaattgaaagtgttcccttttatgttaagtataacacattcactttgtgagtctttctgctaaattctgcgaaatgcaagtccctatctccagtgtgatttagtaatgtgaaatatgcccagcattttgaaacccagtaagtggcaaactatgtgaggaagaaggatctgtgttggtagccatgctcaggatggggttgccaatgacagtagctagtgtttattatatgcttactatatgataagcattgtgttaaatgtttttttttgtgtccattgtttttgttaatctaaacggctctgtgagatagatctccattttgcagatgaggaaactgaggaggagagaggtaatttactcaaggacagggaacttgtaagtgtcagagccagtatttgaatctggcactctgactgtagagtcatagtacttgactctcatgtaccaggcaaaatagtcattagtcatcgccatttaccatctaggtccagtagaccataaaaggatagtgaaaaaacaactgtattagaaatgttagtaaagcttaaacatagcaaatacaaatttttattttaattaattaattaatttatttatttttgagatggagtcttgctgtgtcgcccaggctggagtgcagtggtaccaccttggctcactgcaacctccacctcctgggttcaagtggtcctcctacctcagcctccccagtagctgggattacaggcgtatgccactatgtctggctaatttttgtatttttagtagagacagggttttgccatgttggccaggctggtctcgagcttctgacctcaagtgatctgcctgcgttggcctcccaaattgctgggattacaggcatgagccaccacgcccagcctaaatacaagtgtttattctgtattttcttggttttgaaggtacatatatcttcatatatcatcctttgaatgggcatcatggtttgaatgaactgctcatcagccatcatgcatgaacctagaacatacttgtcttgtgtagatcagttctgtatttcaaatacatttctagtaggcgctagctgattacttctggttcttgtatttgtcatcctgtgtgtgtgtgtatgtgaaaatatgcatcacataaaatttactattctaactttctggtgtacagtttagtggcattaagtatattcacagtgttatgtaactgtcaccaccatccatatccagaattttttcatcctcccaattgcaatatttttgaaaacattgagagctcataattttgttgaagataggatggccatctttccttcataattgcaaaacatttatatttttagatttataggcaccatttagaattagtccaatgatttttaaaatttctacattatccatttccttttattcacatttgtgtacactttagcatttttccatgtgtgaactgcatcaacatcataaaacatcaaaaaatacgtgacacatctctttagaaaacaggttattgcaaaattttgtgtgaagtcctttcttgttgaataagtaactgagtaagaatgtcacttttttggttttagaaatatattgttcactcattgacactttaaaaaataatctattaaggggaaattcacataatataaaactaaccattttaaagtgaacagtttagtatcattttgtccattcgcagtgtgccattaccacctcagtttagttccagaacatttctgtcattccaaggtaaaaaaatatcttagcaatttagcactttctccattttcctcccttccccacccactgataaccaccagtctgcattctgtctctatggatttattggatatttcatatacatggaatcacataacatgtgagcttttgtgcctggcttcttttacatagtgtgatgttttgaggttcagctaacttgtaacatgtaccagtaagtagtacttcattcctttttatagctgaacagtatttcatattacaatattcctatatgtgtttatagtagaatttgtttatccattcattttttggtggacatttggactgtttccaccttttggctattgtgaatagtgatggtgtaaacatgcatgtacatgaacttattttgagtatttgttttcagttttatggggcatataccaatgagtggagttgctggatcgagtggtaattctatgtttaactttttgaggaactgccaaactgttcccagcactcattggttcttaagtttgagaaaattaatctagggtattatcatctcaagatacatagtctgaaattttgtttatatcagtggttctcaattgagagtgatttttgagacaatcaagaatggcttcaaacatttatcccccggggacgtttggtaaagcttggagacatttttgattgtcacagctggataggtgctgctgttgtctagtggagctagggatgatgttaaacatcctatgatgcgcaagacagccccacgaacaacaaaaaattatctggtcctgaatatcagtagtactgaagttagtaaatcctggctaattttattgtcatcattagagactagagtgctataatctgtctccttcccattcatctttgattttgtagtaatgtgaaacattttctttgttgctttttttccttttgccattattaaaatgaaaaattctgatttcttaactgtgctaaatgaaaactgaaaaaaagactacagagatgaagtctctagtgttctatatctttttgaaagatgggtcagtgctttctacaacacaataaaaatggaaggatgatgtaataactataatttttttcactattgcattattttccatattcttgtcattttagtgtttttggaatagttgattaagaaatgatggactactaatgcctcctagtatgataaaatagcaaattttcagggtataagaaaaataaccactaatattccatactatttgatagatttgtaataatgtacaattaacctacacagtaatgacatgatagaatgaattgtcttatttaaaaatataagtaaatttttattttattctttttttttttttttttttgagaccgagtttcactcttgttgcccaggctggagtgcaatggcgcgttctcggctcattgcaatccacctctggggttcaagcgattctcctgcctcagccacctgagtagctgggattacaggtgcctgccaccacgcctggctaatttttttgtatttttagtagacacagtgtttcaccatgttagccaggctggtctccaactcctgacctcaggtgatccgcccgcgttggcctcccaaagtgctgggattacaggcgtgagccactgcgcccagcctgttttgttcttggaaagatgtctggaaagactaaaagttttgaaatgtctgtcttcaaagttagtgttcatgagagaaacatacagataaaatttggatacagggttaatcactgtgctctgtagctccctgtaagggagatcattctatactctcagaaaaagattattaaaaaacagttttgatttctacttcatttttatgaattttgattcttttaaagattttggtataaagttttcctccttaaattatcaaaataattatattttattttgtttactttttttaggagagaaagaaaaaataaaatatacttggggaagttgtacctgccagaattagcaagagctttctttaagaagacatttgtcaaactcaacaaattgaaggttaacaccttaagagttgtagttactgaccaggtaaggtttaaaaatgtattttacttttaattattattttacggatggatagagagatagtatgaaaatgtattatttttaacagatgtcaaattatgaatgtgattgataaccagattttgaaaagtggtgtgatttagaatatgtatcaatatacttcattaccaaatgttagtatttttattaaacctggttatctcagcttaaagttttaatttgttaaatatgtttcctctttgctgtgatatctaattttgctacagaaacaaatttgacctgccagattttctttctctctgcttcttgcatcactcatatatattcacagcatctggagtctgtgtaaagtcatcagaaacaacacagagggatagataaactgaacacagctgggaatcagttttggcctagaatatatatattctaatgtatactgtatgttgtttgttttttctgttggttctttaagtttgtaaggttgaaatggtccaaaagaaatttttttcttctttggtaatatattctagagaattgctttaatattataaaatatacaggattccccccgccccgtttttagcctttaaaaagtgctgtgtgttgaatgccatatttgatttgaggaatttcaatgagtatttgatggagattttatttgtaaatgttgctattaggaggatgagttaagatcgtgaagtggaaattttgtctgtattaccacgttttcttatatgccttttcattttaaaaaaggaatttttaaaattgtgagtcttataaacatgttacatgaaacaagccagatacgaaaaatatatgattccgtttatgtaaaattcaaaagcagccaaactaatctgtgctgttgaaagttgaattttacctttgcagggtggaatagactggaagcggggcttgggtggcgtttctgaggtgccaataatgttctgtttcttgaactaggtgatggttacatggatgtgttcacttttgaagattccatggccatatcgtttgttttcttttctgtatgtgcacttgagtgaagttcttttctgtatgtggacttgaataaagtttgcgatattaacattgttaaattgttaccaggattcaacaaaggtgattggtgggggataatatataagtacattattgagttttagtttatatagcaatttgaactcgtaaaacaacatggacgaaggatgaaatgaatcttagcatttaatttagaatataatttgtaataataccattttcttaagcatacacttaggaagaagaggaatttcatttaggacatagcgattttcaagtagaaaaaattgctttgttgtcatttttaaattacttagttgtactgttattaacttttaaaatttgattacttctttttgttatttaaggccatataagtacacttgatatttcttaacttcttctgtgaggttttcaagcttgtaagagtatcttctgtagttactctaaacgttaaaactaaatcagattgatatagtaaatccactttgtattggttaactctgaagttataattgagaagcacagttgaatttccttagtgaaaaaggtgtatatatctctacaacatctgaaacaacacaaaatatctgtgtaggttctagaacactatcttaatatgtttaatgtttatgctatagtatttcttttagtataatgagttcagtttttaaaagcctttgatgctaattcagagatccataatctgctcacaatgtctttcacatgtagttttgatggtaactgacaagctgtaagttaattagcacagaacttactaatgaggatgttaaaatttaatttaaaagtgaggatttttatttgtacactctggaccaattgaaggaaattcaatcatacatatgataagcatttcaggcactttttctacattcaggtactttattagataacaataagaaaatataattaacttaatgatagcaaagttttgaaagtatgctaagattgcttgtctttaaaactggggataacccaaaaccaaagcagtaaaataaggtctgttaattagcatggaagacagcttcttgaattaatatgtggtgttaattaacaggaagtctgatgttgtgttgtaattaccaccaatatttttgacatactgagtgactgaaggtgaattatatagatagcaattgaataaacatttttgtgcttaggaacgttttttctttgtttctgttttctagaaatatggacagacttcttagacttggaggaggtatgcctggactgggccaggttagtatatagtctcttgagcatttccttgtgtgtaaactacaagcctttttgtagttagccaaagagaaagaaattatccccaagaaaatcacctaacagataactctatggtaagaatcttaccttattgatgtttgttatcttgcaacactagataacatgtggaaaacatttattgtcttagtttacttttctcctgggaataagaattttctgttatttgctttgtttaaaattttgagatatgtaggattatcaaagttggcttttaggaaaaaaaaaccctcaaaatagcttacttcctgaatttacagtgtaaactttagatgtaacacaagaaaaagtaagcatgtcatcctgcttgccagatccagaaaactgacccatagaatgtttatatgtacagtcttaacactggtaaatttctgctagtaattatgatatatagatggattaataagtaatctctctcctttaaatttggtataaatggtttcttttataatctttttaaaaaataaataagctttcagttgttttaatattgtttatcttgttccatttgctgttgggcaaatgacctctagatttctgcctcaggatagtctatctgctttcagatcaagaatttgtgcctcttgtgagttcgacactttcgatctgtgcagtcatacattgagttaatactaattaacaaaagaaatgactatgtgtatttctcttcctaagacttttatatatgcaatgtattgttttatgaccaaatattagaaatatttttatagtcccttttaaaatctctttagtttccagctttcccacatttccttactgctatcagtgacttcatctttcttcaaagtaatctgtgtttactataagaagcagtttttgtttcagacttcatgaaattttcagtgttttagaagaactttcataagaactgtttgattaggtctatcatggtttatgacttttataaagttgaaatctttttgtgattctgtattgcattcttggatggatttcagttgtttttcgtttacttttgttagttttgatgatttctcatgtttctttgttgtcagcctatttcttcatgattcttcatttttataacacctgtataactcattctctcaagaggcctaagcctctttgaacttgatcctgaacctgtttccattcttttgtaaacattctagagagcttctagaatttctctaatttattctgaaattagtagtaatagtgttcaggcatgtgaaaatgtgagaagtgagcagaggtggtatgtagatagtgcagatttacctgcaaattataggtgaagatgttgccttagaattcttaaggaaagttgtatcaaatttaaatataaaaataactttccttaagcatagatacaataaattacccatcttggaaatccatgctggaaaacccctggacatgaaataatggttttactgaccacaaattgagctacattatatgtcaatggcgacttcaaagctttatatcaagtgaaaaacttaatgttttttcagtaaccttattggtttctgattaatcagccattgtgtccttagtttgtactcttttttgaagttaaaaatctgcttaagaatcatttcatctcaattagatgataaactctaatttgtggaactcttatttttatggtatctcccttatcctatactaggtgtaattttctttttctctaaaattttattttatcttgttataggaataatttgacaaatacttatgatgttacttttgtaacatgaaacgttaagtgtatttttttgcctaataagaatgttgtttattatttatttatttattataatttttttttgagatggagtctcactctgtcgcccaggctggaatgcaatggcatgatctcggttcactgtaccctctgcctcctgggttcaagtgattcttctgcctcagcctcccaagtagctgggattacaggcgttcaccaccacgcccagccgatttttgaatttatagtagagactatgtttcaccatgttggccatgctggtcttgaactcctgacctcaagtgatccacctgcctcggcctcccaaagtgctgggattacaggcgtgagccactgtgcccagactattatttatttttaataagaagtcaaagatctttggattgataatagctatcttttcattagataaggcataggcaccaatagtagtaaaaaaggagacacaaattggcccttctctccaaaaatcagtgggaaatgttatcttaccatttaatggaaaaggcagaattccctcccaaataggagcaggtcacttgctggtaagtttgtagatggccctcttaaaatgtggcagtagacaggagcagaacaggtaaaggcctcatatgattgagagttccttaaggttattttatttccttgattgaagaacaagaaccatggacattttatgagtgaataggccaccttaaatcatgatctatacgaataacccaattttgatgaacgaaatgtccaagacatatttttttttatatcagtgtccaaacagttgctactttactggcttgaagacattttgtttcactcccaattgacacaaacctggcggttactgtcagactctgcaagttaaaggctcacttctccacagaactacccttacttcagatgccagctatacttcatgtgtccccaagccatccacactttggactgacactttaacctgagtataaatttggaggtcctcacaacctcctcaggtttgataattcactagaacaactgacaaaactcaagaaagtgctgtgcttattattacaattttgttatccagaaatacagattaggaggaccagtgaaatgaagacacacaggatggggtctgggaggagatgcagagctcctgtgccctctcttcatggaattagggcatgtcaccctccctgcacatcagtgagtttaccagccagggaactccacctggtgtagctttggtttccgagtttttattgggactcggcatacatgagcttgattgattaaatcattgggtgatcaaactcaaaattcaaatctccatcctcccttcccaaatgggcctggctcaaagtcttagccctctaattaccgtgttggtctttatgttgatcagccctcatctgcaagctatctaggggtgtgcactaagtcacagtgttagcataacaaaagaaactccaagggtttttgaggctctgtgccagaaactcaggataaagaccagattattacgcaacaaagacttgttttcagccttgacttcattatttgtagaaacaattcagtatttcatttgaatttttcttgtactatgatactgatttttatgttgtttccaagagacatgaccccaccttgagtcccagtgcctttaatataacccagtagtagtaaaaaggtctttgggctttgctctatatgctaattggtcatgttattgttattattattattttgagtcagagacttgctttgttgcccagtctggagtacagtggtatgatctcagctcactgcagtctcgccctcctggattcaagtgattctcctgcctcagcctcgcaagtagctgggattacaggcatgagcctccacgcccagctaatttttttatttttagtagaggtggggtttcaccaagttggccgggctggtcttgaactcctgacctcaagtgatctgcccactgcagcctcccaaagtgcttggattacagatgtgaaccattgcgcccggcctggtcatgtttttttaatggaggaattcacagtaataatataggaatatcagtattataatcacagttgatactgatatttcattgtttttgaggccacttggtcttagttgttttatttgggagttgtagtagggctagtaggtaaaaaaggaacttgtaaataatcaaagtccccattcattctagtttcttaattttctctaaataggaggtgacttttctcttttccaaggctattccttccttgttcttggatctcgttctcttgacacactgcagatctccattgacccctttctctgcctacaaagatgtttaagtctcctgtatccaaaaaccaaaactctactgcatactgccattaaaccttttcttctatttatttctagaattcctgaaataatagcttaaactccataatctacttaattacctctgttcactcacatgagaatgcattctggccaactcctgtattactgtactggaattttttaaactgccaagtctattggcctatttttagttctcttttaactaaacttcaatattccacacttactatcttaaacctttcttttccattagtttttatcatgctgtcttttcctgtttctcattacggtgtccattcctacaaaacaactaagttttattttttttaatatcacattttaaaatgttaatattggccaggcctggtggctcatgcctgcaatctcagccctttgggagaccgagggggcagatgacataaggctaggagttcaggaccagcctggccaacatggggaaaccccatctctactaaaagtacaaaaatcacctgggtgtcgtggtgcacatctgtaatcccagctactcaggaggctgaagcaggagaatcacttgaacccaggaggtggaggttgcagtgagccaaggtagtaccactgcactccagcctgggtgacagagtgagactatgtctcaaaaaaaaaaaaagttaatatttgaatagtgataggctacaataattaaatttgtcctcagtcctccacttcagtttaacttaccagtagtttgaagcagaaataaagatgttttattagtactattaaaatttataaggtaacagctttaaattttaaatgtatttttagattttctttgttaaaatgcttacaaacttgaaattactaaaaggtatgagattattgtattaaaaacatatgttgccataatttggctacttcgttgtctttataacaactccacctaggtcttggcatctaaacgatttccaaaagcagtggaaacagagcccaagagatgagaatagccaaagcatattctgtactttttaaaaattttgatttctccctgggttcattttagctttggaaatagtcaatataagcttgaaagtagatggaacttaagcaaaatgtcagtggcatttagtaacttgtcttcagttttaatttgttaagtcaatattttgagtttctgtgtatcaggtattatatactataacgaattccaagacgaacaagaatatcaatgcctaatccagagccttacattataatagacacacaagcaatcatgttttaagtgcctagtacacattaactactttgaatcagtgaaagctaatgctcattgtaaataacgtgatttgtaagtacagtggaggttagtttaacttcttttgggaaaaattagaccaacttgggaaaaatgggaaaaatgagactaaggagatgatgtttgagctgagttttgaaatatgtgtcaaggcatattcaaaaggctagagaatagatacataagaaaatactgggaaaagaagttggtaaaggagtctgaagttggttatgaaaggtgttgaatgccatacttggtgatttttacttttttcccctaggtgttgtagtttcatgaagattttctttctttcttttttttttttttgaagtatgaagattttttttttctttccagtagacttgtgaggtaatttgatctgtgtttttgaaaagtaattctagtggtagtttggagaacaggtaaaggggaagagattaaaggcaaagtcatcaattacatgaatatttgtgactttcaaccttccaggcatataacaggattatatttttctgtcatctttgaagttagccttgccatgattttgctttgaccaatggaatgtgattggttaataggtcacttttaggtgaaagctttaagaatcagtgtgtgatttgtctgccctggtaataaacaacatcatgatgattgagcctcttttagccaggtccattattgagaatgacatacaacctgcaagttttaaagcaaagttagaaatcacatgatttcacactgtgaaattctgtgtaaaattagggtattttacacagaaatcacatgatttcacaatgtgtaggccaaactaaggacatatgcagcagggtatataatgcctgtaagttgtcactttgtatctctggtacagacctcattaatttcaggatgcaaaaataagggaaaaatactgtgggttagtgatcccagaaggcttcctgaatgtggtgagatatagtgtacattttgaagaattatttccggtggctagataaaaaaaaattcatgaattgaataggatgtattttgttataactcccaaatcctcacagtgtatggattttttgtatattcactaataactttttctggtttcttattgtggtggttgggacagaaatgttgtttcaattgtttgtctcaggttttggtctaatgtttggtagagaagtttaatttaacatagcaatggaaaaaatgactggaataaatgaaaaaataatactgttttcatggatgaggactctatatcaccacatgccaattctttccaattaatcatacattcaacccagtttcaataaaaatatcaaccagaatgttcatggaaataggcaaactgactctagaattcatataggaaaaaatagttcaagaatagcaaagaaattcctaaaaaggaaaaagaaatttgctctaccagatttcgaaacatattttaatgctatatgactgaagtagtaatatattgttgcagagataatcaggtagaccagtataatcaaaaacccagaaatacatccatcaatatatgggaacttggtttgtaatataagtgacattaaaacagtggagaaggagaggcctgttcattagatgatgctgaagcagtggtagccagtaagggggaaaactaaaattagattcctgccttattctatacaaaaaaaaatttgtaccaaatggattgaatatctaaatatgaaatcaaactttataattttttttgttttttaagatggagtcttgctctgtcacccaggctagagtgcagtggcatgatcttggctcattgcaacctccacctcctggactcaagagattcttctgcctcagcctcctgagtatcacaggtgcccaccaccacgcccggctaatttttgtagttttagtagagacagggtttcaccatgttggccgggctggtctcgaacttctgacctcaattgatccgcccacctcggcctccgaaagtgctgggattataggcaagagccaccatgcccagtccaaacttcataatttttgcaggtacacccatttgaatggctattatccaaattaaacaacaacaacaacaacaaaataagtattggtgaggattggagaaattagaactcttgtacattgatggtagaaatgtaaaatggtacagataatatggaaaacattattattccttaaatgattaaacataggattaccgtataatccagcaattcagcttctgggtatgtgcccaaaataattgaaagcagagactccaacagatgtttgtacaccaatattcttagcagcattatttataatagccaaggggtggaaacaactcagatgtccctcaacaaatgaatggataaataaaatgcatatacactcattccttagtatcctcgggggattgattctcggacctctgatgataccaaaatctatggctgctcaagtcccttagataaaatggcatagtatttgcgcataacctagacacagtctctcgcatacattaaaccatctataaattacttataatgcttaatacagtgtaaatgctatgtaaatatatataaaacatttttattttttattgttgtattgttattttttattgttttttccctccgatattttctatctatggttggttgaatctgtggatgagaaacctgttgatatggagggctgattgtacatacaatggaatattattaaactttaaaggaatgaaattctgacatatgctacaacatgagtgaacctaaaagatattttgctaagtaaaataagccagacacaaaagacaaatgttatatgattccacttacatgaggtacctagagtatcagattcataatgatagaaagcagaatggtagttgccaggagctgggaagaggagagaatagggagttattgtttaatgggtacggagtttcagtttaggatgatgaaaaaagttctggaactggtgttggagatggtggtattggttgtgcgacagtgttaatgtgcctaatgccactgaattgttacttaaaaacagttaaagtggcaaattttatatatttactacaaaaaagacatttaaaagttcagttaccgtatctttaaaataaggttgataataccaaccagatggttctttataaggattaaataaactcacatgtgaactagtcaggtgcatagcagatacccttccccaatccccccattttttggggcagaaatttttatgtctttatgacctcaagataggaaagcacaactcaaaagattcataatttgactacctcaagacaatattactaattattatccccaaaagactacagaaacaaacttataagacaagcaaagatgaagacaggatactggcaacacattaatctgcaacaccacgtagttcattcagcagaaccatagataagtaagacaaaaagatgacctcatttaacaaaagaatgtgaaataagaatggccaaaaaaagttatgaaaagatagtcagtgtcactgtatatcagggaaatgaaaactaaaacaactattagattagttaaaaaacaaacaaacctgtggaattaagtgttaatgaaaattggggaagcaggaattctcatgtaagctgtgtgtgtgtgtgtgtgtgtgtgtgtgtgtgtgtgtgagatgttggttaggaattatagctcagtgcttagatctttacccggcaaataacagacaataaatatatgttaaatggacacaccatatgtggtaaatggttaaagtcacttcggagagcaatttgacaatatctagtaaagttgaaaatgaccaaaattctgttactaaacaattccatttattcactttagggaaacttttatatgtctatatcaggagacatgttgaagaatattgttaaagcattgtttgtatattaaaaattgcaaaatatttaaatgtctaaatgtgttatgatgaaattaatgcagcagctaaaatgaatgaactaggttctatataccaatatgcataatagaccttacaaacatagtaagagaaaaattcagttgtaaaaagatacatacaacatggaagcatgtaaatttaaaaaacataaagtaacacctttttttagagttatataactcctgagtaaaaatattacaagttgttctacagaagcagtatctagtacaactttctacagtgatggaagtgtccatatctgcaccattcaatacggtagccactagtcacatgtttgttaagtactggaaatgtgactggagcagctggagaactgaattctaagtgttatattacttaaatttaaagagtcacatgtacctgttgagtccatgagatgtatcttgtctaactgaataactgaatttctaattttatttaaatttatatggttatatctagctagtggctaccatattgtacagcgcaggtctagataactcacaacaaattcatgaaaaaaggagggaggcaaaaggaacttcaactttataatgttctctctttagtacacaaacataaaactaaagcaaaagaacaagtcatggaataacactaaataacattaaataacattaaataacatttttctttagtactttttagaagagccaccaaataaagtcagaaattcatttgaatttattttttagtagttttttaatgccttacctaggtattccattttctctcccagtctttaatttgaaggcgataatactagagaggttaccacagtatagatcttgcagggccctgtagaaaattctcttctgagtgagttgggaagctattagagatgctgagcaaaggagttatgcttatcagacttacatttttaaagaacttggacactctgaagatgaagctaccacaataatgttttaaaataaattacagattattgttctatttttattctatatctgctagagcaatcctgccatgtaatgaaccatcatagatcattgtgtacaattagtctttttttatatctgtcacatctgtcataaatacaagctttaatttttgctataagcactggcatagtagtatgcaaatgagcagacctttacaaaatgttttcataggttttctttatattctttgaattatttagcttagctgtattgacagtatttatatgctcatgaatattctggttaccttttttttctttgagtatctgatgtaatcctttatacatttatgaaggtcctttctaaacattagtagattaatttgggcattttctcttaagaagtagagaagggtcgaaaaattttaattgttttatttcttagcttaactacaaataatggtgattttgctttagaaacaaagcagaattacaagatgcctttaacgtttttcttatttgctgctcttgtgaggttataattttattaaatataggtcctaatcattctattcatatactctgatatttatacgatagaaaattaagaaaggggtcaggtcaaaagcaagctaattagagcatattctttctagtcgtcattgtagtgtgattattctgaatacgtattaaactctgtgaaaaatagggtgttcctgagaggcctcaaatctagtcttgagggttctcagataagtaaaagggacataaattttccataggtacatgatagttaacctgtgtcagtttgtttgaatattttaattgtgataggtcttttgagaggaaaggtctttgacacctgtgaatgctaaatttctattttgatatgcaattatgataaataaatttgttcaagttcttagaatggaaggggattggtgataaattttcagttacagtgaaactgtccttcaaattagtgacattctgatgaaataagaaaaaataaaaattgtgaaaagtaatgaaatgtttaaagttttaaatataaagtcaaggatatgatggatttatgacatctgataccatttttggtagaaagtatatgggaaagaagacagaagaagatatctctgtctaatatgggaaattaagacattgcaacataatctcaatattccaaatgtatgggacgttatgatcaaagatacaatctgtgttttctttccctaccttcaacattgttttacacatttgatttactggttacattgctatttggcacattgatcttcgggtttcctatcttaaacttgcataatttaatttgtaatttttcagttcatgttatcatttgggaagttctctaattatcagattcatttaaaacccaagcaggtaggactgattctcttacaacacagactcaaggtggttctctgtgggatgttgtctgggttgagtgccctgaaagtatgccaccagagcagggcagtggtctccactgggcagcctctcagtgctgctttttaagctgttgcccgtgattgcacaggctcttcccttcagcagactgaatgcctgtgaagggcataatggcttagggacaatagagtaaataataaaaataataaaaattatgatagttgtacttttctcttactcattgtacattttcccctctttttactcagttacattcttacctgcctgtggtaattttctattccctagtgttgtaaacggagcctgagttattagaaggaaaatgcttatcaaaagtagacagtagaatgacaaaacctagtttttgaaaagttcaccattctgttttatagaaaaggaaaactttcacttcataggaaacaacatatttcactacctagtagaatacatttttgttgtcattgtatagctatatcactatagggagatgattttgattttgctttaatttgtacctggtttcacggtttctggttatttctctcccatttgtgatttctggttattgtattcatttcctgatttctactgtatagactagatgatgtctttggaattttttttttttttttatttttaagacggagtctcactctgttgctcgggctagagtgcggtggtgcgatctcggctcagtgcaacctccgcctcccaggttcaagcggttctcctgcctcagcctcctgagtagctgggactacaggcacatgccaccagggctaattttttgtatttttagtagagacggggtttcaccatgctgaccaggctggtctcgaactcctgacctggtgatctgcctgcctcggcctaccaaagtgctgggattacaggcgtgagccaccgcgcctggcctctttggatattttatagctcagccattctataaggcttttgccttgggagctttcaacttgaaatggtatgaaaattgtagtaatatagggagacagtcagatactgtgaatagggaatgtcattgtaacatctagaacaaatgtatggatctataaagagaacccacatattttgaaatgtgtattaaaattttcctctggaatttaaaaaaaatggggtgggggagcagaggagagccaaaaggactgatgctgagtaccttccttattctgatatgaagtatttatgcacttaattttttaatcctcacaatgatcctacatgggtagggataattattttcatattatagggtcgagtcacagaactaacaagaagtggagctagagctggaacacaactttttctgatgtcccagcctatttatatcaacatttctttaggtagataaaatgaatagagttgtcatggctacttgtttcataaattaatacaacttaaatagtcttgtaatttttattgtagatcgaaagtaagatgcttgctttttaaaatttttgggaaattaaaatatttaggagggattttctttatcctgacatgtaatacttggcccatgttttaagactatttaaggaatttgtgaatatttcattttattccctatgataatgtgaatcttcacacattggtaaaggtagaggttacaaatagtacaacttttaaaagaaggtttacatttcttacttttttacgtctttaaaacgttttccttacagtccagaaactgattagtgcttctaattgccaaaatatgttgttttatttaaaaaaattattttgggaaaaaggcttctcttgttaagctaatttcaatgaccaatcttgttgtaccttgacttgtaataatgaaaaaagaggtacagagagctgttttatttgaataatagacttgccaattagccatcaagtgcttccatctgtgaaattgttgatcagatgggttagctgggatgtttccagactagggcatcataaatggcacttgaaaactctcactttaatgatgaggtttcaagtattacactgcttaatgctgtggaacctttttctccttttgcagtaccatgtttttttagaacatactgatcccatttatgaattctgtggcatcaagagaatttgggagacctgccactgatgaaaagttctgcctaatctgctgctctggcctgtgctgggattacaccagagtgctaacagcttctttcatagcctttccagtaattttggttggggatctgactggcacaggcaggtgatgctcattgcttatgggccatggagctggcacactttggcaagtttctttgcactttcccattaatgtaaactcattttcaaatatctcacccccttaaataagtgtataagagcatagtagcctaaggccacattagtgttgagatttctacgtgtaccccttgtgtgaaatgactttagcatctgtcttgtacatttttgaaggatttaaattgcttattggtaattattacattttaaaatttgtttaataatagcatagaaatataaatttctggaaataattgttgtatgtctttccttactgttccatatcttcattgctcatccttatattttataggaagtttccttttttagtaagttgacttcctcaaatgcctgtgcatgtgattagatgttagagtctctgagtgacattttcccttggtaggactgtactgtgcttttcttttcctgtaaatccaaattcctgaaatttggccagacttctgggttaccagtctgtgtggggtcaaattcatggcccatgtcactttttggacagtagcatggccttctgcctgtcctggcacaggtttcggacctaccaactcactatgaaaggcagtatatattgggcagtggtaaaaacccagggctctggagttaggccagatctagacactagctgagatccatggaagaggaagagagaatgagaatgcagtgtaaatgttcaagaaagcagatagtttaggatcttgttcctattcttcttccagagtagatcacaatttagcatcattcccagacccttcaacctcctcaagtggacaagctcccaatgagagaaaggtatcaatttttaaaaagattatgttattttgccaggtgtggtggctcacgcctgtaatcccagcactttgggaggccaaggcaggcggatcaccaggtcaggagttcgagaccagcctggtcagcatggtgaaaccccatctctactaaaaatacaaaaattagccaggcatggtggcatgcacctgtaatcacagctacttggtaggctgaggcaggagaatggcctgcacctgggaggtggaggttgcagtgagctgagatggcgccactgcactccagcctgggacagagcaagactccatctcaaaaagaaacaaaaaacaaaaaggccaggcctggtggctcacacctgtaatcctagcactttgggaggctgaggtgggcggatcatctgaggttgggggttcgagaccagcttgaccaacatggagaaagaaaccctatctctactaaaaatacaaaattaagtgggtatggtgttgcatgcctgtaatcccaactactcaggaggctgaggcaggagaatcactttaacccaggaggtggaggttgtgttgagccaagatggcaccattgcactccagcctaagcaacaagagtgaaactccatttcaattaaaattttaaaaattatgtaattttttttgactgcctggccacagtgtcttttttgttcgctaaggtttgtgtgttgttctctctccacagcaaaaatgtccagtagttaatagataaccttgattaatcaataggtttccctttacaggtgaggaaattgaggcatgtagaaattaagtaaattattcagtatattaagacattttttaaaaagtgccttcagagcagaactggaagactgtctttttaaagtgctcctctgtagagcattaaaggaagtataagaaagagaaaatgggaacagatgtgaccatgttgatggaagaatagaattttcccttctttgaccactgccactttttcatgctctttaagtatttttcttctgatgtgttttctttttttgaaaatagagacagggtctcactatatcgcccaggcgaactcctgagctcaagtgattctccctcctcagcctcccaaagtgctgggattatacaggcatgagccatcacgcctgccgtttgatgtgtgtttttctatctgttcccttaattcctcagaaacaggcactgtgtcatcttttgtgtggtatctcaaatagcattgtgaatagatgaatgcttagtgaaattagggtagtggtcagcagtatttctaggaagcctcagagattacttctgtcccttaacctctaccatgcctcagaacttctgagccttttatgcttctaattaacagaattcagggagtttttatgagaaacaaggtatttttaaataggtaaatagttatttttaaataggtaccagtatatgacatgttacttcagaatacaaatgggcacatgttgaatactaagtttccctgttgtctctgttcccttctttagagacaacctctgttaccagtttctttatgtccttccaaagataattctatgttagtattgtccagtggaactttctgtgggttggaaatatattatatttagctgcccagtatggcagccattagccacatagtgctaccgagtccttgaaatgtagctgttatgactgaagaactaaatgtttaaattctgtttaatttaaaatagtttaaattacatagctgcatgtggccagtggccactatattggacagtgcagtgtacacaaaactggattctagagattgtctcatcccatatccatagatataaagctgcatgttttttcttaaaggatggcttgctttcccatttttttagacaaaccatgatttacttaattagtgctctactgatatacacttaggttgtttcttatcttttgatttacaaaccgtgttgtagtaaatatctcattgaagacgttatttcacatgcattttcccagaggataaattcctaggagtggaattactgtgtttaatcagtgtagttagcctgatatggtagaaagaatacaggatttggctttgaatttaggctttactacttagtcactttttagacattgattaacttctttgaacttcagcttccccatttataaaataggcacagtagaatccactttgccagggttatgttattattagaagtaatatatgtaatggtcttctcaactggtattaggagcttaaattaggaatggtagataatgaaagccctactactattacttgttttattaataaagagatcattataagcctagaggcgtatgtttaatgctgaattgtggcagaatagctttgcttcgcccattttaggtttgtaaatatggtctccaccttttattcatttggtctccaccttttattcatttggtctccaccttttattcatttaacttacttgaattatatgtatatatatagccatctataaattacttttcatgtgctaatttataacttttatatcaactggcaaaattgtggtgccttgcctgtcagctgatagttaaatttaagcagagtcaccatattaataaaacactgcttgtatttgaatattttatggcatattggtcggaaacaaggaaatgaagatgctgatactatttacgagcagctgtaggttctaaaaccggatgaattatggaagcatattatgagtttggatatcaattttttctttagtattttcagtgatgttacttatttgaaacccttagaattacattgaagaagtaaactttgcaacttgattccttgaccacagttatatttattatttatttatttatttattcatttattttgagacggaatcttgctctgttgcccagactggagtgcagtggcgtgatcttggctcactgcaacctctgcctcctaggttcaagtgattctcctgcctcagcctcctgagtagctgggactacaggtgtgcgccaccatgcctggctaatttttatatttttaatagagatggagtttcaccatgttggccagtctggtctcaaactcctggcctcaggtgatccactgcctcagccatccaaagtgctgggattataggcgtgagccaccgtgctcagcctatgtgttatttttatattcttaatacactggcaattattaataagctcattttaagttttccttgacttcattttttataaacattaaggaagttcttttttcaaaaatttacactttcatatgaatcatttactttggaagtaacttattcaaagtcatttaaagaaaaattaatcttttaaaaaccattaaccaagatgtttacaagtatgctgattaagaatcaatttcaggaatgctctgtatctgtatgagcaagagggaaacgtgctttgttttgtttgtttgtttgtttttggtaaatctgagtacctaaaagtctcgtttgggagtgaaactcaaggggaaaaacagtgttaaattttattcctaaatttagtatttgtttctaaatcatatatattttgttgaaattagaattgctcttttttggtatcagtaaactaaatattaaaagatgtttattgttaggagtagtagtagcagcagctgtgtgccagacactataccaaatgccttacatatgttatctcatttaatctttacattaaccagtaccacgtggtatgattagcaccattcacaagggaaaatgggtcatagctttaagtggttaagataggattaaacctcagacttggtctttctaattctaaagtatctctgcacctaatcaatattttagtttgggagagtatcattcagattgttaataggcattgctatctttgtatactgaacttataggaattaaccagtgcagaaatgattgttcttagtttatggtgacggtcccatggctgccagtgcacatgactgtgaacagtaagtagtatatttttcaaagtgtataaacaggtacatttgcagtaattgagatgatgtgctgtagcaggaaggggattagactatggatcaggagataagggttctggttctcagtgtatgtcttgacctgtagcctgcacaagttatttaatttatatacatttattttcctatctgtatgcctttaaaaagtatgattatactctctgactacttaattgttacaagaattatactctctgactacttaattgttacaagaataaaaagggatgagaaaaatctaaaaacattttgtaactctctgactacttaattgttacaagaataaaaaatgatgagaaaatctaaaaacattttgtaaaaccatctagtactcaataagtaatttaacctcaaagatgaaggtctccaagcacatagccttgtggtgagttgtagagcccttgatgaagcatccctaaggtagttttttcttttttgcctagaatttctctccaagaatccttggaactatatttagagctataaattacgagaaatgaagttctgaaactgcgtttgtgtgtgcacatgtgcgtgagcatgtattcacaggccctataacgcagttatattgtaggtagggttaggagagtttttttttttttttttggaaagaaaaacttctcttaaaatttttttatttgggcctttctgaatgagtactatttttgccattgataacctgtatttgttgagctgctgtactcatattatctactctgtaagccttttttctactcttttagacttggaaaagcattttactttgtaatcactgtgtatgagaatgatcacaagaggaagtactaaaaaaggcattcaataactttataatactttttgaattttgagaatttcagtataggagtatttataggccttttgtatgtttttaatagcttaattgagatataattgacatacagtaaacgataatatttaaagtgtataatttgttaagttttgactgtatttactcaggaaaccatcactgcaatcaagatggtgaacatccatcattctcagaatttacatatgcccccagtgtagtccctttccttgcacttctctccccacccccagactaccactgatttgctgtcactatacattagtttgcattttctagcatgttaatcagtgggatcatataataggaactcttctttttgtctagctttcattactgtaattgttttgagattcttcagagtgtgtattcatatttcattttttttgctgagtagtatttcattggatggatatataacactttgtttatccattaacttgttcatggataatttggtgtgttttggtttttggctgttacagataaaactgctgtaaacattatgtacatgacattgtatggacaggtgtttttatttctcttgcttaaatacctaggattagattggctggaccatatggtaggtatatgtttaacttcttcaaaaactgccaaattgtttttcagattggttgtatcatttatattcccaccagcagtgtgtgagagttcccgttcttccacatccttgccagtacttgatatggttaatttttttaatttagccattttctagtggttaatagtatctgattgtggttttaatttgcattttctggatgactgatgatggtgagcatctttttatgtgcttatttgccattcatctatatattttagggatatattcatgtgttgcctggtttttactgggtgggttattttgttaatgaatttttttttttttttttttttgagatcatctactcaaagtttattggactgaacaaaggctgaatacagagatccaagccatgaggagtacatgaggtgtggtgcctataagccagggtcggaaactttccagacaaacctagatagctctactaggagggagtcaacgacctattgtatcaattagatcccagcctggacaagggcatgactattgctgtttggggacacgtggctctgtgttgaaggcaatgactgtgtggctgttgccatgtggcctgttctcccctaagccctgaaccaaaggttccaggcccagatgagaaggccactgggaatgcatgccataggggttgatgctggacattccccagccttccattaaatgaaaacattttctataaacttactgctttaaaaaaatgttttaaccaacaaacctaagaactgcaaatgagtttggtatagtataaatattgtcaaatataaaattccaagaaacgcatttgagactgatctgatgatctgaagttctaactaatctatcaaactttctaagaaaaggcataggtcaagaaatctttttaaagcaaacattattgcttctgctatagcagagtggagatttggctgagctggtaagaacctcagtgaaaaggtgtcttagcaatgaaagggctgaatccgagattcctctagatgaaaaataaggggaatggtcaagtaaattcctggtactggttctttgctgccctgtaatcaatatggcatctcacccccgacaaccaagccagccagagagagaagtggggttcccagggaaaagggtcggctgaccaccctgacggagctggtgagcacaggtgagctctacctcatttgtctctcattcctcaaagtcttctgtggtttggcttcagtgagggcaaaagaggggggactggagtgaaagtgaactctgcttttaaaatgttcgttttatctaaggtgtgcagggtgtgtggatagcaagtttgagtggtaagaaaaatcccagtccagggtctgagctctaactcttaaaactcttcagcttaacaaagtgacccacaggaacagacatgaacatctctacacagggcagggccaaaggtgttctcaggatcctgctagccaagggacaagtcctgattgagggtctagagctcagcagatttatggaggcagcatgcaccctgggcgcctgcccagactcctctctggggtttccattttatctctcaagcttttaagatgccaaaaggaaaagcctttaggaggacgctaaggataacttcgttattcttcagttctctgctcctcctccagctcctctttggtcatcatcttctcgtactggtttcccctcagcttcccggggctgtatttgaaggagaagccttctccgtcctcctcctcaggcccttccgatgatggccccttctcaccatccaagtcctgctcctcttcctgcctcgcctccaccgcctgctcctccgcctc
